United States Patent Application Publication US 2004/0072264 A1 - sequence listing, part 2

SEQ ID NO: 22 - DNA, 94810 bp, Homo sapiens
  misc_feature (10318)..(16791): "n" at positions 10318 to 16791 can be any base.
  misc_feature (32104)..(32123): "n" at positions 32104 to 32123 can be any base.
  misc_feature (44534)..(44553): "n" at positions 44534 to 44553 can be any base.
  misc_feature (67856)..(67875): "n" at positions 67856 to 67875 can be any base.
  misc_feature (76152)..(76478): "n" at positions 76152 to 76478 can be any base.
  misc_feature (83364)..(83433): "n" at positions 83364 to 83433 can be any base.
  misc_feature (90138)..(90268): "n" at positions 90138 to 90268 can be any base.
ggtgcttgggagggcatggctggagaggtaagatccagtcatgcaggtacatgatgttaaaaagtttgcactttattctgtaggcaattggagactcctaggcagtttagaagcaaaagaattatgtgaccatgtacatgaaagaagcaacatgaaagaagaatcagagaaaaggaggttatgtaattagggacgccagttacaaagctattacacatgtccaggtaagagatgatgggggcttagaccagcatgtggctttaaagatggagaggaagcccttgggaacaatgaaaggaggtggtggttgaaaatgtgggtctaaatgctaggtgacaaaggtggatattcggacagaagagtcatataggtcctgctgaggccatgggagaaaattaaaacacctactttgagtaacggatcatttagaaaatctgaagaaagctaacaacccttcccccagaaaaaacatacacaaaaatttagatatagtttcagaagcttcacatatagtatagtcccttctccccagttaatctcctcatggacattaattaagagtccatgattgagagaaggaagaataacaaagaaagcatccagaggaagggcctcacccaaggggtgagaagaggaagactccccaaccagacacctaggaaaaatagaagagagggtaaatgagggtacaagataacacacttgggtggctggcaagatggccaaataggaacagctctggtctgcagctcccagcgagatcaacacagaaggcacatgatttccgcatttccaactgaggaaactggctcatctcattgggactggttagacagtgggtgcagcccacggagggcgagccaaagcagggtggggcatcacctcaccagggaagtgcaaggggccagggaacgccctccctagccaagggaagctgtgagggattgtgccatgaggaatggtacactctggcccagatactacacttttcccacagtctttgcaactcgcagaccaggagattccctcaggtgcctatgccaccagggccctgggtttcaagcacaaaactgggcagccatttgggcagacactgagctagctgcaggagttttttttttcataccccagtggcacatggaatgccagtgagacagaaccattcactcccctggaaaggcgtctaaagccagggagccaagtggtctagctcagcgtatcccacccccacagagcccagcaagctaagatccactggcttgaaattctcgctgccagcccagcagtctgaagtcaacctggcacactcaagcttggtgcggggaggagcatctgccatcactgagacttgagtaggccgttttcccctcacagtgtaaatgaagccgctaggaagttcgaactgggcagaacccactgcagctccacaaagcctctgtagccagactgcctctctagattcctcctctctgggcagggcatctctgaaagaaaggcagcagccccagtcaggggcttatagataaaactcccatctccctggaacagagcacctgggggaaggggtggctgtgggcctcctcctggctctgaagagagcagtggatctctagcacagtgtttgagctctgctaagggacagactgcctcctcaagtgggtccctgacccctatgcctcttgactgggcgacaccttcccgcaggggtcgacaaacacctcatacagaagagctatggctggcatctggcaggtgcccctctgggacaaagcttccagagaaaggaacagccagcaatctttgttgttctgcagcctctgctggtgatacgcaggcaaacagggtctggagcggacctctagcaaactccagcagacctgcagcagaggggcctgactgttggaaggaaaactaacaaagagaaaggaataacatcaacatgaacaaaaaggatgtccacaccaaaaccccatccaacggtcaccagcatcaaagaccaaaggtagataaatccatgaagattaggcaaaccagcacaaaaaggctgaaaattccaaaaaccagaatgcctcttctcctccaaaagatcacaactcctcaccagcaagggaacaaaactggatagagaatgagtttgacgaattgacagaagtaggtttcagaaggtgggaaataacaaactactccaagataaaggggcatgttctaacccaatgcaaggaagctaagaaccttgaaaaaaggttagatgaattgctaactagaataaacagtgtagagaagaatgtaaatgacctgatggagctgaaaaacacaacacgagaacttcgcgaagcatacacaagtatcaatagctgaatcaatcaagtggaagaaaggatatcagagactgaagatcaacttaatgaaataaagcatgaagacaagattagagaaaaaagaatgaaaaggaatgaacaaagcctccaagaaatatgggactatgtgaaaagaccaaacctacatttgattggtgtacctgaaagtgacggggagaatggaaccaacttggaaaacactcttcaggatattatccaggagaacttccccaacctagcaagacaggccaacattcacattcaggaaatatagaaaatgccacaaagatactccctgagaagagcaaccccaagacacataatcatcagattcaccaaggttgaaatgaaggaaaaaatgttaagggcagccagagagaaaggtcgggttaccctcaaagggaagcccatcagactaacagtggatctctctgcagaaactctacaagccagaagagagtgggggccaatattcaacattcttaaagaaaagaattttcaacgcagaatctcatatccacacaaactaagcttcataagtgaaggagaaataaaatcctttacagacaagcaaatgctgagagattttgtcaccaccaggcctgacttacaagagctcctggaaaggaaaaaccagtaccagccactgcaaaaatataccaaattgtaaagaccatcgacactatgaagaaactgcataaactaatgggcaaaataaccagctagcatcataatggcaggatcaaattcacaataacaatattaaccttacatgtaaacgggctaaatgccccaattaaaagatacacactggcaaactggataaagagtcaagactcattggtgtgctgtattcaggagacccatctcacatgcaaagacacacatagactcaaaataaagggatggaggaatatttacaaagcaaatggaaagcataaaaaagcagggcttgcaatcctagtctctgataaaacagacttgcaaccaacaaagatcaaaaaagacaaagaaagacattacataatggtaaagggatcaatgcaacaagaagatctaaatcgtaaatacatatgcaccaaatacaggagcacccagattcataaagcaagttcttagagacctacaaagagacttagattcccacacaataatactgggagactttaacaccccactgtcaatattagaccgatcaacgagacagaaaatgaacaagggtattcaggacttgaactcagctctggaccaagcagacctaatagacatctacagaactctccaccccaaatcaacagaatatacattcttctcagcaccacatcacacttattctaaaattgaccacataattagaagtaaaacactcctcaccaaatgcaaaataatggaaatcataacaaacggtctcttggaccacagtgcaatcaaattagaactcaggattaagaaagtcactcaaaaccgcacaactacatggaaactgaacaacttgctcctgaatgactactgggtaaataaaaaaatgaaggcagaaataaataagttcttcgaaaccaataagaacaaagacataacataccagaatgtctgggacacagctaaagcaatgttaagaggaaaatttatagcactaaatgcccacatcagaaaggaggaaagatctaatattgacaccataacatcacaattaaaagaactagaaaagcaagagtaaacaaattaaaaagctagctgaagacaagtcacaacaaagatcagaggagaactgaaggagatacagacacacacaaaaaaaaccttcaaaaaatcaatgaatccaggaggtagttttttgaaaagattaacaaaatagatagcccactagccagactaataaagaagaaaaagagaagaatcaaacagacacaataaaaatgataaaggggatatcaccactgataccacagaaatacaaactaccatcagagaatactataaatacttctatgcaaacaaactagaagaaatggataaattcctggacacatacaccctcccaagactaaaccaggaagaagtcaaatccctgaatagaccaataacaagttctgaaattgaggcagtaattaataagctaccaatcaaaacaaaagcccaggaccagttggattcacagccaaattctaccagaggtacaaagaggagctggtaccattccttctgaaactatttcaaacaatagaaaaagagggaatcctccctatctcattttataaggccagtgtcatcctgataccaaagcctggcagagacacaacaaaaaaagaaaatttcaggccaatatccctgatgaacatcgatatgaaaatcctcaataaaatactggcaaactgaatccagcagcacatcaaaaagcttatccaccatgatcaagtcagcttcatcctagggatgcaaggctggttcaacatatgcaagtcaataaatgtaatccatcacataaacagaaccaatgacaaaaaccacacgattatctcaacagatgcagaaaaggccttcaataaaattgaacaccccttcatgctaaaaactctcaataaactaggtattgatggaatgtatctcaaaataataagagcaatttatgacaaacccacagccaatatcatactgaatgggcaaaagctggaagcattccctttgaaaatcagcacaagacaaggaggccctctctcaccactcctattcaacatagtattggaagctctggccagggcaatcatgcaagagaaagaaataaagcgtattcaaataggaagagaggaagttgaattgtctctgtttgcagatgacataattgtatatttagaaaaccccatcatctcagtccaaaatctccttaagctaataagcaacttcagcaaagtctcagcatacaaaatcaatgttctaaaatcacaagcattcctatacacaaataatagacagagagccaaatcatgagtaaactcccattcacaattgctactaagagaataaaatacctaggaatacaacttacaagggatatgaaggacctcttcaaggagaactacaaaccactgctcaaggaaataagacaggacacaaacaaatggaaaaacattccatgctcatggataggaagaatcaatattgtgaaaatggccatactgcccaaagtaatttatagattcaatgctatccccatcaagctaacattgactttcttcacagaattagaaaaacctgctataaatttcatatggaagcaaaaaagagcctttatagccaagacaatcctaagccaaaagaacaaagctggaggcatcacactacctgacttcaaactatactacaaggctacagtaaaaaaaaaacagcatggtaccagtaccaaaacagagatatagaccaatggaacagaacagagccctcagaaataatgctacacatctacaaccatctgatctttgagaaacctgagaaaaacaaacaatggggaaaggactccctatttaataaatggtgttgggaaaactggctagccatatgaagaaaactgaaactggacccctttcttataccttgtacaaaaatcaactcgagatggattaaaggcttaaacataagacctaaaatcataaacaccctagaggaaaacctaggcaatagcattcaggacatagacatgggcaaagacttcatgactaaaacaccaaaagcaatggcaacaaaagccaaaattgacaaatgggatctaactaaactaaagagcttctgcacagcaaaagaaaatatcatcagagtgaacaggcaacctacagaatgggagaaaatgtttgcaatctacccatctgacaaagggctaatatccagaatctacaaagaacttaaacaaatttacaagaaaaaacaaacaaccccatcaaaaagtgggcgaaggatatgaacagacacttctcaaaagacatttatgtggccaacaaacatatgaaaaaaagctcatcatcactagtcattagagaaatgcaaatcaaaactacaatgagataccatctcatgccagttagaatggcaatcattaaaaagtcaggaaacaacagatgctggagagaatgtggagaaatgggaacacttttacactgttggtgggagggtaaattagttcaaccattgtggaagacagtgtggcaactcctcaaggatctagaaccagaaataccatttggcgcagcaatcccattactgggtatatacccaacgggattataaatcattctactataaagacacatgcacatgtatgtttactgcagcactgttcacaatagtaaagacttggaaccaacccgaatgcccatcaatgatagactggataaagaaaacgtggcacatatacaccacggaatactatgcagccataaaaaaggatgagttcatgtcctttgcagggatatggatgaagctggaaaccatcattctcagccaactaacacaggaatggaaaaccaaacaccgcatgttctcactcataagtgggagttgaacgatgagaacacatggatacagggaggggaacatcacacactggggcctgtctgggggtgggagctaggggagggatagcattaggagaaatacctaatgtagatgacgggttgatgggtgcagcaaaccaccgtggcacttgtatacctatattacaaacctgcacgttctgcacatgtatcccagaacttaaagtataatgatttttttaaaagcacgaatattatcctcattagctaccttataagaatgttatattaaatgatgtattttgtgaaaaaaaaaaaaagtttgttcttgaggtcagaggtgcctcatataacaccaggcagactaatcacatggccgatgattaaaagagacatagacaaacttctcattttttagatgtttggaaaagacttattgctcaggtaggagtagccagaaaacctcaaaaaagagctcgagggggcccagaagcagaatcagatgcaagtgaagtgcagagtactcagaaagtccaagagaaaaacactcgctgggcatatgtaggcctctttctttagaaaactcagcaagactcatgtattgaatgaattaataaccttggtttcaaccatttgtatatatgtggactgtaggtgtgcagatgtgtgtaactgcctacatgtgcacttagtattatgcatatatgtatatttacatataaatataatgatgcatttacataaaggcatccatttggcatacatacctatgcatatgcagtataaggctggattattcccctgccacacacaaagattttgctgtccaaagactcagtgcaatgaatggcatggaaggggctctattttcaagggtgaagcaatagagaaataccgaaggcctcggataacctgtgatggggatcccacgaaagccaccggggacagtgccagtaagcttatcactcctgccatagacagcggacttcaaagaaaaactgaaaccctttctccggaaataatcaggaaggatcttattttcttctttgaggtcagcacattttgcttttcaaaatcaaatccacagcagttcattagtaatgtcccacaggtactgcctcaagttggcagctgtggaagctaaagaagcataagacctgattcttgacctcggacaatttacagtttagctgtggaggtaagacagggacacagaatattatgtggcaattgaaagtgtaaatattatagatttaagtagggtaaagagctcattctgtagtagaggggtcagtgaaaagtaattgttcacctggtaataagagaagatctctgtgaacaaagtctaagactgcaaacttaggactgttgggagatagtcagatagattcatatatagatacaaatctttaccatcctcagacatccgccaacttggttgtttaggttgtagggcttacatgaggaagggtgtataatagataactctaaaaatgtttgagccttagacccagtgagtgagaaagagtgtcatcatttaatattctcctgacattcacctgccccttctgcatctgtggctgtgactgaggacttggttctttatatcacccagtgttcatgaggattctctggagaaatttcttgctggtctcagtatcaagaaagggggatcttctcttgagcaattttgtttttggtcttgcatgtgataggaattgaactttagacaaggcctctctttaaacttgactgctagaaatgcaggagacaaattttggtcccacctgtagcaagggtatttgactctatgagatgcatttatttcaaatgatgttcatttttggctccatcttgtgtgcctcatttttcatttcacacacttctttttgtaggttatgtgctcttgtaagctatctcgaattctgttttaaggacaaggtagcatataaatataaggaaatatataaatgaaacagaggaaggctttaaagtccagaacactatggccaggaagacaactatgactgtggctagagttatggtctgtggccgtgataatgagtgtgttattagggcagtccagcagtgattacagggagtcagacagacctcagtccaagtcagaggtctctctgctgtttattagttgtatgatctaaggcatagcattctctaaaccttcattttctcatctttacaacagtgatctctttgtatcagggagagtggattaaatgaggtaatgtatagaaagcacttagcacaaccgcactcaatcattagctattgagattatcagcactatcacctggacaagcagcggatgggccgcccctcttggccaggtcttctgtgcgcactgacgttgtatgaaagttgtccccacatctcctacacccaccgacgccaggcggccgcgtctgggccagatatggatcacgcctgtggagcgcacctccacacaggcagccctcgtccaaggtgcagggcgcagggcacagggcacatgtctacggcccagtcctgcagacggctacctagagaccccagggcacaggttaaggcaacttcacaactgtctttccgttcctttcccctgccggactccgcgctctgatatatacaggagaggccctggaggggagaaggcgtcctcactgcagtgctccgagcagcggccgcaggaagaggcgtggaagctgcgggtcggctgcgggaaagggggtcccatgggagccgctagcgcagcccgtttcccgagctgaggtggaggtcgaaacgcacaggtgccctgcaaggcgcgggcgtggtagccgggagcccgctcctctccaactcccctgagacttaaccctttggccaagagaggtcgaaggcgggcaggggtgagagaaccgcgaggcgcaggccgggcacccgcggaaagggggcaggtttcggggaagagcggggcgccgcacgtttcctgcagccgccagcatcagcgtgtcaggtggttgccaggcgggtgtgagcgcgcgcgcgaggcagagggggcgcgctcgcacaaagtttgtgcctgcggtgcacctcggtcgggctcgccgggctcgagggctggcgggcgccggggctacgaggcccgggggggagagagccggcaggcggcggcggtggtggcgggggcgatgcgcgcgcccggccgcgctaggtgagccggcaccgggagccggccgcggccatgggcaccctgggcaaggcgagagagctccgcggtgagtagaggcgcagtggccctcgggagcgcctgtgtcctttcttgggaaagaggcccctgcccgtcgccccaacaccccgagggaagttgagggcggaggggggccggggtcggccggagtcccgggacaccagcgcgacgggcggacgtgtccagaacgcccgcgcgcccggggtttcggnnnnnnnnnnnnnnnnnnnnnnnnnnnnnnnnnnnnnnnnnnnnnnnnnnnnnnnnnnnnnnnnnnnnnnnnnnnnnnnnnnnnnnnnnnnnnnnnnnnnnnnnnnnnnnnnnnnnnnnnnnnnnnnnnnnnnnnnnnnnnnnnnnnnnnnnnnnnnnnnnnnnnnnnnnnnnnnnnnnnnnnnnnnnnnnnnnnnnnnnnnnnnnnnnnnnnnnnnnnnnnnnnnnnnnnnnnnnnnnnnnnnnnnnnnnnnnnnnnnnnnnnnnnnnnnnnnnnnnnnnnnnnnnnnnnnnnnnnnnnnnnnnnnnnnnnnnnnnnnnnnnnnnnnnnnnnnnnnnnnnnnnnnnnnnnnnnnnnnnnnnnnnnnnnnnnnnnnnnnnnnnnnnnnnnnnnnnnnnnnnnnnnnnnnnnnnnnnnnnnnnnnnnnnnnnnnnnnnnnnnnnnnnnnnnnnnnnnnnnnnnnnnnnnnnnnnnnnnnnnnnnnnnnnnnnnnnnnnnnnnnnnnnnnnnnnnnnnnnnnnnnnnnnnnnnnnnnnnnnnnnnnnnnnnnnnnnnnnnnnnnnnnnnnnnnnnnnnnnnnnnnnnnnnnnnnnnnnnnnnnnnnnnnnnnnnnnnnnnnnnnnnnnnnnnnnnnnnnnnnnnnnnnnnnnnnnnnnnnnnnnnnnnnnnnnnnnnnnnnnnnnnnnnnnnnnnnnnnnnnnnnnnnnnnnnnnnnnnnnnnnnnnnnnnnnnnnnnnnnnnnnnnnnnnnnnnnnnnnnnnnnnnnnnnnnnnnnnnnnnnnnnnnnnnnnnnnnnnnnnnnnnnnnnnnnnnnnnnnnnnnnnnnnnnnnnnnnnnnnnnnnnnnnnnnnnnnnnnnnnnnnnnnnnnnnnnnnnnnnnnnnnnnnnnnnnnnnnnnnnnnnnnnnnnnnnnnnnnnnnnnnnnnnnnnnnnnnnnnnnnnnnnnnnnnnnnnnnnnnnnnnnnnnnnnnnnnnnnnnnnnnnnnnnnnnnnnnnnnnnnnnnnnnnnnnnnnnnnnnnnnnnnnnnnnnnnnnnnnnnnnnnnnnnnnnnnnnnnnnnnnnnnnnnnnnnnnnnnnnnnnnnnnnnnnnnnnnnnnnnnnnnnnnnnnnnnnnnnnnnnnnnnnnnnnnnnnnnnnnnnnnnnnnnnnnnnnnnnnnnnnnnnnnnnnnnnnnnnnnnnnnnnnnnnnnnnnnnnnnnnnnnnnnnnnnnnnnnnnnnnnnnnnnnnnnnnnnnnnnnnnnnnnnnnnnnnnnnnnnnnnnnnnnnnnnnnnnnnnnnnnnnnnnnnnnnnnnnnnnnnnnnnnnnnnnnnnnnnnnnnnnnnnnnnnnnnnnnnnnnnnnnnnnnnnnnnnnnnnnnnnnnnnnnnnnnnnnnnnnnnnnnnnnnnnnnnnnnnnnnnnnnnnnnnnnnnnnnnnnnnnnnnnnnnnnnnnnnnnnnnnnnnnnnnnnnnnnnnnnnnnnnnnnnnnnnnnnnnnnnnnnnnnnnnnnnnnnnnnnnnnnnnnnnnnnnnnnnnnnnnnnnnnnnnnnnnnnnnnnnnnnnnnnnnnnnnnnnnnnnnnnnnnnnnnnnnnnnnnnnnnnnnnnnnnnnnnnnnnnnnnnnnnnnnnnnnnnnnnnnnnnnnnnnnnnnnnnnnnnnnnnnnnnnnnnnnnnnnnnnnnnnnnnnnnnnnnnnnnnnnnnnnnnnnnnnnnnnnnnnnnnnnnnnnnnnnnnnnnnnnnnnnnnnnnnnnnnnnnnnnnnnnnnnnnnnnnnnnnnnnnnnnnnnnnnnnnnnnnnnnnnnnnnnnnnnnnnnnnnnnnnnnnnnnnnnnnnnnnnnnnnnnnnnnnnnnnnnnnnnnnnnnnnnnnnnnnnnnnnnnnnnnnnnnnnnnnnnnnnnnnnnnnnnnnnnnnnnnnnnnnnnnnnnnnnnnnnnnnnnnnnnnnnnnnnnnnnnnnnnnnnnnnnnnnnnnnnnnnnnnnnnnnnnnnnnnnnnnnnnnnnnnnnnnnnnnnnnnnnnnnnnnnnnnnnnnnnnnnnnnnnnnnnnnnnnnnnnnnnnnnnnnnnnnnnnnnnnnnnnnnnnnnnnnnnnnnnnnnnnnnnnnnnnnnnnnnnnnnnnnnnnnnnnnnnnnnnnnnnnnnnnnnnnnnnnnnnnnnnnnnnnnnnnnnnnnnnnnnnnnnnnnnnnnnnnnnnnnnnnnnnnnnnnnnnnnnnnnnnnnnnnnnnnnnnnnnnnnnnnnnnnnnnnnnnnnnnnnnnnnnnnnnnnnnnnnnnnnnnnnnnnnnnnnnnnnnnnnnnnnnnnnnnnnnnnnnnnnnnnnnnnnnnnnnnnnnnnnnnnnnnnnnnnnnnnnnnnnnnnnnnnnnnnnnnnnnnnnnnnnnnnnnnnnnnnnnnnnnnnnnnnnnnnnnnnnnnnnnnnnnnnnnnnnnnnnnnnnnnnnnnnnnnnnnnnnnnnnnnnnnnnnnnnnnnnnnnnnnnnnnnnnnnnnnnnnnnnnnnnnnnnnnnnnnnnnnnnnnnnnnnnnnnnnnnnnnnnnnnnnnnnnnnnnnnnnnnnnnnnnnnnnnnnnnnnnnnnnnnnnnnnnnnnnnnnnnnnnnnnnnnnnnnnnnnnnnnnnnnnnnnnnnnnnnnnnnnnnnnnnnnnnnnnnnnnnnnnnnnnnnnnnnnnnnnnnnnnnnnnnnnnnnnnnnnnnnnnnnnnnnnnnnnnnnnnnnnnnnnnnnnnnnnnnnnnnnnnnnnnnnnnnnnnnnnnnnnnnnnnnnnnnnnnnnnnnnnnnnnnnnnnnnnnnnnnnnnnnnnnnnnnnnnnnnnnnnnnnnnnnnnnnnnnnnnnnnnnnnnnnnnnnnnnnnnnnnnnnnnnnnnnnnnnnnnnnnnnnnnnnnnnnnnnnnnnnnnnnnnnnnnnnnnnnnnnnnnnnnnnnnnnnnnnnnnnnnnnnnnnnnnnnnnnnnnnnnnnnnnnnnnnnnnnnnnnnnnnnnnnnnnnnnnnnnnnnnnnnnnnnnnnnnnnnnnnnnnnnnnnnnnnnnnnnnnnnnnnnnnnnnnnnnnnnnnnnnnnnnnnnnnnnnnnnnnnnnnnnnnnnnnnnnnnnnnnnnnnnnnnnnnnnnnnnnnnnnnnnnnnnnnnnnnnnnnnnnnnnnnnnnnnnnnnnnnnnnnnnnnnnnnnnnnnnnnnnnnnnnnnnnnnnnnnnnnnnnnnnnnnnnnnnnnnnnnnnnnnnnnnnnnnnnnnnnnnnnnnnnnnnnnnnnnnnnnnnnnnnnnnnnnnnnnnnnnnnnnnnnnnnnnnnnnnnnnnnnnnnnnnnnnnnnnnnnnnnnnnnnnnnnnnnnnnnnnnnnnnnnnnnnnnnnnnnnnnnnnnnnnnnnnnnnnnnnnnnnnnnnnnnnnnnnnnnnnnnnnnnnnnnnnnnnnnnnnnnnnnnnnnnnnnnnnnnnnnnnnnnnnnnnnnnnnnnnnnnnnnnnnnnnnnnnnnnnnnnnnnnnnnnnnnnnnnnnnnnnnnnnnnnnnnnnnnnnnnnnnnnnnnnnnnnnnnnnnnnnnnnnnnnnnnnnnnnnnnnnnnnnnnnnnnnnnnnnnnnnnnnnnnnnnnnnnnnnnnnnnnnnnnnnnnnnnnnnnnnnnnnnnnnnnnnnnnnnnnnnnnnnnnnnnnnnnnnnnnnnnnnnnnnnnnnnnnnnnnnnnnnnnnnnnnnnnnnnnnnnnnnnnnnnnnnnnnnnnnnnnnnnnnnnnnnnnnnnnnnnnnnnnnnnnnnnnnnnnnnnnnnnnnnnnnnnnnnnnnnnnnnnnnnnnnnnnnnnnnnnnnnnnnnnnnnnnnnnnnnnnnnnnnnnnnnnnnnnnnnnnnnnnnnnnnnnnnnnnnnnnnnnnnnnnnnnnnnnnnnnnnnnnnnnnnnnnnnnnnnnnnnnnnnnnnnnnnnnnnnnnnnnnnnnnnnnnnnnnnnnnnnnnnnnnnnnnnnnnnnnnnnnnnnnnnnnnnnnnnnnnnnnnnnnnnnnnnnnnnnnnnnnnnnnnnnnnnnnnnnnnnnnnnnnnnnnnnnnnnnnnnnnnnnnnnnnnnnnnnnnnnnnnnnnnnnnnnnnnnnnnnnnnnnnnnnnnnnnnnnnnnnnnnnnnnnnnnnnnnnnnnnnnnnnnnnnnnnnnnnnnnnnnnnnnnnnnnnnnnnnnnnnnnnnnnnnnnnnnnnnnnnnnnnnnnnnnnnnnnnnnnnnnnnnnnnnnnnnnnnnnnnnnnnnnnnnnnnnnnnnnnnnnnnnnnnnnnnnnnnnnnnnnnnnnnnnnnnnnnnnnnnnnnnnnnnnnnnnnnnnnnnnnnnnnnnnnnnnnnnnnnnnnnnnnnnnnnnnnnnnnnnnnnnnnnnnnnnnnnnnnnnnnnnnnnnnnnnnnnnnnnnnnnnnnnnnnnnnnnnnnnnnnnnnnnnnnnnnnnnnnnnnnnnnnnnnnnnnnnnnnnnnnnnnnnnnnnnnnnnnnnnnnnnnnnnnnnnnnnnnnnnnnnnnnnnnnnnnnnnnnnnnnnnnnnnnnnnnnnnnnnnnnnnnnnnnnnnnnnnnnnnnnnnnnnnnnnnnnnnnnnnnnnnnnnnnnnnnnnnnnnnnnnnnnnnnnnnnnnnnnnnnnnnnnnnnnnnnnnnnnnnnnnnnnnnnnnnnnnnnnnnnnnnnnnnnnnnnnnnnnnnnnnnnnnnnnnnnnnnnnnnnnnnnnnnnnnnnnnnnnnnnnnnnnnnnnnnnnnnnnnnnnnnnnnnnnnnnnnnnnnnnnnnnnnnnnnnnnnnnnnnnnnnnnnnnnnnnnnnnnnnnnnnnnnnnnnnnnnnnnnnnnnnnnnnnnnnnnnnnnnnnnnnnnnnnnnnnnnnnnnnnnnnnnnnnnnnnnnnnnnnnnnnnnnnnnnnnnnnnnnnnnnnnnnnnnnnnnnnnnnnnnnnnnnnnnnnnnnnnnnnnnnnnnnnnnnnnnnnnnnnnnnnnnnnnnnnnnnnnnnnnnnnnnnnnnnnnnnnnnnnnnnnnnnnnnnnnnnnnnnnnnnnnnnnnnnnnnnnnnnnnnnnnnnnnnnnnnnnnnnnnnnnnnnnnnnnnnnnnnnnnnnnnnnnnnnnnnnnnnnnnnnnnnnnnnnnnnnnnnnnnnnnnnnnnnnnnnnnnnnnnnnnnnnnnnnnnnnnnnnnnnnnnnnnnnnnnnnnnnnnnnnnnnnnnnnnnnnnnnnnnnnnnnnnnnnnnnnnnnnnnnnnnnnnnnnnnnnnnnnnnnnnnnnnnnnnnnnnnnnnnnnnnnnnnnnnnnnnnnnnnnnnnnnnnnnnnnnnnnnnnnnnnnnnnnnnnnnnnnnnnnnnnnnnnnnnnnnnnnnnnnnnnnnnnnnnnnnnnnnnnnnnnnnnnnnnnnnnnnnnnnnnnnnnnnnnnnnnnnnnnnnnnnnnnnnnnnnnnnnnnnnnnnnnnnnnnnnnnnnnnnnnnnnnnnnnnnnnnnnnnnnnnnnnnnnnnnnnnnnnnnnnnnnnnnnnnnnnnnnnnnnnnnnnnnnnnnnnnnnnnnnnnnnnnnnnnnnnnnnnnnnnnnnnnnnnnnnnnnnnnnnnnnnnnnnnnnnnnnnnnnnnnnnnnnnnnnnnnnnnnnnnnnnnnnnnnnnnnnnnnnnnnnnnnnnnnnnnnnnnnnnnnnnnnnnnnnnnnnnnnnnnnnnnnnnnnnnnnnnnnnnnnnnnnnnnnnnnnnnnnnnnnnnnnnnnnnnnnnnnnnnnnnnnnnnnnnnnnnnnnnnnnnnnnnnnnnnnnnnnnnnnnnnnnnnnnnnnnnnnnnnnnnnnnnnnnnnnnnnnnnnnnnnnnnnnnnnnnnnnnnnnnnnnnnnnnnnnnnnnnnnnnnnnnnnnnnnnnnnnnnnnnnnnnnnnnnnnnnnnnnnnnnnnnnnnnnnnnnnnnnnnnnnnnnnnnnnnnnnnnnnnnnnnnnnnnnnnnnnnnnnnnnnnnnnnnnnnnnnnnnnnnnnnnnnnnnnnnnnnnnnnnnnnnnnnnnnnnnnnnnnnnnnnnnnnnnnnnnnnnnnnnnnnnnnnnnnnnnnnnnnnnnnnnnnnnnnnnnnnnnnnnnnnnnnnnnnnnnnnnnnnnnnnnnnnnnnnnnnnnnnnnnnnnnnnnnnnnnnnnnnnnnnnnnnnnnnnnnnnnnnnnnnnnnnnnnnnnnnnnnnnnnnnnnnnnnnnnnnnnnnnnnnnnnnnnnnnnnnnnnnnnnnnnnnnnnnnnnnnnnnnnnnnnnnnnnnnnnnnnnnnnnnnnnnnnnnnnnnnnnnnnnnnnnnnnnnnnnnnnnnnnnnnnnnnnnnnnnnnnnnnnnnnnnnnnnnnnnnnnnnnnnnnnnnnnnnnnnnnnnnnnnnnnnnnnnnnnnnnnnnnnnnnnnnnnnnnnnnnnnnnnnnnnnnnnnnnnnnnnnnnnnnnnnnnnnnnnnnnnnnnnnnnnnnnnnnnnnnnnnnnnnnnnnnnnnnnnnnnnnnnnnnnnnnnnnnnnnnnnnnnnnnnnnnnnnnnnnnnnnnnnnnnnnnnnnnnncgcggctgacgtggggccattgttcatcatgtactccactctcacttccttcccaacctgaataaactgcaaagttccttacaccatttcagcagtcagatttactcggctttagcaggccaccatgactatttcctgaataaggatttttcttctttctgtttcactattgaaaaaagagggacgagaaacatgtttatcacaccaccttccttccttccatacctgttgtgcaactgccggccgagttcaagactgtttttctaatcttcaaagaatcatgttatcaacctgaaaaatacatgactgattctgaagtccttcccgccaaataaccaagcctaattcaatccccttaacagaccttccaaaggcaacgacaatatattgtgttctggaatatgttgaactgaaaacaatggcttaaaatcccaaagctgtaaaagtcccgttgagtctaatagtcttttatccattatcaagcagcattggttaagcccttaattgtatctgacactgtgctaggcagtgctcaagaagaattacagcgaccaaactctcccttccattagagcttacaacacctgagaaacatactgttcaggaaatatatatatatatatacacacacacacacacacacacacacacatatatatacaaaggacagggtgataaataccgaaggcatgcaggaagagtaagtttttataccatgtagagtttgagtaagtgcacctcatgggtgaggacataggtcaaggagaacagccaccatttgttcaagtccctcacgggccaagggaatgctgcgggaagtcagtaaggtaagatctcagggttttgtgtattatgtactgcagagtttctcatcacagtacatgaaagaggcaaaaaagaaaagacgctctgtgtctggaaggaacagaagccagcaccttttgtctgtctctcttcttgctctttggttatcagttgacccatctatggggctgggacatggaaattgggctacagaggaaatggagccaggaatcagcagcagactttatgagggagaaaagcccatagcaaaatatatgcctgtgcttccgtaggtctctttaagaggtcatctgacagtagaacagagtgaggctaatgcttctcctgaagtttaccttactggttagtttctcaggtttgtagagaaaagtggtgctttagattaaagcagtctagctagctttttgttaatgagtttagatgtcttctcattttaaacccacgaaaaactgtacagaagtgtggaggggaaattattatcattattattattgggactcttttgcctcagaccgtaatttcagctactccacccagcaacttgaataaaagagggaaagaaactgttttaaagagaaagactgaataattgttaatttagtttctactgcctctcaacctcaccttcttgctttcaggaggtttgaattggctacagctgtgctgtccaatgcactggccacatgtggctattttcgtatacatttcaattaaagttaaatgtaagatttcatttctaagcctcaccaaccataggcgaagtgtgcaatagccacaaatggcacctactgttggacagaggagagagcacttccattgttgcaaaaaagtcagttggacaatgctggagagggtagatgtttgtcgcaaaggaaaaaagaatagattttctacaaactgtgggatttgcattttgctagcatttctagataagagtctgagtattgcttaaagcatcgtgggcattcagaagtctcactgatggctatctctttagcattattaaccattaattaccacccacactgttctcagaagaaggacttatattgcttttaagggcagtggctagtacatataaattaagagcactttcaaaggcctctagcaagcctctcagtgtcacatacaaggttacagatctgtgactagaaacttacggccttgagtcatagttcattgctttaaccatgaaacaacccactcccgccttctgttctaaccagagatcatgctttacattctcagcatattattgctagttaatcctctcttcagctgagcataataaggcaaatcatcacaacctggttacacttatgtcaaatatatgtgaatcacaccatctgtttcagaggtagaaaagacctatgagatcatctgggcttttattttttttccctttacaagagggctgccagcatttggggccaaatggaaggcttcaaatgtctgaattcacaaagctctttccttatctccctctcaatgcaagacaacttctgacagcatcggaaagaaaactgcacacctgcctcagaacgggcccccccaacacacatacacaactccaccccagcaagcagacctcctactcccagtgagacgtgggaagaaactccatgtttcatcttacctattagtgtgaagggaaatgcttcctaatatcttctatttatggactgacttattttttcttagagttccatttgtattgattttcttttatactgagaacagctctgaaataggcaggtcagatattactctctccattgaacaaacaggaaaataaacctttgagaactgaaagaatttgccttgtgcccccagtctcaagagaggatatgctgctcctgttctccttcccctacccctagcagccacttgcaacctgggttggggcaagcctggatctctctcctaagacaggccttcctacactcaggggagacctgcatgccacataggacagggctgcacctggtgcccactcttctgcaatcctggtgtctccccagttagaaatgaaactccattcaatgtaagaaatattgattgcacccaatctatataccaggtgtctgcctgatattctctattgagcaaagtgtgaatcagtgaattcttgtgtgaattgtactaatgctatccaaagaccttccaaactagaaataccccaaaactaataagtatgttttctccaccatgggagcagttggatattaaaagcattttataggcctcagcttattgaaagtaaaacattccgtctcttttcaaaatgggagccgcaaaaggcaaacacacactcagggccatagccctctccgtaacaaaggaaagattaggtatttcttaccactctgcaacttggtctgtgcaccaaagcaaggtgcccagagggcaacaggagcataagaccagaagccaagggccatgacatcattggggatgcagacctaataacaggcaacaccaaggaacaaagtcagttgtagtgtcaggaaggggccgaagccttagccactgttgatggcaggccctgtgtgaagaacacagctttcccagaagcctcctcagtggaacctcccagtcgctagtagtcgtggctacaagatttcacgtgtaaaggatggtcctcgggggcacttgcatcctgaggcttctagtcatcagagcagctcccaggccgctcttagccctctagaatgaattagcattattataagactggacactatttattccaaggaggcctttgctgcatctttgatgagcaggcatcaccagttctccacgctggtctgccttctcatgagcatgggtttcagtgactgccaggcctgagaaaggaggagatgggaaatccccttcattcatatctgtgctctcctgcttggcagtgtttgttgcaggccccgctgtagagaacagaggcaatgcttatgcgtaagttagacagtgtctcaggaattctgagcagttcaattcagtaaagccatccagagagatgagttttacttctgagagagctggagacagacagtagtttaacacttattgtggactctgtaggatcctgagcctttacctaacttgacccaattaatcctcccaacaaccctatgaggtggttgttattttgctcctttaactaatagagaattgtagctcagggaagttaaatgacctgtggaaagtggttcagctcattagtgagagagctgctgagatgtgaactctggtcagtcttcccccgaggttcgcgttctttctgctactccagagattctccaactttggcgtgaggaataatcagggagtgtgttgaacattcaaattcctcacagtcaaccccagagattgccattcagccagcagtcactggtttggatggaggtgacccatgaatggatgttgagaaatactgtcgtatagcacacttgcttcctgaacatcccagatcatttttctcagacatcctaggaaaacctgaagggcacaaatctccagggaagcaatagagcatataggtttttcagctatgtgaactagaaaagcacatggtgaagccagcctcttggagatctctaaaacaatccagccagatctaatgagatccctgcctaagagcaggtctgaaaccctgggagcacttttatcagatttttctgcattcctatctcttctcaactgcagtaagccccctataaaatgtacagcacgcctgtctgttggctgtgtaaatagaatgtggatgtctgttacaactacagtttgattcttgcattcaaaggccatattcctagtgtacatttccacctttattcaacactccagtttcctatggtgctgggagggtctactccgtaacttatgcccgtccccatgggtcagaggactacagtagtggcttagctggggaggaactggggagtgcttctcctgagtacttacccaaaagtactactttggcaacagattatgtaaggcaatatgttgaactgaagtttatgaaatctgtgatgaaaacacattgggaaactgtgtgaaagcaaaaacagtcttttcagtaattgacagaaacagctgtgttggaccctgagacccctggagaaggtcatctacagttcgggccccagccgcagcccacctgctgatgttagaacttgtccactcctgcccggaacaattatagctgctgtgtcttgttctggagttacagtgagctttggctacaacctagttgggcttgccctagagtggctggaaggaaaagaacggggaaagagtgagaatgtaagcagagccagcttcctgggcatgccacctctgaaggcccacaggttcccatgcttggtttaatgctgtcacagtcttgaaatttttaataatttttgaataagggaccatcatttttaattgcactgagtcccaccaactatgtagtcagaggtctgtgtaagagccacaagaccagagggcaaaaataatttgccatatattgaagacacatagaacgatgtggatttatgtcttaatttctttcttcatagatgcaactgtgaaacaaaaattatttcattatctcctagcagtggtgtgctgggctggctcataccagctcacaagagcagattgttaaattttcaggaattttgcaagctagttattaaacacagccatgattgaaaattaagttatatatgcttacaattaaattatattaaaaacaaagataagaaatactcaaaactcaccacttcctaattcatgactacattttactattatctttgcttttgaggttatgtctgttatgtctacctggtacaaacgctatataatggtatgctagcatgcatcttttcccagctccgtgttcagtgaagtcatgttagtagcttgttagtagtctgttgggagtatttacaccgtggaaatcaacaaacatcactaatcagggcttccttttcaatccctcccctggagagcccattgttaaacatttaccagcacaccactgtttcccagatacagagggtgcttacataacaaaatgttgaggtgggaagggaccctaaaagctgagacttctattttttatctcttaattaagagaaagtaataattctgctattattttgctttcatctatgtatcttataaaacaacctctctgtgtgttcttcaaaggaaaggaacaatggaccttagagataaggaaatcatgtatcagtgtggttgagaagttttcttaaagaagtgacaatggaacatgaaaacagcatgagagattctcattctgaagtcaaagttatttcgtgtttgtattgttttaattcacctctaaaatatctcttaagattaaccagcctcgtttctgaccaaccctcaattttgtgaacttttgttcttcatgtattatatgctatctctattttgatttctgattccatctgcttaatcatttgccttcattacccactgcatggtaacaggcactactggtgtctataaccaagcttttgttgagtatgttttcataagtttgtttgcctactgtatttccagttttatgaacggtctgttcatatcctttgcctatttatcacttgctgctcaatgcttttattattagaggcgtgcaaaagctttttatataaaaagctgttaactctttgaatatcatttactataggcattttttttcctgttctcattttcatttttatgttggttttgatattgtcatgtatagaaacttcggatttttgtgtttaaatttgcccatttctatttagctttttaaaattctaaaccttaaaaaaatccctattccaaagatttaattaatagtccattgtcattttaatcagttttacttaacccagtgtataattccatatcatacattgtcgtggatgatcaatacaagcttgtcaataagttattgctggcaaaaaagaagccttcagttttgtttctgagattgtcatttccttaaaaccacagcgcttggactggtcgctttgtaactcagagcctccgtttctcgctgtgataccattaaaatgatttctgagacttaaagtgtctggaagaaggtgtaatggggtatctccatcacgatattaaacttgaagaaagtccttcaggaatttgcatattttaagaatgtgcttttggatatatttgaagagtcaatattcttaggatggagtcttagaaacccaacaaatttttaactcagtctttaaaaattattaatttagactgtttcttgttcttacatagactttgtggtaagatatacataagatcaaccactagcatagacttttaaaatattattttagtaatagctaacttttgagcatttactatgaataacacagtgtttatgttaatattttacatatgtagtctcatttagttcccactattttataagttcttgtatttgcaaagatctaactgtccctcagcatttatacttactttataaatgttaataacttttaaaattattcatgttcaccatagagaacgtagaaaatacagactggcaaaaagaaaaaaattaccgtcactcattttaccatcaagagcaagataagcactatcaactttcatgggtgtgcctttcttgattctcttctatggatatttacatgtattataatcacagtaactttttggtgataaactcactataactttttgcttcccataatttatatcttaaacaattttgatcttgaaatcaatattattatttataaagaggtatgctagcacacaaggttgctcttctattttaaaattgattttttaaaaataattctgcttagtcccttcaaatataggacataaaagtgaaggttgcttggcaactgaaatgatggtaatgaggaattaaagacattacaagaaaagaagagtactcagttcttttcaatgctacatgctaattgcagtaactatggctgattacagttgtaataaatgaaggaaacacaaaacttccattaaaaattcttgatgtgaacttttttttattttgtattacagtgaaagtgagatggggtttgctgaagagaaactttactttcagaaacaagaaaagatcttttgtctgtattaacttttttttcttttcttttctttttttttttttttttggcgacagagtctcacccaggctggagtatggtggcatgatctgggctcactgcaacctccacctcctgggttcaagtgattctcgtgcctcagccacccgagtagctgggtgtgcaccaccagagccagctaatttttctatttttagtagagatggggtttcaccatgttgcccaggctggccttgaactcctgagctcaagagatccacctgcctcgtcctctcaaagtgctgggattacaggcatgagccactgtgcccagcctattaaccttctaagggaatattaagttagcaactgggtgagatacgtagcagaagcacaaagatttggtacatctgtgattcttcagcagcacagaagagatggtgggcagtggtgtgaaggaagccatgttaactacttgtttttttttccccaaagagtagtcaagggccctggagagattgctgaggttctcactagagccttcaagcagaagatgcttcctaggatggagatgtacttagaaggacaccagtgattcattgaaatggacaaagggagtagagactagagggggaagagggaagcagagggaaagagggaagcagaggggaagagggaagcagggattgccggttttgtaacaaagaatgcagtcaccagaaaagtaaggcagtttgggatgaagccatccaagaacttatcaaaggtatatctttgccagaaagtgaggatttctagttggaggagcaaatggagctatgtctgtctcctcttcactgatctatctgaatcatggtataggacttggttttgtaatcttgtgaacagcctcattttaagggggaacccacaatattcaggaagccaagaaatgtccctgttaatcatctatgagtctatcttgctggaatgtagttatagactatggaacatccttaaatctgatgagcaattaatcactggttaattttggattcacttattaaatgccaaatgcataggggatttttcacactctctgcccttcctccttcccagttcatgagcaccacaattggattccatatttacttcatccaaacctaccttggtgggttcaccatttacctccagtcctggggagttcagtccagactgtgaattactgccatttctgaggggctgcttcccagatgggagccataggaccctcgcctctggccctggactcagtcttcgtttattgccaaggatgagcacttgctctcgggaatggatgctggggtccacctgactgtttggcttgctttaatccctaaaggaaaagctccctacatttattgtgtctgtggtccccccaccctctctgtcccagtgcctaagagtctcattaccttgtcagtaactaccagtgtctacctgagatggactaagcttcatttaactgagaaagtgcaccctcaaaattgcaaggagaaatgttggaggaggaccctctggattaaaagagacttaaaagacatttcaaacagtcatagtatgtgaaccttttttctaaaaattatgtgtgtgtacacatacacactcataggagtatagatggatccacatctgctgtatgctgatcattgttgcagctggctgagtgcatggaggtcccttacgttgttttgctcactatggtatacatgcttataattttccataatctttttttgagacagggtcttgctgtgtcacacaggatggaacacagtgatgccatcttggctcactgcagtctctgccttcccagctcaagtgatcctttcacctcagccttctgagtagctgggactataagcatgtgccaccatgtctggctaatttgtgtgtgtatgcgtatttttttgtagagacagggtctcactgtgttgctcaggctggccccaaactcctgggctcaagtgatctgctcacctcagccttccaaagtattgggattacaggcatgagccactgcacccgacctctaacaatatattaaaattaaaagtgtcctcaaacctaggacaaatagatgatttaggattacaaaaattcaaacggattttaggaaatttctctaaattttcttaggtggcaaaatagagtggctgtgtctgttttaaagaagggagaggaaaataaagaatgaaaatggttactttggttacacatcatgaaaataattcacccgtgtcatgtacttgacatctcgtgtcacagcgcattccccaatcagcactgagatgctcaattcctgggtatccaaaaagaccaaaaaaaaaaaaaaaacctggaaacttgtaatctttaatgctactgtcagaggcgggagttggagttgagtaagtaagagaatgtaatactctcctccacaccccatctcacacacacacacacgcgcgcgcgcacacacacacagttttgagcagggaaatgtcatgactgtgccacagctgatttcagcaagcggtgaaaagattatggaggccacgtcacatggcagtctttggaatctgaagctgagtcactgagtctgccatttaccacatgtggggcttgtttgcccgtttttaaaatggagaataatggtaaaaaattttaaaggtggttttactttgggtggaaatttaacaagattgtcttagtttgagttttcccaggagcagatcctgagacaaggatttttaagtacaaatagtttactttggaaggtggtcctaggaaaaactggtaggggagtagggaaggcagctcttggagggtgcattgccaagttacaactctgggagtcagagtggaaggctcttttcagacctatcttatctgagggaaaggaactggagcattgatgtaccaagtcccatcggtcattggttgagggctgcttttagagggtgttaagtttgcagcacatttggcctgccctgcacacaggtgggggtgtgaagggcttccagaaacctctcaggctggtggaagttgagttggcatgcattacaatgggaaggtctgagagtatgtgtgtgggaacttacaggctctgctacgaagtcaaaaagtaaatgttagatgggcaaatataggctacatgaaaatccacataaacagtttcaaagctagtttatagtcgtactcaaagtgtatacatgtagatatgagtattgaaggatgtccttctgcaggtgaaccatttatgagtggctgtggacattttcatcagatttaaacacaatctgtgtttttggttagacacactgtgggaaatagcataattagcagaattcaggatgtgaataacatagcacaaagaacttagacaaacaggacttcaataaaacgtaaagtctcgcacttaagtttaaaaatagtgcttcctatatgttctggatggggggaagctgtattaattgtagttcttatgaccaataccaagagattttagtagattgtaaattcaacatgagtcagtagtgtcgtgtgtcttccccagaatattaactttccaaaagttaaaataattagagattgcctcaacagaaatagcctttccatgttaagggagtaatgcctccattctatcctgaggtccagtcctaatgctgacacatagtaactttattcccttagccggtgtcttaatgtttcggagactcagtttctatcaacctgaaagttagtagatacttcccctggattgtcgtgaagtaagcatcttaccagaaagttagaatttatggcccagcacggtggctcacgcctgtaatcccagcactttgggaggccgaggtggcaggcgaatcgtgaggtcaagagatcgaaaccatcctggccaacatggtgaaactccgtctctactaaaaatacaaaaattagctgggtgtggtggtgcacacctgtagccccagccgcaacagaatactctggaggctgaggcaagagaatcacttgaacccaggaggcagaggttgcagtgagccaagattgcgccaccgcactccagcctggtgacagagcgggactccatctcaaaaataaataaataaataaataaagttataatttatgtaaaatgttattaaaattccaatctgcagtacatactcaaaaacagtagcaatcattattagtatagacttgttaagtgttagtgtatggctttttcaggttaataatgcagcttgccagaggatccaaaatcacatcatggagatacaagatggttataatggctatgccaaaaaaattaccaggatggtgtcataatagacacgaacagctatgagactagaagagagtgttataatttaaattttcccatgaatttgagctgtattaatgcagtgtttagtaaggaagacctgaaaagtctctcatttttcaaaatattaggacaatgatggaaatccaaccagaactatctttgggaatttattagaaataatatggagtatttcatatatctaaaacacaggaagagtacaggatgcctgcaggccttaggagtgcctgaaattaggtactataatacttttaggagactattgcatatgttctgtgtatgtatgtgtctcttctctgtctgacttgcttctctctgcttgtcagctcatcattttctttcactgaagatttgttttctacatggcactaacagctgtaaatcatgcatctcttaccattagaaatttaatatttttttccctcaagttcagtgaaaaaaaaaaaactgtcagggaagaactttggttcagatttggccaggtggctactgcttgaatgaattgactgtggccacagggttggagtcatttaataatccagcatttctctctaaaaccacatgacggaatctggggaaggagcgtttcctaaaggaaggctattgtgctgggcatatgaagcagtatctgtcataaccaagatctgaccaaacactagagtgcagcatgctattagattcaagtttagtttctggattttaagatgggaatggaaaggctagagagagtgcagaggagataaatagttaagaaattatacagaaataacatctgtgaggatataagatggcagaacctgaaaagaagacaaataagtgggttttcccctttgttttcttaataatgtaaacatgtatgtctcaatagtaataaccatagaagagctagtatgagttatttacctccagtgggacatataaagggtaaacaaatttaaatctaccaaagaactgggacttcccataaaaaaattaaacatcaaaaggagaactttcatatctgaccatagtggaatactggatattagaattattttcctgctaccaacagctataaaactggacaaaatatctgaagcaactatttttgggtctcagaaaacaagacagacatgtgattgtggataaaataaaaagatgtgaggttaactcaaaactcctcttggctttctgcctgagagcactttacaaatcatggtacaggaaactggagcccagtgagcagcatcttgccttgcggagtatcttagttcgttttctgctgctgcaacagaataccagactgggtaatttataaagagatttatttggcttatgattctggaggctgggaagtgcaaaatgaagggaccacatcttgttatgtcataacatggcagaaggcatcacacagacagagagagtgcttgcaagacagagaagaagggggccaaactcccaagataactaaccctttcccaagatatggagttaatccattcatgagggtgaacccctcgtgacccagtcacctcttaaaggcctcacctcctaatactgttacaatgacaatattaaatttcaacaaattttggagggacattcaaaccacagcacagagagaacagtttgtgttcagggattctgggatggctggcatttgtggagtggcatacaagagagaaggtatttccaaagactaaactgtgcatggatatgatgagactctacgacccctaatagttcctgggggtctttgagttaaaggaggtctcatggtctgggaaataacgcagttccaaccagccaaaatggagagacataacactttgggcattcaggtgggatgagaaaaagactacaatgtaggagttgggctactttagccctagaatatgagctaatcttgactcaccctaatgaagcctaaatctgagcttcaacaggattaatttaaggtcccatgaattaaataccaccataaaggaacatattaataattcaaattatcaatattgcacttacaatgcccagcatgtaataaaaattataagacagaaaaagaagcaggaaaatgtgactcataaccagaacaaaaaagatcaatagaaatgaactcagagatgacacaaatgttggaattagtagatagagaatttaaagcagctattataaataaatatgttggaggatttaaagtaagatgaatagatgtaagtaaagtaagatgaccttagcagataaattgcaacaattaaaggaaccaaatggaattctagaactgaaaaataaaatataccaaaaagaaaaattaactggatgggcttaatactatagtggatgcaaaaaaaaaaaaagaaaaaaagaaaaaaagaaaggtcagtaaagtcaatgacaggtcaatatctcagagagaaaatgctgaaaaaaaaaaaaaaaaaaaagactagagtttcagatgatgtaaccagagtttaaatggacatgaaaggacctggaataaccagaatcttgaaaaagaatgaagtggaaaatttacactacctgttttcaagacttaatataaagctatagtaatcaagtccatgtgatatacatataaggatagacaaatatatcagtggtacagaatagcacgttctggaagaaatctacatatacggtcagttgatcctcagcaaaggcaccagggcaggttaacgaagaaaggagtatcctctcaacaaatggtgatggaacaaatgacagtcatgaaaaaaaatgaactgtgacctgtgtctcacaccatacacaaaaaatgagatgaatcaaatgatgtaactgtaaataatgttaacctgaatgtaaagttaaaacgataagtcttctagaaggaaatttaggacaatgtttttgcaaacttagagtattttttagacaggacacaaaggactaaccataaataatatatttagcaaattggactttataaaaatcaaaaacttctcatcaaaagataccattaaagaaatgaaggaagaaaaatactggggaatatatatatgtnnnnnnnnnnnnnnnnnnnntatatatgtatgtgtgtatatatatatatacacacacatatatatacacacatatatatgtgtatatatatacacatatatgtgtatatatatacacatatatgtatatatctgacaagaacttcattttatgctagtatacaaaggaaaattccctgtggcccagatgaattgccattattgggaccctctggctcacaccagattgatttctgatcatgcttttgaaattagaattaaccaagccccatcaaggagtctgtaatataggcaggcaccaaatcagctgtgttaagtacttcccttgcatgttgccctgagaacaggcgaaagacttcactgccgatttctgaaattggaagaggtcttcatggggtcatctagtatagcttgtagatctactccagggcaaggatgaactcaatggtctaaatcagtctaatcaaacttgatctgatcccttgggagctttttaagaatgcaaattctctgctccatccctggatctcttgatggagtaggtattaggtaaggccttggaatctattttgagttccgttggtggttttttgtttgttgttttgtttaggccagtcaatgaagcagtgagagtggagaagaaacaaagaaacctgtaactggttgtgatcaattagttgtaaacaccacttcagtcagaccagtttttgttctgcttttgttgttattttttagtttagtgtgttgtttgtttgagacagggccttgcctctgtgtcacccaagctggattgcagtgacagtatcagcttattgaagacttgaactcctgggttcaagtgatcctcccatctcggcctcccagagtgctgggattataggcacctaatgggtaagctgccaccccaggcccagccttagttttgttggtaagctaatcaggaggtcttgaaaagtctcacctgcctcttagtctatcagaatctgacccttccttcaaggtccatctcaaatgctaccatctttatgaagctttagccatttcttccagtcaaatctgactttccccttcctctgaactgcccgtgtttacctccctctaggccctgactgtaccatgtactgtagtattgcctgtagcttcttcaggcttgggacagggtgcttattatatctgcaatcccacagtacctatcacagtgctctttgagcaaagaactctggtcttgtgatgagaaaagccaagtctaggatgccagctctgccacttgatggtattatccgtgggttagtgatttatccaggggtgacattcagaatatttatgtgtgtgtgtatatatatatatgaatgaataaatgacagggtcttgctctatcacccagtctggagtgcagtggcacaatcacggctcagtgcagcctccacttccctggctcaaatgatcctcttacctcagcctcccaaatagctgggaccatagtcatgagccaccatgccagctaatatttttttattctcagtagagatgaggtcctgctgcgttgcccaggctggtctcaaactcctgagctcaggtgatcctcccgccccagactccccaagtgctgtgattacacgtcaccacacctggccttcaaaatatttaaccagcatggcacatgtcccttcatttagacgcccgctggccaggctggggattagccctgtctttatgcttttattgtcggtaaagtggatacagtccctacccacctcaaaaggttgttgtgatggtcaaatgagataatgcatgtgaaagtactctgtaaagtacaaagtgctatacaaatgtaagtcagggttgcctggtggtatttctagtgcccgtgtgtggggttggttgcccagccctcaacatggtctcatggtctgctctgctctgctcagagcagtctcccaggagcaaaccaaggagttgttgagtaattgagcaggacactgcaaatctgagaaatcctggaatcagcctgttaggtcctaaggaaactcagaatatcagctccttcaaggatggcccctttttaggcctgaaaaatatcaatgtttcagtacatatattttggaaaagctaaataaaacaaaaacctaaaaaggctttttgaattttaacctaagttttccttatttgaggacaccttgttctattgcacaatgaccttaaaattcaggatccttaaagatatctgggcatctcagactcatctgattgtcaccatatggcaaggagctgctctgcctagatctgtaaatggagttaaatgccagagacattaacatagattaaagggacagtctaaatcttagtcactgctttgtctttatagtttcttgcctcctctttttacccttttacttccttaaaaactgtcttaatttcctcaccatcgccttcccacatgccctcaggtctgcagatcctggggatacaaatccttagccacttttctcttccaaatgcatttcactctttcctcatattcagtgcccagttactgttttgtgtttatcattagttgccagtcaatgttaatgtttgttcttatatgctttgatttaaatgaaggaaatggccccagtgtagtgtgtacagcagagaactagagactgtagggaacagacagaaaatagacacaacccttttacttactcttgaaggattcccatttaaaaggcaatgcagggatggccacagtgactcatgcctataatcccagaactttggccggccgaggtgggaggatcgcttgagcccaggagttcaagaccagcctgggcaacacagcaggacctcatctctacaaaatataataataataaaaaagaattagcctggcatggtgatgtgtgcctatagtcccagatacttaggaggctgaggtgggaaggttacttgagcccaggaagtcaagtgtgcagtgagccatgattataccactgcactccggcctgggcaatagagtgagaccttgtctcaaaaaataaaaataaaaacaaacggcaaagatgagttcatgtcctttgtagggacatggatgaaattggaaatcatcattctcagtaaactatcgcaagaacaaaaaaccaaacaccgcatattctcactcataggtgggaattgaacaatgagaacacatggacacaggaaggggaacatcacactctggggactgttgtggggtgggaggagcggggagggatagcattgggagatatacctaatgctagatgacgagttagtgggtgcggcacaccagcatggcacatgtatacatatgtaactaacctgcacattgtgcacatgtaccctaaaacttaaagtataataataataaataaataaataaaaacaaaaaaaaaacggcaatgcaggactgtggtagatattaataactttaaaacataatgataaaataaccagggtgataatttgtagccccttcttgctacttcctagctgtgggacattgactagatatttttacctctcttgactctgtttcttcatgtgtgaaacagagaaaacatcgatcatgcagaattgtagtaaatattgagagcatgtctgtaacatggcctagttcactcctggcacatggtggatggttcagtatatggtggcatttattatattctcatttagcatgcaggccagctctgggaaaccctcaatacccaggtagactatgtgctttttatctttacagctgtcagggtgagaggcagtggtatctggtggaaagggcagggtttacctcagaagactggaactcaagtcacagcactgtcactcataagatgggtgactttaggcaagtcataccaccttactctctgtttcctcacctataaaataatgcaaataatacccatctctcagagttgtgaggctcagatgaggcaacgtgtgaggagagtggtcattcataaaacgctaataaatagaggttattagtacttcagcaccagggtgagggtttcatgtgcctacgtgacaactgtcaggcaccgtaactatttgggacccacaagttaaccagacatccgtggtgtgaactcagttcagaaccttgttctcctcaaaagatattaacacttttttcttatcttgagtgccatctctggattatctctctgttggaaggggtgggcgtaagacattatgaagctctcattctgcaaagagcaaattgaggctcagaaacaatcagggccatcccagagccaggcagcctgggtttgaatctcaggtctactacttactagctgtgtaaacttggacaaattaccttacttccttgcctcagtttcttcatctgtcagatggcacctgtctcacagggttaatatacgtaaaggctgtcttgaaacagtgtctggtacacaggaagtgctccaagtatgttagcaaaaagagaagacgggggtggctaaaccttgaatgtagttcatttcttctggttagatgctgcatttcttccaacaatctcaaatatttctcctggtctcccccatcttccaataagtaacaacattgttagtttcagtgttgcattttggctatttctgtaggacagtgatacaacacatcaattcatgacttaggatgttctgaagcacattcttttttgtttcattttgtttatggagacagagtcttgctctatcccccaggctagagtgcagtggtgcaatcttggctcactgcaacctccgcctcccaggttcaagctattctcatgcctcagcctcctgagtagctgagattacaggcgcccaccaccacacccagctaatttttgtatttttagtagagacgaggttttgtcatgttggctaggctggtcttgaactcctgacctcgggtaatctgcctgcctcagcctcccaaagtgctgggattacaggcatgagccaccgtgcccagccccttgaagcacattcctattcagctcttgactactgaatagagaccagtttctttcctttgaatagtaagagattcctcactcaccggtgcagttctcacttcagagtggctctccaggtcctcctgctcacttctctctagcacctctgtaaactcttgagggttctggcgttgggggagtgcgcttaaaacctaggattgaagggaagcttggaaggctactaatatagttgggatgttgttcctgcccaaatctcatgttgaaatgtaatgttggagatggggcctggtgggagatgcctggatcatgggggtaggtttctcatgaatggtttagtaccctcctcttggtactgtccccatgatagtgagttctcatgagatatatgtccctctgggaagctaggacagggccccactgctcctgcttcccttgcctggctcatgtctatagtgctgcatgggaatggtcaatgtctatgagccatggggttgcgtgcatggcagctcatcaaagaatcaaactgtagcataactacccagccagatgtgtggcacttcctccctctccctcttgctcctgctttcaccatgtgacgtgcctgctttttcaccctctaccatgattgtaagcttcctgagggcttcccagaagcaaatgctgctatgtttcttattcagcctgcagaaccttgaaccaattaaatttcttttctttataaattatattttctttatagcaatgcaagaatggactaacacagccaccaactaactgccaaggaggaccccatgcttgaggggtccagtctcgctggcacagtgatgaactacagtggacagccactccttgagtagtggtcatagttaagggacaaaaaaatcatggttccagtctggaatagccaaacaaagaaaaaaaatagccagaacaaaggaaaaaaaaacaaaatagtgcttaaatctagcaagagaaataagaataattcatcactgttatagtgcttcacacttttctaagcatttttatgtatttaatcaaacatcatctaatcctaaccacaaccaaagaaggggtgaggaaactttcagaataatttctatctgatttcaaaagactctgttcagttactttttaccctacatggtgatgtgatgtttttttgtacgagactgttcattgcagagaattataagcaattaaagaacagtttctgtggtgaaaagcatattttacaataagactatggtcagtggatttctattttatgtcagcatacactgtttcccacaattccatcatgcactggaatgaggttatctattatctaggcttgtgggtctgatgggaccaagtcactcattgagaaaaattgtctgaggaaggctgaggtcatggctaaccagtaattctcagatgggccttatattattttgttgtgtaagtatttgggaagttctccaagttgcttcttcgtgcctattgggcatgtctgaaaatatgcaaaaaaggccaagaatttaatagataagaatgacgtgatacaaatatgctccagtgagcaaggtaagagcctgacccagattttcttcccagtttgtttatttctttttctttgggtccactggccctttgccagccctcctcccagcaagctgctggcagctctctgtgtccttctgggaagctaggacagggccccgctgctccttcttcccttgcctggctcatgtctatagtgctgcatgggaatggtcaatgtctatgagccatggggttgcgtgcatggcagctcatcaaagaatcaaactgtagcataactacccagccagataattcaattgttcctagagagtttgatgggacccagaagaagtagccaccaggtatattcagtcggcactgacttcaacaaatgctcttagagtttgaagtcatagcgttgtcccagagtcagctcactgggtctgctcgggacttgcagtacctcttccctgctcttctgtttatttcctagccccagtccccaaaccccacccacagacttgtgtccaatttccagaactgaagaggaccaacttccctcctgacttctgagactcatgattcttcagacatgacaagtccagatcgagactgcaatccccaaggaaggccagctgtcttgctcagcagagacaatacagctaaaagctctttctcactttaggcaattcatgcacttggttagacatttatagacttcaactgctcatccaaaaaatctaggtcattctttacatagagcttcacactttggaaggaaagccaggcccagggaggagcgtttctgttgatgtctggtttggctgaggcagtagagagtgcttctgctgtgggaagagggagagatggaccagcgcaggcactgtgggcccttaggggacgtgaattttcaccccctggccactgactcacagagtctctgagtaaatggtgccaataatagctgccttgtgttgatgtcatgaaaagtggtgggtttaaggattaggctttctaaggacatttttaaagtatgtaccataattccagtgagaagggctgggtgggtctgttgggggtgtagggcttcctggggaggaagaaagaatagaggtgtgggtgagaggtttagccatgtaacatggatggccaaaatggtagagctcttccaagtatattcctacctgcctcctaagccccgaggagaaggacatgccaaagaaagagccttgggctgggagtgagagggcccttcttgtggaggttcctctactcaccatggctgaggcatgttgcttcagttttctcatttttaaatttcagctcatggttctgctgctgcattgagctgctgtacaatgcaaatgttcaacacaagtgaagctgtttgttgaacctaagtgccacaaaaacgtaacatatcattatcaggtgttctcacccagagagaatagtgtggttcttcagccactcgcttgcttcagggatggtttgtgtgggcatgtgctcattttgtacaggtctgttcctgtgtacctagatgctgtgcaacttgaaaggcctgctcctccttcctgctctactactctggccccagcaggacagtgaatatcaatagaacagaggcaggaagcatgggttcttttccttcaagtcttttccacgttggcttctctgcaacaggagttgagggaggcttggttagaacaaatcacctttgtctgggggtgggttaaccagatttttccctcttctgtgtctgtggccttggttgtggcaccagctgtcatcactgccccagcagttgggtgggagagaagagatgagcctggccagcccctctcctgctttagtaagactccgcttaaaggcctgttgtaaaagtttgaaattgcaggtcagggttaatttaaagcttgtgtattgtccatgttatggtgtcccccagccattacaagtaaataattaaaagccaattgtaaccaagatattcagagctccataaattcctggacaccataatatgacaagaaatagacactagtctaactatatggcaggctgtcctatgtgggccagggtatgacataccaggttatcccagaaagaagaacaggacaagctttacaaggaactgagcttcccttctcccaaattctcaccttatattaacatttttgttcttggtttagagcaccaaccacttcaagaaactgctgttgcaatgtggatttctctgagaggattcacccttgaagtccttgtctcctgcagaggaatttgttgatctggattaactgtccagtcattgggcaaggcccagagggcatgagattaggagtgagatgaggagtggaatgggttcaggaacacctggggagcaaggaaaccagacaggaaggaatacaaaaggaagcccagcaagcaccagccctcttgaggaggcttgcagctgctgtgggtgcatgctggaggtggcccacacctgtcctgagagctgactgcaagcatctcttcctaggtgcatgttcagtgacttcatgttggtagcttgaaactggccatagtggaagtatttacaccatgcaaatacgtgaacactacaaaccagggttcctctcacttctctcccaggagagctttacattaaactcttgcaagcatcctgctggtggcaaccataatggattctcactttccctgaaaagcaggacttaatccttagcagatcacttgctttctcccgattgttctcctcccctgagtcttgaggggctggggactaacagagaccaaagtggccttggtgatatgtatgaagtggctcaggtcatagacggtatacaagttcaaagtttgtatcaccacattgtttcttcacatgcacttcctgcctaagttgctgccgtccgctctaaaaaactaaacaaacaacgaccagaaaacaaactctactgatcttattttcagcttgccaatttttatacagtctccaaacaggatttaatgaatgtaataatcttgctgacaaataggttttacttctttggaatatttatcacatagttatttatttagaattctgtgtgtatacctaccaggttcaacctagacccagcctaaccatgtttctggagatactgacctccattatcaacctcagccttaccacaggctctgctctaaccttgcccctaggttttctgatcctagctttcccattaccaccctctggcctctggttgtggcacacctgttatttcatgttaggccctcaatgctgacagcttgcctatccttcatatgctgatctgtctctggtacactcaaaataccttcacacatcaagagatttccttggaaaccaaaacaaaggagaagaagtgactgttccggagttgctgcctggtgctggacgtttgttttcatgtttcatgttcatcttgcagcaaggcatttccatctcatcccccagacaagccttcactgtaggaaagctggcccccacctcttatcagcaaggagcagggtctgcatcaccaccctttgccagttttctctcacgagactctgatcatcagggagcaggtcttctctctcagaggcaaggagcttatttcaggcaataacagcagttttcatatggttcttcagatctcctttagtacctaggacagtgctttccatagggtagattcattatcaatgttggttagtggtgtcaaaaattatttctacttgaagtagaatgaacagttgctatatagaatagttaggaagccatatcctgtcattggaggggtccaagtagaggccagacaaccacttacctgtgatggttttaggagggaataatgcatttggatagaaagaagaggtagaagatggctagccttttccaccctgattgtgatctcataaactatgggatgccagcactgagtctaacggtggaaaataggctgttggcccagagacagatgactctccagaatccgcttagtttttctgttttcttgagcaagtggtctgcaggttgagtgagtctttaattaatatgcttctctagcagcttacattactcccctagtcaaatggcagagtatgtaagatcaacattgtgtaccccactgaggcttcaaccctttaaagaagtcttttcctgtaagtgtaaggagaagcagatggtaatgaaaaaatacgcacattttattatgcgttgcacattttacttattagaatttttagtatgacaccctgcattttaaaaagcctaaagatgaaaacaaaatggaattattctttgaaatatttaaatcagcttgcagcaattatctcaaaatatgaaaataaaatctagcagcctggaaggtagatcttccttgaccacccactttgaaaatctcgtctttcaaagggaggctcttcctctcaaaaaggaagaagagcatgctgtacagaatgagggcaggaagggacgtatccccgatgaggttgttcaaaaaggaagaagagcatgctgtacggaatgagggcaggaagggacatatccctgatgaggttgtatagagctggagcttatgtgtgggagagctggtggtgggaatgagggcaagtgactacactgaaccattctctcgttgaaaagtagaaccaggactggagaggagttacctcggagttctggactgggtgtagagagagagtgtttctgtctgctctttccctaaccacatctctgcctcccttggctgagtgagtcatcctctgccagccttaccatttgccagcactcactcccacagagaccatgtgaggattaacaagccgtactttgggaacgtcactgaaactgtggaaaagcagtgcaaggtaaaggtgaagtgtgaatatgattgtgaatcttaagcacagaaccctgagttcttaaaggcaatttttaagattagtatccatcaaccaaagttcacaagagtttttcagaaatcaccagagtacaaaagctatttcacgaaatgtgcagtggctgtgaccttagtgagatttcttagacttgtagccataaggactggaagagttcgtaaagctcagctcccactttattcttgaattccttatcctgacgaatggtgattcagcatgcagccaggtatagtggaaagagaaggggctctggaatcagacagaccttgggccaggtcccagctcctccacccattgtccctttgacctagaacaaattacctaatctctctatgctttgatttcctcagctgtgagttgtgaacaatgcttgttgttgagagttagaacatggttaaagtgtttagcacagctcctggtatttagtagggcttcaataaatgatagctgctatgctaattacaataatgcttattaagtgttgctcttcaggctcttttttaatatctctgtgatggcaatgcttccatcattagacagtgctgatggctagaattttctgccacatgttgtgcccaatcctatttcctataatttctatccatctactctggtgctgccttttgtggccccatagaacaagtctaaaccaactcccacaaagaacacttcagatatttgaagacaattttaatctcttccccaagttttcttcatggtaaaccctttagttcctggaatccttccataggtgacttagttttgatctcacccaggacacgtctaagtcccttttcctcacatatgagtatctatgggaagatgctagccagccataaagggaaagttgagatggcaagttttagatgccatccatactgaataagctggcttttgtccatggttcttgtgaacattctaatgcataccctacaagtatatttcacagttccttcttttcactgtagtttcaccagagtgttcaggaatatgaacactgctacctgtgaggaagnnnnnnnnnnnnnnnnnnnnttgcagttcctgccctttgactttatattcagtagtgtgacttgctttggccaacagaatgagtcagaagaaacagcacgccagctccaaacctaggcttcagaggccctgggtatttccagttactcttcagtgttctgccatcatcatgagataacctacccccactagcctactggcccaaggaagcagggaggcatgtaggctagggcccccagcagcacccagcctgcactagctgattgtaaccaactcacagaaacttgagcaaaagtaagtgattactgttttaaggcactgagttttggggtggttggttatgcagaatttttgtggcaagaaataattattatggaaattatgtggggccagaaaacataaagtaatactaaccctacctggacagagtacaagtttagaagaattaatgaaagatttacaaaactataaccaagctagatgaacactttttaaaaatgatttaccaaattgtaactttgaatttcttttgcaaactgtgaccaggaagaagataaatgtgtatattacatttcacgaatgaaataggtaatgacgaaagcaaactcaatttctaaatatctgtgaaaagttaacgtgtttcctattcgatatagttcactcatttactcaagaaatgttgaatgaatcatgtgtcagtaccattctaggccctggaaatatagttgtggaaaaagtggacaaggcccaggtctcatgaaacttgtattctactggagatttagaaaataaaaaattaaataaataaagcagataacttcagataatggtaagtaccatgagaaaactcaggcagggtaaggaataccttaggtagtttagaaaagacttctctgaggatgtgacattgaaactaagaccaaaatgacatcagtaattcaagggaagaaagactacattgaagaaaatagcaaatgcaaaggccctgaggtaggaataagctgggagtgtttgaggtacaattagaggtgtggagaggagcaatgtggtatgaaatgaagtggatgatatttaaagaggccaggacatgtagtgcttttttggccacagtaaggagtccgttttattccaagtggaatggaatccactgaagtgtactaagtgcatgacttgatttataggttttaggagtttgtcctgacttctgtatagggaatagattgtaggtggacaagagtggaagcaaggaggtcgattaagtcattgcatcatggtggctacaactagggtgaggccaaggatggagagaaatgaacaggtttgagatatatattggaggtagaatcaagacttcctgatggattggatgtgaaggaacatgagaaataaaggataatggctaggtttttagttggggtaactgagaggatggttggtggtgccatttctggagatgaggcagatgcgaggaacaatgaactcaggggagggagagatcaggagttttgtttgaatgagttaagtctgaacttagacgttgaattggatttgccaggtaggctgctggacatactaattgggtagcgaaggctgaagataccagttgggcagtcatcagcatatagatggtattttagccaagagactaaatgagttcatctagaaaatagtagtgaaagtgttttatttttaatttaaaatttaagaagttttaaattttaaaaactgtcaaaaaataaataaaagaaaaagcgggaggactcaaccacagagcatgctgacatttaaaagcttagcagaaaaagaggagacagaagaagagcctgagagagaggctgagagagtgtgatgctatggaagccaagagaagaaagtgttccaggaaagagagtcatcaacttgggttgtgttgggttgaatgctactgagtcataaagtaagataaggatcaaggagtaactgttggatttggcagtgtggagctgattggtaactttgaaaataaaagatttagtggaataatggacacagaagtcaaatggaatgattgaaaagtaaatgggagaaaagaaactgataacagtgaggttttgctaaaaatgggaatagagaaataagtagctagagaggatgagagtttaaggttttgttttatttggttttgaattggagatgcagaggcatatttcaatgacaatggaaataaacccacagagagaaaagttgatattgtgggagagaaaatggacaaatgcaggatcaacgtccttgagaaagggggagacccagagcacagtgaagtgttggccttccatgctaacaggagagggcaggggataagggcaacagagtaccagtgaaatggtggatttggggatgggaagatgaaagacactgtcagtttacatatacatatatatatacattttaatatatacactttaattattgagatgggctcatgctctgtcacccagacagagtgcagtgatgttatcatagctcactgcagcctcaaactcctgacctcaagcgatcctcccaccttgacctcccaaagcactgggattacaagcatgagccactgtgcccagccacttatattttctcaatgagatatgactttagatcgtcgtttgaggagccaagacttctgaatcctgagcccaaaagcactgtgtccttcatttaccatttggtacatttgaagcagagtgaatatgataacccctttaatataactttaaagagcaatacagatgacaaaacaattcatgtatattctttcatttgatactcttgccttgaataattgaagttcccagtctggaacagaattcagttcgtataaatgaagacattgtaatgaagggactatttacagagatgagagtggaattaagagatgtatccagaaactatcaacactcaggagtcattaccacccttggggccagggggccaaaggagattaatagtattagatccaacgagagctggtgccatgaagggaggaccaaccagcatgatcattcattgaaaagatatgtagtcactgtcaggggagtggtgtcaatgcagagagggaatgaaaaacaaatatcctgacttccctccactcccagtctcttgctggtgcttcccaatggctaaacccaactggaagccagctggcaagtgagtgggctgatatttttcatggtgaaagaatagatctggcagagaataaccagcagagctcctaacacttcatgccataaatgttgaaaagattttgaaaaccactccaaggggaatctttttacccaatgccagtgtataaatgcatcttattattttgtgccagctgggatttagaaaacctagctaaccatgttctttaatacaaatcatcatgagtacttgtaatccacttgcaatcttaaaatgtaatgtttgcccatagtcttcttttatttccatccagaggcatattaaccataaaactggagaagcatatatttcagggctcctcacttgcatgagccccttccaaggccatgggacggccctagaaatgtattcatatggtcatttgtttttgtaaaatttgtaaaggtaagatattttaactgcaatctattaaaaaccaacttttctcactctgaccccagagaattctctccctgcccaccccccaaccagttatatgaactttaggccccacaaaacctggatctgcttctgctttcagtgagactcaagtgtgctgatgcagattttatccctttcccgattttaccactgtggagaggaaaaggggtagttaatgagcatcaaaatggacattctgcaagggaagaatgtagcaggaggatgagaaaaacagaggggggctgtgctaggggcagtggaagaaaatcactgtgcctgaaggattgcacctgagtcacagagggtttgcaggtgtctaccaggtgactagtttccctccagggcctaactcaggtgctgctctttatattttcagatgcagatggaaacctgtgtcgaagtaaccaactgttgcaagtcatgctgaccatgcaccgaattgtcatctcctctgcagaactgctccaaaaagttatcaccctatatcctttaacatagtgactggcaatcccaaaatgggatccacccaaaaagtagcttgaaatttgaagtatgcttttatttttattggtttggaataaccctgagtggcaaataggttcatatgtcctttcaggggtatgggtgcatgtgttgggggtgtgttcatgtatcctctgttgggtggggcaatgttattgatgctgattgctctggggggtggtcaaagaaatcaatatgcaagcacaatcttcaggctcttaatagtaaaaaatattttttctgtagagtgtgcaaaatagatattcatcctgtgcaaattgacaaaggtgcaagcatgactcaaggataaatttctttctggccttcctgtccaattcttcaactttctccaggttctgaagaaagattcccagtgccacagcatctggagaatctgctggtgccttattgcttcaggcaggaggactgactatgtgccaagcaaaacctgctggactttaaccttattacgggatatgaatcaagtagggaggagaaagctcctgcttgctttttctcactgatgacactgtaagcagcagcccccacaaaagaagagttgtaggcggagtgagaccgtttagcacccaaggcgcaggtccctggtactgtgtcatgacttgtagctgctctaacacttttccactctcctaattccccgcgtttcatcttacagcacacagaaaaaataaaaaccatcaggactgaatcccttctctatacctactcatgagtctttacctctcatctcaaaggaggtgttttccagtagcacacaaagtgggggagcattgcgagaagtgcacataaataagaggtgcaggtaataagtgggtgcctcttctacagagaattttaaaccatcatgaaaccaactcagtgtctactttttattaatttcatgtaccagtgattataaacaatgtcagtgattaaatattcctccctaaaaacttatttgttggcctagggactaaattgttcctggggtgtctgggcacagtagctcacatctgtaatcccagcactttggaaggccaaagtgggcagatcacttaaggtcaggagtttgagaccagcctggccaacatggtgaaaccccatctctactaaaaatatgaaaattagccgggcatggtgacatatgcctgtaattccagctactcatgaggctgaggcaggagaatcacttgaacctgggaagtggaggttgcagtgagctgagatcacaccactgcactccagcctgggcaatgaagtgagactctgtctcaaaaaaaaaaaaaagaaagaaaattgtacctcggggttcctgcccttagtgcactactggctgcctacatattggggcagaccccccctccctttcccatggtccctcgtacttctcacagaatcttactccaccagctatcacccctcctatacttttaaactctacctcttcaatggcacctgcccctcagcctaaaacacattcaagtctcctcatctaaaaatcaactcttaaccctacctccccttcattccattgttagggttaaaaatttgatgtgaaagcgtcttaaaatagtctacactcactatctccaatctctttactactcctcacttcgtaactgtgttaagttggcccccagtattcgaactttcctctgatgtcaccagtaacctcctgattgcaaagcccaatggctttttctcatccttgtttccattgacccccagaagcattaggcatgactgacaaccccgttctcctcccagctctccctccaaggctcccggaacgacaccctcctggctttcctacctcttgggttgggccttctccagcttttcatctagaggcttcttcgagctctgcttacatatggtgtaatgtcctggttttcctcttactcagcttcctttctgtgggtgatttctcaccagaattcctaccactgtttccaccattcttctgtgctgatggtgactttcaagtctggatttctctaacttaaacctttccttttttttttggaaattggtgcggggagaggggtctcactatattgcctagtctggtctcaaactcctggcatcaagtcatcctcccacctcagcctcccaaagtactgggattccaggcatgagccacggcacccagccatctaacctaaaccatttttcttaggtttataccagtttgtcctgctaacacttaagactttaatatatgcattagcccactgtccccacccacagccactacctcattaattctgcttcgacaccagtacagccttgttttgcctaagacacattctgagaaatacatcattgggcgactctgtcattgtgtgaacaccatagagtgtacttacacaaacctagatggcatagcctgctacacttctaggctagacggtacagcctgttgctcctaggctacaaacctgtacagcaggttactgtactgaatactgtaggtggttgtagcacatggtaagtatttatatacctaaacatagaaaaagtacagtaaaaatatggtataaaagattaaaaaatgatatgtataggggggcacttaccatgaatggagcttgcaggactggaagttgctctgggtagtcaggggtgagtggtgagtgaatgtgaaggcctaggacattactgtacataactgtaggttttataaacactatatacttaggctatactaaattgataaaaaatatttttctttcttcaataataatttagcttactgtgactttatgttataaacttaatttttaaaactttgactctacacagtgtacagctgtgtaaaaatattttctttatattcttctgtaagcttctttctgttttaaaaatgtttaatgtttattaactttttaaactttgttgtcaaaatctaagacacaagtatacacagtagcctaggcctatattgggtcaggattatgaagacaggatgaggcaataggaatttttcaacttcattgtaatctcatgggaccactgtcatatatgtggtccgtcatggaccaaaatgttatgcagcacatgactgtattttcatggtcaatttcagttaatagtgttagtatctattcttgcctaaaccagtaacatcagaagcactcttgacttctcccctgctttcacctcctacagtctgtcacctgatcctagggtttctacttcagaaatgactcttatctggtctctgctctccattcccataccatgccttagttcatgtctccgtggtctctctcctgaaccactgtcccactccagtctttgtatctacatggtccgcctaccccgtctcatggtagctacccttgaaattctttcctacaaagcaaattgggcaggccattgtttctgagcctctgcagactacggagttaatgtcaactccttagcttgccagcaaaagggcctcctcagtctgttcccagcgagtttttcctgcttcattccgtagctctctgagaaaccctttcccttcctcactgaacttctcaatatactggatgtaatggggccttttatcattcctgtgccttgaaagcctttctaccctctttgtttagaagctctttcaagacccttctgggaagcttttctagacttttccagcccttctccccttttaaaaatacttctaatgttttaaaatagtattattgattgacaatctatttaattcctttgattttagttttgtactgcttaagtcaaagtgcgtttctcatatctctggcctggatgtaatctgcattgaaaaactcacagaaagtgtgaagtgtttttattctgttagctaaataaatgtatctacctaaacttcagtccgttttgcaatgtagtgcctatgtactctggtctttatagatgaccgtttcaagtaaagtacagaacgtttgtgtctagctgctgtgatttcaatttggttaataatataaaagattgcaagggtactgaaaaattgattgaattacaaattaagaaagatatatttttgtattttaaaagtatgtacactgtaacttacctatttgtgtgtcgtctcccccgctagactctgtctttcaagggcagggagcaaggcttatttatctttgtatctagaacttagtttagtggctgtttcatggtaggacacaataaatgttgcattactatgggtgcaaacattgggatactttttatatttacaagaacttttacctgtgatatctgggctttgctcaggtgaagatgtaacctggggtagggaaagggattctgagagtatgaaataatactcctgtaatgaaagccaggttaaacattgaaggcaaaattattttctttctttacgcttagtttccctgttctctgacctggaagtaatagaatttttagttaaataagctcagatggtctcctgattaccattgtgaaaagaagagagggataaatttgaaaatgtgctttgaatagtttaggtgcctgaaaagtacagtcagaactgtactggtactttatagccacagtactagctatgaagaaaagaaaaaggtatggggtctgagggttccagcaaacactgaagtttaccaagatcagcagatgcctgagcctcttactatttagcctgcatgtgctggtgtttgcttcagctcctgaatgaagtgagaaagagggtgccctgctccctgtggggggcagcctttgccatggcataggggctctaaggacctctgaatgatgcccaggctcagcactcacgtgtagactgactggatttacaacactgacgctgcaccacatgcagccaacgtgcactgtcagaatatacttttgaagggaaggataaggagccactgggagaaggtgaatgacacggtaaaagtcaccatgtcgatttaatgtatctacttagctttaaaacagaagtgtggtttttgtgccttcccctttaaaatggaagaataaaaatttcaacaagtagaacaaatgataaaaatatagaatctgagaggtatttatctatgtgccttttgcctgaatctctttgcattgaagtgatgcattttcttagtgatgtggcataaagaaacataaagccatctcattctcacttctacttttccacccaaagaaaggcaggcataaaaactttctacttcatgaagtttgccagttccctgcacttatttttatgtcaattacctttgttgatgtgtagggttttttgggtttttgttttgttttggtgctctgatctaaagggcagattttataggcagtatatgtattaaaatttaatttttaaaactagaagtcattttattaaaattacaaattttataaccatagttcttgtttagggtttcaagtttagcttgcaaatcttactgtttccataagtctagcatgtttcagcaagcatttttaagggactttgaaaaatgtttcgttaatttgaataatgttaattaaatattcccaatgattttaaactacagttctgcattttatatcttagataatttttaagtgcttcagatacctccctgaattctaaatagttttttataactctaatagattaaatttataaacagtaaagctatcattatcttagatgttccaaagctatgcataaacttaataaggtttcaatttaaaaccacaagtgtaaagcacttaattatatattgcaaattgaagtttcaaggctatcattctaatatgcttttaaacattacaagcatatacaatttcaaaatgcacagatctccttcctgacaaaaaagatcagtactatgactttgactctcttttgcttttctttatttaactctaaattttccaaaggttaaaatatatacacccacagaaggaagaccagtcctgtcccagttaattaaaatgtttgctgggttgttcactggattcctctcatgggcccagctggaattcactgaaccctatattgtagtcattatgcacagcttttagaaggaaaacaaggcatggcctttacgggcgggcacagagcccacatagcctgatgcctcagtctgttgatgggaaatggcaggacctattcgggctcatcactgcattggagttctcatctctttgactcttaaaatagatgaatatttttttccatttatctttaaagacatgtgaacttgatgagatcttgctattctttcatattcttggaatgctcagaatgaaaaggatccttaaggtgacctccagttttgttttcgattattcacacggtttatctgacttgccgttacaatctatgaggtcagtctactgacatcctctaggtgtatatattgtaactttcatattattgttcttcattatcatgacatatctgaatattgaatatgtattttttcctcttcgaattcactgcatacatgtgtatcagttaaaagaaacattgtaaaagataaatggggctgctgttttttcttttttttctgcttcatttttccttcataggggctgctttttgagcacaggcaaggagtcatttgccccttcttcactttttataagttacctgtctcaggacctctttacatgattcatttcttagttctgcagtgctgctgcttccttccgtaagccaggtcgacgtgggctggagagaaaattaccatcatcgcctttctaggcaataatatgcatacagctgtacacatcaagttggtttttatcctttggccagaaagataaagcatcacattttcattttttagaaaaaatattttgggaggtagtttcagcaaatacttccaaagatgaaaagtcgtttggtttctgtaacagaggtctccatttcccttaaccacagccctacctataaggatgctttggcaaagaattcaccaggactttgcctgaagatctgttattttgtaaggtaatgtttctttatgtatttcaagactttgtggagcaaggtgaaatgaaaggtgaagcaagggactttccctgcctttcctgacctctatagaacacctttggacagatggaaaagggtagtccttcataacagtgaattttctctggtgtacttgagcttaattattttataccaaccttttttcagtctttggtatcaaatgacatgaaggagggaatacagaaataattaaaggtctgttattttctttatttttgttcttaattatacaagtaatatagctcattatagaacatttttaaaaatgtagaaaagaatataactataataatgatcactcatatccagttacctattttggtgtatttcctttgtcttgttttcatgtcaatttttttgagatgaaaatatatatacggttttatatcttatagttttcacttagctttatagcatgagaatcttctctagtcattaaagactttttgtaaacattctttttaatagccatgtaatattcgaatatgataaagcataatctatgaatagattgtctcattttggacatttggtttatctatagttctctcccttataattatctccaacccacatgattgtgcctgaatctttgtcatggctcctttgattatgctatgccttatcctaccacagcatttgtgtggagggacagaagattttcagtggatgggttttcttccttccctgctcccaccccagctccttcaatatactaatagacgaatcagactttgtctttttctgagttctctttgtggcagtaaattccttttggaacccaacaaattgtgagtccttggtatcagttttggattgtgttttttaaccccctccttgtaggtattggataacagaattctgggtcatgtttaaaatggacgccagcttgacagacactatggaggagtttcaggaactggtgaaagctaagggtgaggagttacattgccgcctgattgacacaactcaaatgtgagtgtcaaggtcttgactcatctttcgaaaccacctccctcctgtaatataatcccagttgcttgttgggcttctgacccccagcggtgactgctgctctctttctccactctgagaagcccctcaaatacacaggttcaaactgcctcaccaaagtgaaggcttggcatttaacagaaaagcagagaggcctcatggtgataaagcagtaggtgacatatccaggagcagaaaaagtaagtcccagtcaaaaagaaatcaggtagcaagatattgactaaaattaatccagataatgaaaaactgaaagtgcaaatgactgaacccacgcttaatgccaggaggcacacctgaacttgtaaatgggacaggactaaaaaatgtattcaggagaaggcttataacatatatggatgtctatgaaagacacttagacttccagagctggatgggattccaggaatgttttaaattattccttggaattcttatttataagactgacccattctgggaaaatgagtgcctttcctaattagggggaggggaatgtatgctttgtatgccagggttttcacagtgtggctgctttattttgaaatagtacaaatccctaagaaatagaattctagaactgatatatattctagagatcatttcatccaacatcctgatttttctgactgggaaattgaggctcagcaagaatgtgactcatctagggtccagctagttaagctagtgacagagcagcagctagcctctgaggtcctgtccatgatgcactgtagccacgtagaaatgatttcaagattacattccagagccccaaataagtctgtttatcagtttggattctctgtacttctctgcttaaaattacacaacttgaaagataagagattattcaaagtaatagtttcttcattttaaagatgaaattagagcccagggcaattctcaaccccagctctccttgtcccagtatttcctagctgacttttcttgaccaaaattttccacattatattctgtaggaattattagtctgtggggatattacttggccagatataactgaggaataatgagttaaactttccttttgcagtgcttttcagagtgtgtaatatgctcactggccaaagaggctacagaatttatagcacttcccaagctcattgaccacagaacccttttatcaagagacaaggttcccaggaataccagtttggaagacaggcaacctgctgtctttcaaaatggggccgcttccctttgcttgtttagtgaaggaaactgaataagaaatgcatgggttgattacaagaaaataatgggggcagggcgcactctagggtcagctaggcttccttggtcatttcagtagctgaggacatttgaggaaaatgacacaactctgccaagagtgaccatatgtttctacgcgtgattccctccctttatgacatcttgctgtggttctttgagctctctttctggcatgaaaactgtttcactgccttgggatttccaaccagatagagagtccctatcattcacacaagaatgaaggaacacacaagcagaatggagggagcagacataccagatgatacacaaaggagccaggaccaaaggcaaggaaactgaccgatacctgagactccttccttcccactgccttaaagtaaactcatttatcctgtacccaactgcacacttaaaaggctcactgaaaaccagcaagacctcctggaggctgccatggaaaaaaactgatttggagaaactctgtgaatgcactgttttggcattcacaaggaaagttagctaatggtgttttgtatattcttgtgagaaatgttaatggatttacttgcaaaaagcgatttattccttttccctgtcttctccctttcacatttacccacaaaagcaatgcccgtgactggtccaggaaacttactcaaaggataaaatcaaataccagcaagaaacggaaagtctccctgctctttgaccatctggaaccagaagagctatccgagcacctcacctaccttgagttcaagtctttccggaggatatcggtatgtatgcaaggggcaggagaaaaatcttccctgggatatttctgaaaataagatgataattcaacagcccatccgcttcataaccttagaggccccctcaagtcgtggcaggctttcctgccagacatcatagagtctgaaaaaatcagtaccatctgaattcctttgattgtgactcctgtgcttctcccatctctcttcttccatgcccccgccccataccatcccaccactcactcaagttaccatactgtgggcacacatcacacacacacacacacacacactctctctctctctctctctctctctctgtctctctcattctaccctcatacccctgataatcctcatacccctgataatcattaggcttcaacaactctttttaaaatcttcctcaaaaaaaaaaaggggggggggtgcgggggcggggagaggatatgtcctctcagagtttgaattcattctggggtaagctttgaatggctctgggaaatcccaaaatagattctactgccctagcccagaacatacctaaatccttgaagtggtcctggcccagaagtcactgtgattctagagataagctgtgctgacccaaaacctttcaactggggcaactaagcagagtcaaagggagagagatttcagttgatcatcaggtacagaaagagtacaggttcatcctttcctcactgcaatccatatgtgatcccaaagaatattagttctatgcaagagaacttgtcaacatgtcagatgccaacagaccctcactggctaatgtgctttcctgagaaatgaaacccttattccacttagcccctacccctaccaacagatacagtcttcacctccgtgctaaaaatagtgaccacctagttgctgggtccatttattaaaatgaccagtattctcctggtgaggggatggaggcccagagggctgacttgaacaaggtcgacacagctgattacagtcaaagctggggctaggactacatgcctctctcagtcactcagcaccaatttgttgagctcagttgtgtctggaaggagacctgcaaatcaggttacaaaggttattttacattttcattcataatattgacagcccttctgttttcacgcagctgtttggtcactcagccaggaagctcccagcttccatttggaaataacttctccaagcattaactctccattctctgcacccctcagtaccccagacccaaattgaaaagctctgcctcaggagttcccatttggcagtgcctccccgtcacagggaaggacagcagtcagagctgagccactgaaaaaagccatttatcacacaggaaatctgagctctgcaggggtcaaactggcaggctgcttggtcaggcctgcaggatgtctgcttgatgccaatgctcacatcagtggaggcagaagtgaaaaatcagtgcagaacgaggaatcccagccagtgtccccaggggttgaacagtgttctatttgcaagtgaaaacatcagtttcaaccttcatttcttttgagtggcttggtcccttcatagaagactatctcagggtttttttgtttttcctgtacagtgctaaacagttttaccaaacacaagttttctctccaacatgaggttggagggaaatttatctgtgctgtgaattgaaaggcatttgatatcttctgtttattacaaaactttaggggtagtgaggatgttactgggataattgttttaaaaaaacaagtggatttaaagttatatttatagtgggaggggggtattaaatgtattcactggaatatattaattgaatgaatatattcaaaatatatgcaatgagttgtggctactttcttttagaaccagtaagatgtttgctttatatatctctcttaaggagcgattttggtcctactcataggttttccacccatcagcagccatatagcacagtaaaatggggctcagttaatttgcagctattttatttgggttgtgacttctcatctatatatttactacttaggcagaactaaggtgtactgtagtaataaccccccacccacccacctcctgtacaatctcagtggcttaattaagcaaaagtttatttttcactcacactgcatgtctaacatgggtcagcagaggctgatcagagttccccaggaacccagatgatggaggcttcatcttgccaggaatttccaagatctctgcagcagtaggaaggcaacatggcagaccactcactggctcttacatctttgcctccaaagttacatcgcttccactcaacattctgctggctgaaccatgtcatatggtcacaccttctttcaaagggaagagttgagaagggaagagttggaaataattggggaaaagcaccaaagacttccataggaaagttgaagagaaacagactgtgatttgagcagagggattctttgtgacagggacacaatagctacaaacatcacttagactagatcttcaggggacatttccagttttacacatgttgtttcattgccaactgtagtcaatgctattgtcaacttgggaaaccatgatcagcaaacatatagctaaccaaatttttaagtactccatttgcctctgctccagttggtgagtagaaggaaatacaaacaggcttgtattagcataaggttcataactactccattagcgcaaccttacatatatgtaacactttaaaaagttaaagctttcacacattatcttctttgatcttcataacaattctatgtcctagatagggcagattttatgatcacatttttaaggtaagaaaacagctggggagagagagatttgtttttgtcaggggaattaccttttattcccttaaccttagcagcaatactgatctttattctgtactgtattctttagaatttagaatagtcagtaacaatatctactgaaatacagcatttggattaactaatgtgtctacacatccacttattcctaataactttcgatgtagagaaatcatgctgtgggtagaataaggaagatttccctcccatcatgcttgttggcaagtggccaagatgcagaagagcaccaggagctcctctgttccatggcagttcccagccatcaactgagcagactggacttgtcccttaaatcttctggaataccagagtacagtactgataggttttttttgttgttgttgtttcttttcctgcagttctctgattatcagaattaccttgtaaatagctgtgtgaaggaaaaccccaccatggagcgatctattgctctgtgcaacggcatctcccagtgggtacaactgatggttctcagccgccccacgccgcagctccgagcagaagtcttcatcaagttcatccaggtggctcaggtgaataactggtttaagacatttggcttgggctataaggtaaactttctatccccttttcctccagcttagtctattaattagagctgttttttccctcctgaaccatggcgagggggtggagaggtttgtgtgccttcaaccagatctagatatggtgacttgtctcttcttccatacaaggacagtgtggaggggagggggccatacaggccatatcaggggtcaggatccagttttagatctgtttagacctttaacatttttcaaaagatgcttaccagcctacattattttcccgagtctggcccacatggcaaaggaaagggcaattctaagatttactggagctggaccatcctggattgtcttaggtctttaagcccatgcagtgctgaatggctgcatttaatgtttgaggggcattttataagaggaaaacaagtactatgaacccatatttgaagttccccagagattctagcttctctgtcccagttactgtcctatataggcactggcattgcatgggaaaataagacaaagtccttaccctcaaaaataaaagtctggtaaatttggaataaataaaagattacacttaataatatctttctccaactctggatggtctagaccagtgtttctcaaagtcaacagctctgactttggatcacctgctctgatattaactaaaggtatattaaaagtacagatctccaagcctaaccccagatccaggcaatcagaatgtctgggttaggtccagaaaccattgtgttaaacaaatacttgaggtgattctaagaaagcactgatctagaaggtggtccacagatcagcaacaacaaaaggagagagatgtaatgcctcccagatgtggaatccaccagtctgaataaagcagaaggggagacatggacaggaaattgcaatgcctcgtaactagtctttaaccagcgttaagggagactcacggcacagagacaagaggcagcctctaagctccccatataactgacatgtacagtgactctgctgtcatctgtcttctgtgtcacagaagctccaccaactacagaacttcaatacactgatggctgtgataggtgggctgtgtcacagctcaatctcgaggctcaaggagacaagttcgcatgtcccacatgaaatcaataaggtcagtgctactgtcttctctggggcccttagcagcattctcaagatgtgtgccaacattttctccttggtgggcagcccagagagcatttccaaccacaccatcccttgtcaaccaggctaagtggcagggaggcaaaccttaaggaaatccataggatggagaagtcacattttttagagtaactgtgattttgtctggcctcagacagtgtcactgcaaacattcctgctggaccagttgaaacaatgtgtgcctcttcccatgttcataggccatggaatattcagttaccatctttgacactgattccctcgctccagctccttgctctaaaatgtgttctcaaaaggaattgtggttcggttgaccataggtcagtttgcacattgagtgtagttatatagtgatatattaaaaacttagctatccagaacccttgaagaatgacattccggatagttgaattttaccagataattggatatgagttcttcagataccattttgtaatacataatgttttattaatgaatatttttcttaaatgtcctgtacattttcctacattattagattttacagaatatacttttatcttttatgacatagggctgttttgcttgtttctcttttttatagaaacagggtcttcctctgtcatcaaggctggagcacaggctggcacgatcatagctcactgcagtctcaaactcctgggctcaagcaatcctcccacctcagcctaccaagtagctaggaccatgggtgcacaccattatgcccagctattttttaaaatttttgtagagataagggtctccctatgttgtccagactggtctccaactcttggcctcaagcgatcctcccatctcggcctcctaaagtattggaattacaggcatgagccactgagtccagctggagctgttgttataaatataaaccactgtaatataccgaggatataaatgtatggcatgggttagataatgactgctctttgagcactttcatgtaagaggaccttactatactcaagccccgatccttccaaactagcatggagaggaactctctttttagggagagatacctaagctcattaccccatctgtttttcccaggtgttcagctcccttttggggagtcttttattatctctgttatcacaatgctgggcctctggggaggccccccacttcccagtggtctgatcaaaagggcatcatctttagtcacctcttcattccttaacggttctgctgaaaccaggtggaacagttgaaaagattgcccacatctcagaggtgacagagagaaatagtcacagagattaagaagccttcatgtcatttagcttataagagagagcttgctcctcttcagcttggggtccccccacagcagtgcttcctgtcggtagctacttgaccctcagggtggtctgcatagtgaattagtaagtccagggttgaagcaaaagtccccaagttgttgatttcaccttcggaggggaataaaaatatctttatcatttttgctgttacactcttgtcttgtgagccccttccatgcctagggctcacctgcaccattggtagaggtttatgaagaagaagctctcttgccatctcccagtgatttgaaggggtctgactccaagaactccaagttcttcattgtggagaaatggtacttcgtaggccacaattttattaagtttgggcacagtgtctaaaagggttacagtagtcccccttatctgaggttttgtctcctgtagtttcagttatctgaggtcaactgcagtccaaaaaaaatttaatggaaaatcccagaaataattcataaattttattatttatttattgattgagacagtctcactctgtcacccaggctggagtgcagtggctcagtctcagctcactggaatctccgcctcccaggttcaagtaatcctcctgcctcaggctcccaagtagctgggactacaggcgtgtgccaccacgccgggttaattttgtatttttagtagagacggggtttcaccatgttagccaggctggtcttgaactttggacctcaggtgatccgtccacctcggtctcccaaagtgctgggattacaggcatgaaccaccacgcctggccaattcataagttttaaaatgcatgctgtgctgagtagcatgatgaaatcttaagccatcccattccattctttctgggactccttcatatcagtcactaagtagccgtcttggtcatcagattgactgtcatggtattgcagtgcttgtgttcaagtaactctcactttgtttaataatggcctcacagtgcaagagtaatgatgttggcaatttggatatgccaaagagcagccctaaagtgtttcctctaagttctttacttaataaggaaggaaaaaaatcatatgctgaggttgctaagatctaagtaagaaggaatttcatctatgaaattgtgaaaaagaaaagaagttcattctagtttctcttttgtacttcatactgcaaaaagttatggccacagtgcatgatgggaatggcattacatttgtgggtgggaaacatgaacagaaatgtgttccacttgacagcaatcgggtttgttactatgcacagtttcaggcatcaattaggcatcttggactgtatccccctaaggataagagaggactccttatgttgtatgataacatgattggcagacagtcacttcatgtctttgcttctgagaaagctggttatcactcatggggaatggattctgtgaactgcttgctgacttgaatgacaagtgattgaaaagaaaactagatctggctgctccctttctgtgctggtgagcagccgttcccacttccaggtttgaagcagggtgtaacctctaatgtcctctctcctgtcctttgctcagaattgatctagtctattcagtctttttagttcaaggttttagtctgtgaatggaatgtcacttgctttctagtcataggcccattctgagaatcttgaaaggcccatcaagcacctcatagagaataacacacaatagactactgaagctccactcttaaaatacatgctcttccccatgccagcaacatagtcagcatttcctgacatcacatttcaactgttaatcaatgcagtgtctctggaagcattcagaagacaccaaggaagggaatcacatggcttggggacaggagttagagggatagtgttcactatatattcttgtacctttttaatttttgtatcaggtccttgtttttgaaaagaaggaaattttaacataaaaatgataaaaccccgatttataatgtttaagttatataacagattcaagcatatcttgtgtttataaatatattctgtgatatttgacatagctgaggttttaactggggagtcataatctgtaccttttacatgaattaccccctgctcaacaaattctggatggggtgagatcatggcacaggatgcaaacatgcaaggtcctcattacagacaatgcacactgcctagcgggtacctgtgattggtctgttctgctttgtaggttctcggtgagatgactgagctgctgtcctcctccagaaactacgacaattaccggcgagcctatggagagtgcaccgacttcaagatccccattctgggtgtgcatctcaaggacctcatctccctgtatgaagccatgcctgactatctggaggacgggaaagtgaacgtccataagctactggccctatacaatcatatcagtgaattggtccagctgcaagaggtggccccacccttggaggctaacaaggacttggtacacttgctgacggtgaggctcacactggaggacaattactaagcactttctgtgtgccaggtgccattctataccccttaccaaatattagctgttagtcctcataaaggctctatgaagcagatcctattactatctccaacatatagctagggatactaaagcacaaagatataccttgccaggagaccacacattattaagtagcagagccttgattcagacccaggtggtgggactctagagactgtgcccttcagacttctaggactgtttcactacctctacaaaagcagtcctaagctctctgggaggagctgatggcaaatcaggatacaagtcttggtaacagatggagagaatgaatgtgctctcataaaaagggcaggcagtaatttaaaaaacaaacaaaaaacacccagggttattatttggttcctggcttagatctttgctcttggagatattcaagtgaagatgaacacttgtcaatggtgtgggagaccaggatttgcattttgcatatggggtgagatcagatgatgaactcccttccagacctgcaattccgtagtttaccagctgtgtgactatggacatataaccgtccaagattcctctcctcaaacgaattagnnnnnnnnnnnnnnnnnnnnccagttctaaagttacacagtttttaacctgctgtttttggagagtagaataatgatcataacctctttctgcctcacagcagcattttgatagaaccctgggcttcacatcagctggtgtgtgatcctagccctttcacttattagccaggtgaccttggcaggtctgtgtctcagacatcatttgtaaaaacatggagtgaatcttaacattctttggattataaatcttgtgatgaaagctgtgaaccttcttcccagaaaaatgtacataagccatttatttttaaatatgcatgtaatttcaagttctgaaatccttgaagcctatccatagactcaaggttaagaataagattattcctaaggacttctctcctaaaattttatagttctaagatacatgaaactcactatttttttttttttttttttttttggagacaaggtctggctctatgacctagactggagtgcagtagtgcaatctcagctcactgcaacctctatcttccaggtccaagccatcctcccacctcagcctcctgagtagctgggaccacgggcacacgccaccacgcccggttaacttttgtattttttgtagagacagggttttgctatgttgcccaggctggtctcaaactcctgagctcaagcaatcaacctgccctggcctcccaaaatgctgggaatacaggcatgagccaccatgcacccagactcattaactcttaatagcaattaatatgtcttaccatttaaactggattttattgctggactcaaatttaatagtctcagactatacacaccatcctttcagatcatctgtctgctttgagagagaacaagtgatgtattagtcatctgtccagacaaggcctttggcctaagctctatatagaggcttagatttaaatcatagttaaaaagagggcatcctgagatatgtccaaaattaaaaacatttcaatgagaattaatgcttgccctattgcaatagtaggtgttatacctgttttgtgacttttgaaaacaaactgtttagaacctaaaagagtaaactactggcaaggaaaatccaagaaagaaccatcagctgtgggagaggcaaacagcatcttagcaatgaaccctgttctgctttgatctgcagttatccctggatctttactacactgaggatgaaatctatgagctttcctatgcccgggaaccaaggaaccacagagctccagtgagtttttcatattaagactccacatgtaacaggtgctttacaagcttctcctcgagttcattcatcctcaggaacagactttcagttcagtttaatacatgtactgtttttcttagtgctcaaccttatgctaggaacagagaaagcttttcaacatatgtctgaggaatagttcctgtccattaaaaagctgtgatatagttgaagggataagcctaatgtgtgaccagtgaataactagtgaacagtaaataactatatcatcagaatgccaggtgtggtggaatcagtcagtggtttacaaagtagagaaggaagatactattgtgcaccagagtgacatcccccccgcattaagaagagtccccacataaatttcttttctatgattcattgatgataatgagagtaatatgcgtactaatcagaagctaaatttctgaagatttccaggttggtagatagaaaagccccattttcctgtaatgttctgggtgaaaagaacagtctgctgagtcttttgacctcctatgctgagaagtcctcaaaatagtacacagtcctggcactgcctgcagtaggaacttcacaggttatctgccctaccctcccacaggcaagtaaaatcacttcagtctcctgggacgtttccaaaccccaaaacaagtgatactcaagggaagagagttgcccacacttaagaaatccagctcatctattggggtggctaaattgcactcctccacacagaaagatcaagttctagctttctattgtaatgaaagattccactgaaaatatttggtagattccattttcaggttagaggcatttcaatggaaagggtacattctgttttttcagagagattttaatttgggctgagtttcaaatacagtcatgcaccacataatgacattttggtcagtgatagacctcatataccacagtggtcccttaagattataatggagcagaaaaattactactgcctagtgacagaacaattgtaacattgtagcacaacacattactcactatgtctgtgattatactggtgtaaacaaacctactgagctgtaaaaagtctaggttatacacttacgtacagtacataatacttgatagtaagtattaccggtttatgcacttactatacaatactttttatcattattttagagtgcattccttctacttagaaaaattaactgtaaaacagcctcaggcaagtcctccagaaggtgacagctccatgcatgttattgcccctaaagaccttccaataggacaagatgtggagtggaagacagtgatattgatgatcttgactctatatagacataggccaatgagtgtaattgtaccttagtttataacaaagatttaaaaaattaaacatttttaaaatagaaaaaagtttatagaatatggctataaaggaaataactggtacagctataagctatacaatgtgtgctttaagctaagtgtcataacaaaagagtaaaagttaaaaaaattaaaagcttttacagtaaaataaggtaatttatcattgaagaaaaaatttaagaaacttagtgtagtctaagtgtacagtatttataaagtatataggagtatacagtaatgttaggcctccacattcactcaccactcacgacttgccacagtaatttctaatcttgaaagctctattcatggttaagtgccctatacaggtgtaacattaaaaaaaaatttctataccatatttttaccttttctatgtttagatatgttaagatacacaaataccatcattacaattgcctacagtactgagtataataacctgctgttataggtatgtagcctaggagcagtaggctataccaaatagcctaggtgtgtagcaggctataccatctaggtttgtgtaagtacacactgtggtgctcatacaatgacaaaatcacctcatgacacatttctcagaacatatgcccagtcattaagtgatgcatgactgtatttagaaaagagcttgtccaggcttccgatgatttttcttgtgccttcctgccttttagctaagcttttccttattcacatttctactgcaaaatgtgactggagaatagagaggaaacataaatgatccactttactctttgttgatagctctgacaaagggtttaatggagagggaattgcaactcaggcagattgagaatttcaaattatctgtagctgcagataatgtatgtgaagagcactctggaaaccgtaagcacaatgccttgttagccaaaattattagtagagatttcaattgcctgtgggttctctgctccttgccactgaacataattgaagattgtccataaatgtaaccgtcaggtagtgggaaaagaaagagctataggttataatattgcattgtagtcatgaggatttctctaaatatttcattttagccactaacaccttcaaagccaccagtagtagtggactgggcttctggagtgtctcccaaacctgatccaaaaaccattagcaaacacgtccagaggatggtggatgtaagtacagctgtgttcagcacacaaaaactaggcattgcctggctcagttttgtatgtggggtaaagggagaggaaagcacaatggtggaaatgtaaaggcacgaaacttgaaccacttacttctcttactgtggctttagaacaattcaaaagttacattttgacaacacacactggactcatatgaaggcagttgtgcctcctcttcaagacctagcaaaagagcatatgcttaaaggttgtcagttgatttaggagtacagaagtattgggatgcatttgagtatagtaaggggtaatcaggtaaacctaaaactgaaaacctttgtactgcttaattcaattctctgtgctaattgctgaggaaggggtatatattctcatacttatgcatgtatcctcgtggacaactcacatgtaacaatggaaaactaagagcgtaacggtgagaaacaagaggattaacagtggggacagagcacttccaactgggctgtttgtagaagcttctcaaagaaggtacaactggagctgagtgatgaaaaaaagggtagagtgaaaggagaacatccctctgcgcagtgaactaggagtagccagcgtgatagtataattgacgtgctaatgattcaaagtacatggccaccccccacatgctgctaccagcaaaggcctgagatgtgacctgccacatctttgccacagctaaaggagcaggtttccctgttcctctcgttcaggttgttaaaaggcttttatccaactgccccagctctttgtcatttgactaaagggagagaagaccggtttctctttagtaatcaccaaaaaaactcctttttcacagtctgtcttcaagaactatgatcacgaccaggatggatacatttctcaggaagaatttgaaaagattgctgcgagttttccattttccttctgtgtgatggacaaagacaggtgagggtttgtacttaggaatatgtggttatgagcccattggtgagaataggtttataggtatgtcactagaagaatttgaaaactcagatatgttgctgctgtgatcacttaaagaacagaccatgaaatatgcattcttttaaaaatattctgggcctgggcacagtggctcacgcctgtaatcccaacactttgggaggccgaggtgggcagatcacctgagctcaggagttcgagaccaacctggccaacatggtgaaaccctgtctctactaaaaatacaaaaattagccaggtgtggtggtgggcacctgtaatcccagctactcgggaggctgaggcaggagagttgtttgaacccaggaggcggaggttgcagtgagccgagatcatgccactgcactccagcctgggccacaagagcaaaaacctgtctcaaaaaaaaaaaaaacaaaaactgaattgaacattccataaatctgccactttataaatagtcaactataaataagaaaaagtttagtcttccttcttgctttgtcattacagattttgggaaacaactaatacttattcatactttgcatttttacttttctcaaggttaaataaattctatcttggttctctataggaaactaatcatatggttagtgggttccagttaggtactgtctaaagtcagaaactgtagcataagacatttccctccctatacacatgtacatgttacattgtttctttttcaagtcttatagatagtggtcaagttagttagggaaacctagtttggccaaagaacacctctgtggaaatgagtaatgctgccttacctacttaccacatgtcatcttgtatccttgttaagagtagggcccatggaagtaatcatgaggtagcacataccatattaccactgaggataaaaagaaaggtgagtttctaaggctagaagcccccccttgctacctgcctccatgccccttatactcacatccttgccttggtcatctgccggcagggaaggcctcatcagcagggatgagatcacagcctacttcatgagagccagctcaatctattccaagctgggcctgggctttcctcacaacttccaagagaccacctacctgaagcccactttttgtgacaactgtgctggatttgtaagttgttcttagggtgctccagggctgaatttggggaagagtgtgggatactttaagacaggcacagacctcacaatccttatgaacccatcccagcttggagcccagacagacacctagaataacctagagctcaagcgtgtggtttttacctgcactcatcatctctcgcttcttcctgttttttcttttctattgcaatgaggccttagataaatggtaccagaaatgctgaattaggatatacttttaaagtataatattcatgtgctgtttcaagtgttataacaaagacatatgagataccttctgtctttaggagataaccttggctatgcccctcttccgttccactcctgaccaatcgtttccccctaaactcgggtcctgatgcaaggctctatatccttctcagtttggagtcctgaggaacctgtttgcccgatgattcatccatttctcgagaatgtctgggtcataaggctgctagtgagagccaggtgtggtggctcatgcctgtaatcccagcactttgggaggccaaggcaggcagatcacttgaggccccgagttcgagaccagcccacctaacatggtgaaaacccgtctctactaaaaatacaaaaaaatttagccaggtgtggtggaacatgcctggtagtcccagctacttgggaaactgagacaggagaattgcttgaacccaggaggtggaggttgcagtgagccgagatcgcaccactgcactccagcctgggcaactgggcaagactgtctcaaaaaaaacaaaaaaaaaaaaacctgcttcttgagaaactttgatcagcataaactcttctcatggatttaaggtcagaagggacaagacatgagagataaatgaggtttccttcccacttgagctagagagtaaaatgaaggaaaataaaggaatgtcaccttgtagcctcacaccagatggatgaatgacatgtggtgcattctgtctcttgtttcatagctctggggagtgatcaaacaaggatatcgatgtaaaggtaagactcaatattgttgacatattcctggtgtatcagtccattctcacgctgctatagagaactgcctgagactgggtaatttataaaggcaagaggtttaattgactcacagttccacagggctggtgaggcctaaggaaactcacaatcatggcagaaggggaagcaaacacatccttcttcacatgctggcaggaaggagaagtgctgagcaaaagggggaaaagcccttatgaagccaacagatctcatgagcagtcactcactatcatgagaacaacatgagggtaaccgcccccaggattcatttacctcccattgggtccctcccatgacacatggggattatgggcactacaaggtgaggtttggatggggacacagagctaaaccatatcagctggtcttagagtcccacctctaaaacattttttacccatagtagttgtccatttagtccacaacttctcagcagagttcagagtctcatccccaaagtggtttccctcggacacccccggtgaatgaccgccacaccgaagagagaaatgcctggttgcacagataggcattttctctgtataaaatcctctttctgtcgtggctggcctagaacagggatagcaggtaggagatggtgctctcatatagtcatggaagggtgggtccccagtgaaaaagatagaatctcttctgcaacagaagataaatgattactaaaggcccttgtcagctttcctttatcactcaggacataactgtccttccttgtgactaggagaattcaggagtgaaagagaggaaaccttttactgcaagaaagaaaataagacctaacagctgagtgtttccggagggtctccctagagtaggcagaatgtatgggataccaggacaccatctcttccctccaagatatcaggatactgcttctgatgctgagattcactgataagggctacatcaagagtgtgagctctgggcttcaccaagtgagaagaatgctagcttcattaggaatgttaagtgtcttagctccagaagatagaacagacatgtgtgacaagaaagcactgcatgaatttggttgtgagacacactggggaagagagaaaagtgaaagacttcttgacccaggatgtcttgtccacagactgcgggatgaactgtcacaaacaatgcaaagatctggttgtgtttgagtgtaagaagcgagccaagaacccagtagctcccacagagaacaacacttgctgtggggccagtgtccaacctttgctcattgggagccaaannnnnnnnnnnnnnnnnnnnnnnnnnnnnnnnnnnnnnnnnnnnnnnnnnnnnnnnnnnnnnnnnnnnnnnnnnnnnnnnnnnnnnnnnnnnnnnnnnnnnnnnnnnnnnnnnnnnnnnnnnnnnnnnnnnnnnnnnnnnnnnnnnnnnnnnnnnnnnnnnnnnnnnnnnnnnnnnnnnnnnnnnnnnnnnnnnnnnnnnnnnnnnnnnnnnnnnnnnnnnnnnnnnnnnnnnnnnnnnnnnnnnnnnnnnnnnnnnnnnnnnnnnnnnnnnnnnnnnnnnnnnnnnnnnnnnnnnnnnnnnnnnnnnnnnnnnnnnnnnnnnnnnnacttagcagcaggaagcagacttagccacagacagagttctactagctgagtgactgtctatgatagccccaatttttctccaggagaggaaccccaagccattaatttaagaccaggtcctagtctgaggaaccctgaggggccaggtagcaggtaattgtcaaaattctagaaacagaaggctaaatgtagaaaggaagggcggggggcaaactcccactcaagtggagcttgcagattaaaattccaaatcatacaaggaaaatcctaggactgagacaaaacattcaacattcaagaaataaactagcaaattcacttacattaaaatgcaaacaacagtacaataaggaaatgactttgagtatgtttgagatgccccagatctaaagtgcaaagaagcagaatagactgtctctgtcttcatggagtagttctagttagggggaagataatatacaaatatagagcagtttagaaacaatgcaagagtatatgctaagagccaaataggttgcagtgacagcaaatgacaggaggacatagcagagagatcgctgtactggggctgttgggactttatggagaaggtggaatttcagctaagtcttgaaggaagggtagaattaagttatgggaggaggacagagcacattccagataggatgtacagtaggagcaaaaggccaagggcagaacagctttagtactattgggatagtgggaaaaaaaaaaaggtgttaaggcgatttaggtaagagatgaagtagaaaaatgagacagtctagagagtcttaaatgacaggtgcctgtctgtatgataaaatgaggagctatttaaaaaagggtaacatgaagggcttgttggggacggttggggcacaaggcttcatagtgctatactaggccctgatctctgggctggctggttagccagcatgtcaaaacactgatcaccttgactaactaaagaacatataggtcttcagcaaaaatccagtgcttattaggttagtgccagtttaatataagaagctgtgtgacttctaagtagaaccaaaaagggaaataagaaatgagtttatttatataaagcacttaaaatcgggcttaacacgtatgtaccatatgttaatatcattactcttttgaaataagctccctaaagtggtaaggccactatcgttacaacagatgcctagagaaaaagtccatatagtatacattctgcatttaaagcacttctaatgttcagtggtaaatatccacatgcatttattgatcaattagatcaaagcttaagtgcttcacttccatgtaagaaatgcacattcctttttatcacatcagccaagtaaaaattttctgtcttcctaaatctttccccttactatctatctaaacacaggctgacttcaaacttttggggtgttttgttcttagggggaaaaaatcctcttagggtcttttctaagaaagaatatgctaatcaactaagaatttgatgttcaacttttaatagaaatcacaaacaccattgtgaaaaataggcctgtaccctgtatttcattcatgcactctgtattttcagagttacacataaccttagggcaccacaattctgtcacataaaatgcagattttcaagtggaaaagacagcagagaacagcctgaatctgaggcctcaaaaaggaatccctgaaggggcagttgttagagatttctcctctccaggccatctctccccttttccaaaccctgccccacagtggtaagataagtacttgtcaggaagtagaccaataggtaggataaacatacatgtatcatgggcaacaaaatgaaaattactatattattataaagttgctaaaagtcaaggtctatttataatggcaaaaatgactattggatatcatccattcttagttatttctatctcattattatcggggatggtttctgcttatcaaatcaaaatttccagtgatttcttttagcccattactatctttctcaatctcatcaactttcactttcttgaaacttgtacctctcctaatttctgttaacactgtcatctctcaggactcttcctgcaattttaagggctttctgttgctttttgttcttactgctttcttccttttgctcctcaaagtgtatagtgcctgaatttctgtcccaagctccctgtatgtctaggaattcaacctaaataatggaggggattatattcataatttgacaatctaggttggtaaaaagaatgtataactgtattacagaaaagttggaaaatggagatataaaaaataatcacccataatactcctccaaaaaaaaaatgtaattattttagggtgaccataacaatttaaatatttgagcacttaaataactatgtaattacaattttgagctttattggataaatattaaatgttaatttaaattatgttctctttggcaagaattaaactaagatctttgtaagatttctagttttacaactggttgattctggtcaaatactaattagaaaacttttttgttgttttttaaagccatcttgactatactaatccaatgtcttcaaagtcagactatccaatgttttaatcactgctgagtctttccaaaaagtaaactgagatgatcttcagtttatcttaaagcctatctatcgcccacctcaaatacatctgctcttactttacttttccaggaaattactccttatggctaacattactaggctggatcctgggtagtgggtcttagttaaagaaaaccagagtaacttacctttttcctctcagtatcaaacaggggcaatacattttaaggtacatttccacaaagctaaaacttctttctcatggttaagctgtgcccactgtacaaacgggttcccagagagtacttacctgctagagggtgtctgtatcaggactgagacatgaatgtggagagctcccaaattccagggtccaaaaaagtatttatggagcatttctgtctagatattgttcttgttctctttattttatgaaactctgtggcactgaggcaggggcttcaacttacctccaaaaacagaaaccctctaagcaacctttgtgcaaacagaagatgctctttctcagggtggatgtagcttgacaccagtggccatgtcttggccaaagcccctggatttagccctcaccccctaaactgggtgcctgaaaatgggtcctctttgaacatatggaactccagtaacaataagaaaggtctcattgaaactaatgtctcagtcttgagtctctgctttcctgagctagagtactagcatgtcctgtatcttcctacagcacctgaggaaggaccttttacattccctaatggggaggctgtggaacatggtgaggagagtaaggatcggaccatcatgctgatgggagtgtcctcacagaagatttctcttcggctgaagagggctgttgcccacaaggccacccagactgaatcacagccttggattggcagtgagggcccttcaggtccctttgtgctgtcttccccaaggaagacagcccaggatactctatatgtgcttcccagtcccacctctccatgtcctagcccagtcttggtcagaaagcgggcttttgtcaagtgggagaataaagactccctcataaaatcaaaggaggagctccgtcacctcagactgcctacctaccaagaactggaacaggtaccttccttttcattttcctttttttcagactatcttagagaagtggggccaaaccaggaaagagcatgtggactgaagattcagatcaggctgattacaagcagtctaaaacaaaaaaggaggaggggagaaacagggagggagaaacagggaggaagagagggagggaaggaagaaaggatgattgattccagctttctcacaacccactgggggccttggttcacattacacaagtagcacaggctatacagggctccctatcaccacacaggtggtggcatttcagagtgctggtgccagtgcccaaagccctgtttagtaggctcacagagaaaaaccacagtatctactggttagctttactgtgctgataccactccttttctagatggaactaaaatgaacttgcctaaatcctccttccctagaggtctctttaacatgttcatcagggttatggtttaggatcatcatggttacctaagcatcttcctaagagaagttagtgatcttagtcctatagcaacaacaacaagagaaaggtgagtgtattgtggctcaccatagaaaacgcctccctcctaaatataaacgaagagaatcttttctaacacatcagggaatatgctgatcttttacacatattagaatagtgaaagcaacagtagcaggcaaacacacagtggaatataatatagagcaatataatctataaaatgttaacaatcatgacaagaggagctgcttttcaatgttaggctcacaatgtcctaattatcaggtacctaacagagacaatggaaaagacaaaataaagtttaccaaggaaaggagaccaagagtttggaaacatggtgccaaggtttgagagaagggaataatgacattaaaaacaggaaaatagggctgggcgtggtggctcatgcccccagcactttgggaggcagaggtgggtggatcacttgaggtcaggagttcgagagcagcctggccaacgtggtgaaaccccgtctctactaaaaatacaaaaattagctgggcatgatggcaggtgcctgtaatcccagctactcaggaggctgaggcaggagaatcacttgaacccgggaggtggaggttgcagtgagctgagaccaagccacggcactctagcctaggcaacagactccatcttaaaaaaaaaaaaaaaaaaaaaaggcccggcgtggtggctcacgcctgttatcctagcactttgggaggccaaggtgggcggatcacgaggtcacgagatcaagaccatcctggctaacacggtgaaaccccatctctactaaaaatataaaaaattagccaggcgtggtaatgggcgcctgtagtcccagctacttgggaggctgaggcaggaggatggcatgaacctgggaggcggagcttgcagtgagccgaaatggcaccactgcactccagcctgggcgactgagtgagactccaactcaaaaaaaaaaaaagcgggtggggaggagtaggagacgggaacagcagaaggaaaaagagccaacagccaactgtcaagatactcaattctgaaggttcaatcattactatacttctttttgtttcgagtacagtacacaactcacagggctggctcaagaggttacctataattggtaagaacctacaaatggtaagaaactactgtcccatggcatagtagtttcttaattatagataactaagccattttagagacagggaagcaaggatacgttaatatcaacactactattcactttattacaggaggaggaatgcctttctggcttttcccaaaaacatcaaggtttgcactgtgtttttggagacctgtcagtgcaaacacaaaaccaatatccagctagtagaattccttatataattctacattctacagactgaaaaactgtccacgagggcttcaggattccctgcattgtcctcaatgctctaccttccctgtcagacccccagaaactgaattagagaaacatctgaagaaacaagttagataacgtatgtggaactcttgatttggtgcttggtacaaagaacataatattaagagaaacatacgaaaaaagaacaacagattttctggatgaatggtactctcttgctcagagttattgttaagatgtgctgtaaaaaccaagtcaatgagaaggtggcaaaacgtgggttagacaaaccccttcctctttagggatagaaactgccaaatgcaacttctaaaaatgatgaaagaaacctcgaaaaatgaactcggtagaatagaaagaactttggtcttggaggcaaagatttgtgttttcagtcccagacatttcttacaccagctgttaaactctacagcctatttggtccttgtgaaatacagggctgggattccatgttctgaaaggtttgcctcaaatcttgacattttacatgccgatgaaaaggaaaaatgtggttggcaacaatgctttaagaagtggctcgcagaaagattagaattcctactcagcaacatcagagccagtaaaccctctcaccattttgaccaccgcctctctttactttttaggcttgtcagatagacctaaggtccagaattcactgtgtgtattttagaggaacaattatgtgtcccactttcccattaagtataatccttacaatgactagtctatgtgtaattcaacagtcctatccataataactagtcaaattaaatcagtatttacaatatataacgtatattaataagaataaatattatgtattattttaagtataatgtaccactgaaccagcatgggacaaaagaataagcaaataaaagcttttatgtttagatataccaaggctcaactctgcagttttatactatatggcaacatttgcctttataagattgaggtatacaacctattttcagggtgtttgtgtaggttaaggcagtccattatgtcacacagcgcaggcacatagcaagtgctcactattatatggcagctgagacagctatgtagataattcagattgagaaacaaccccagtgtatcccaaattacccagacactggctatatataatattctcttggagtaatcagtataggataacatannnnnnnnnnnnnnnnnnnnnnnnnnnnnnnnnnnnnnnnnnnnnnnnnnnnnnnnnnnnnnnnnnnnnnttggctctataatgataccactacaaattagaccactaaatctcaacttaggggtggggtgaaattcttaacatcatcaaaaagttaaatttgttttcaataatttgtgggggggaaacttagataaaattaactaacaccttgcattacagaattctcagtcatgctttcatggctcagacctgaccagagactgtttctgccaagttgagatctcccgcgagaaaacatccaaaagttttgtcattatctacctattgctcggaaatggtttattctgcctgctaaccactcacaaactttgatatgataacaaagactaactgctgcttacaaatgctcgtttgatatttaacttgctattttctattcagggcaaaataactatcttgaaaatggttgttaattctcagccacagtgaataggaaatgccaatcaaaagtagctctcaatttgtaattcatttgctattcattgctgctttattaacatacctcattctcctttccctttaggaaataaatactctgaaagcagataatgatgccctaaagatccaactgaaatatgcacagaagaaaatagaatccctccagcttgaaaaaagcaatcatgtcttagctcaaatggagcagggtgactgttcttagcccagaaactaagtagcacaatctgtagatgagtatagtgatctcatttcctaaactgtaatgcacagacctgaggaactttacactgaccagctttaaaacagtactttaaaaggaaaagcctgttactgtttatttacctaaaagattcctaatgtgcagcactgttttctctttcagttagttgactcaaagggggaaaactaaagaatgcaaaacttttgctattcataccactgatgttcatcaaaagtatgcgatctaaaacatgactatcatttcctgacaatggggcatctcggtggcctgcctggctgattcttccttaaaactaaaatctctggaaaatggatttgcttcttaccctgtgttttctgcaaactgacttactttgttccagccaaagcttgctaataatagaaaactacccatattccaaaagtagatttcctctgtatcccagcatactttgtgaacctggctccttcttcactacctcagatctaatcaattagtccatgtaccctccttcctcactacagtcataacacatgagcatatctacctagaagccaatttctactgatgtagccacaactttttagaggcctattaaacatgacgttatccaattgcaggtcaacttatagttgtagccttacaacttacaggcatcagaaaataagtaatcaaattaggtacctggaaacatagctattaccatctcatattactgtctaattaaaataaacataacgcaaacatgtttgtccttatatattctacagtggatagaattaggaattgatggcttaaaaaaaaaaagtctatgaagagtctgtttaactcttcatgttccatctttctcttctgaagtaaactattttgaaagttctctttttgaaatgaatttgtgcttaactgtcttcactattaatactatttagaaataagctaattggatcagtggcttaaataatagctgactgtgtgtacatatgtatataatatgtatatacaatatcaggcatgcatgtggcttggaattttgtttcctccataaaatgtggaagtgaattaaacaagttttagtcatttatacaaagtcacaaatataaagttcagtttgtcacaagattaaattgctcacaaggtaaaattgtattgtttggcaaaatcacaagtaacaatcctgtgagttttctattatgaaggttaataataaatgggctcatttagttgcctgggcacctattcacaaattcatttgtcagcctctttttagttctcttaaaaaaaaaaaaatcatatgatcattttcctttttgggggtacttagcttccatgcctataaagtctggtaccagactgacttgaaattcataaacaagttgtccaattgccaagaatatgttaacaattaaaagttccaaactaaagccagtagcaccaagtcttcataagaatacaaagtatacatacagtattgcttacctggaggattcagatcatttaggaattctctttgatgaaagatcagttcccatttgagttcctccttgcactgagttttagtgatatagaactagcttgtagttagtgtttcattacattataaagaatagttttacacacgtatttaccgttttccaaatttaaactcagaaatacccaaagcaggcctgcttaagcccactacctggcatataaacttatagtaacactttgttactttctttttaataggacaagcatgagttaggacaaactctaaaaattcatattcttcactattcttgttttcctttgattgatatagaccaaagatggtgtactctaattttttaaaacagtaatggaacacaatttttttcattcttcctcctctccattcgaagtaaagatccccagttagtttttatataaataatctatagggattcaaaaggtgtcacagtccacttaattagtcaaattagcaatggctaaacagtatcaagtactgcagaatttatcactgaaatggataagaggaaatagtttagtcacaggtttttacagtccagcaagggccaaagaggtatagtatacaagttaatagtatttgtgttgagcaacatggggctagtgggatcacagaaatctggaaaaaaaaaaaaaaggctttggcttatcaagcctagtgtaaatttctgcatctcacacgactttagtttggccaggtatttatctgccaaaacaaggacaaatcttgttgtattaacagcagggtcacttctcattttctttgctgacttacctttttactgaccgttgtgaatttctgtctcaaaatgtataatatagaaatgcaagaaaaaaacaaatgtacagattgtaaagttttttgatacctaatgtaagttttctttgtgtaatatttatatgataaaagacattaggatccctacaacacaaatgtcttgtgtttcttctgcttcgtgaccccgtaaacactttacctgaatttttcctatattccacagctaagaccactgccctattctattaatcaaattgagttttcctggaaggaaaggcaaagcagctattcagtttaaaattttctacatctttttacaacacgaagaagtaacactacagaaatattcaatctctttccatcttattcataacttacagtggtccccaaatattaagtctataaatacttaacattaaaggagacagacttgaggttgtcccttctctgtggcttttaattccacagtttcatctaagcaaactagcatgtaaagaagaaatcctttgaagctatggataaaattggtaacgacagctcaatccaggttacagacctactcagggcaatttatttgtggtcatgattatttagaatgatcagacatagccacaattttcccttaatccccagctaatttttgtttaaccacaccaatgaagaaagaggaaaaatttcagtcactcaaattcctctgtggaatgcattctggaacgtttagatgggggtgtatttatcatttgggcaattcataatacttcatacaaagtaataaagtcacactgacagcctgatcctgaaggcaagattaaactgcctgctcacctcccccaattttcatccccacatttctctaacctgtgctccttccaaggtatagatagtatcactgctcaggacatttttctggtcacaaattttttttaggttgtcatgcctcctcttgtcacagatacaggtaataagatgttttttatttaaaatgttttcctttttctgtttaatgaggcaaggtttccctgatctgcaaaacaaaagtaagttcaaagaaaacccttgtttcccttttgatgtgtgcttatgagtaatagtgtggtgattatgttatagacagaatacatgctctttatacggtcgagaggaaagatgactactttaggcagaaactcccagtaagatcatgtctatatttgctattaggtaccaggctggacaaaaagagaagaaaaaaggggaaggacaatgaggtaattaaaaaatgaaattgagaaccaggcaaaaaagaatgaaaaggaggtatcaaaaaaagtgttggattttaggaagcagtggagtgccattcatcatactccatgtcgtattgcactcaatttataaaacattttcacactatggcctttcccattaaggccccaaatttccttcctgctattccagatactgctcagcaaactgttctacaaaagaaatttttactgaacaaagattatcaggaaaatcccaccttacaggaaagagtaaaatattaagagtctacctgattcagcttttcattcaattaaggtttataggaatgtgtacataggagtggtttcagctccaacacgattccaggagcaagtgctaaactttgataggaaataagtgattgtagtgaataacccaagcagcactcctataaaggtacaaagaaatcttatggaaaatctaatgaaactgataaactattgtttctgccatatttaccataaacctttagtggtaaaaaagttgaaagtagttgtaaatctccttcatcagcaactaatgctaccaaaaaagaagtgaggcagaaatgtaaaggttttaaagaagatttttaaacaactcttgaaatattttactcaagtagtttttttcttaaaagtttttaaaaattatttttcagagttcatagctactgataaaggtattttcttaattatggaaagcctttttttcagctatcacaaatgaaattacatcttttcattaaatataaacacacaaaaaataaatttacaaataaccaaaaaattttatattttcctaccttgaacacatttcttcaaagggttagcttgaaaaatacatgtctaagattacagaatattcaatagttacttttagggttttaacattattttagattttaccacagagtttaccaaaaaaataacaacaaaaaaacctgctaaacatcaaataccacttgtccactgggaacaattcagctttctatcagttgagttggttagatcacattaagttgttatgtataggtattgaccagaagcctacaatgagatacagattttacactaagattgaaaaaatttatggtaccagctctttttctcttaactttctacactaagagaaaaatacattacttggcctacatcttaaagcattcaaaataggccctctgtaagtttttaacaaattgtatttgtatttaggtctttaagaaacaacctgagatgatggtaagtgtctcattcctcatttgacaaatgaggacaaatcactccttgagaactaaggtcatttcaatccatagcacccctgacctagtgccatgattcaaattcacaactcttgatagctaagactttgactgctccaactagcaaatcacatatagccattccctaactttgtgtttcccaaatctagctgtgaatcagaattaccacaggatgccttagccctacccttgatctactgaagcagaaaattactgccttaattctgtgtgatacaggtcagcctgccttttaatatttggatatctaaagtgagagcataaatgatgaagagaccagtttataggactatttctcacaccgtcatgtaaagttggtatgtgtctttgctccattaaagtatttctgacctcaatcttaaactttgctttgtcaaacaaaatcatgctgatttcaaatccaattagaaaataagtatgtacagtaaaaagtaaacttgggcttcaattaatgaaactttaacagaaacatggctagagaggaatctcctcctataagagaaaaaaatgattcacaacaactgcctactaaatacaactggaagtgcctttccctattttgtaaaatcgaatgaaaaacccacaaaacacatccacagcaatacaggtgaggcaagggtctatattcctttctattacaggtggggtcttttatatgtctcaaacctgaacaaaatacaggtaacaatctaaattcaatcatgacaataaaatactttccattttccaagtctgatggtaataaatatttacattttaaaaaataatttttgttcttttttttgttttttaaaaagacacaacatgctcaagggtacacagaatatggaaaaagtcatcacttcatttgagagatcaactggtaataaaaaacaatgttcttacatattaaccaattcaagagtggtatcaccagggagtctaacatggtgtttacttcaaagatgatattcaagtatgttatttggaacactatttctaatgtatctataaagaagcaagcactgctatctaatttttatagtttttagtatcttctatattccacctcctccaccaccaccaccaccaccaccaccacctcctccatatggatctccatagcctcttccaccatagccccctcttccaccataaccccctcttccaccataatctcccctgccttggaaacctcctctaccannnnnnnnnnnnnnnnnnnnnnnnnnnnnnnnnnnnnnnnnnnnnnnnnnnnnnnnnnnnnnnnnnnnnnnnnnnnnnnnnnnnnnnnnnnnnnnnnnnnnnnnnnnnnnnnnnnnnnnnnnnnnnnnnnnccccaaccaccccttccaccgccgccttcttgtctcttttgccaagggggcatttctggaggtggtggttcaatttcattcggccggcctcccctgtcaggcacccttcccatcagcacctgtgtgaagaaacattttcttttagttcctaatatttcaaaaaagtttacataaaagtttcaagtgatgttgtttctaataaacagaagccaatatttaaggacatgaaagtaccagacatggcagaacaaattaatattaaaaatattaagtgtggaaggataaggagaaatctgttaaaggatacaaaatcacggctagacagaagtaataaattctagtgttctataccattgtatgatgactgtagttaatatatagtttcaaatagctacaaggaggatattgaatgtttccaacacaaagagatgataaatgtttgagagggatatgccaatcaccccgtctgatcactatacattgtatgtatcaaaacatcactatgtacctcatacatatgtacaattatggtgtttcaatttaaaaaataatttttttacttcctgtttaccaagtctgaagaaaaaagaaaaaaatgaatggttttaaaaaggaaatatgaaaaaatataaaatgtgtgatacatgacaaattccttagtgtatatatatatattttttttttttttttttttttttttgagatggagtcttgctctgttgcccaggctggagtgcagtggcatgatctcagctcactgcaagctctgcctcctgggttcacgccattctcctgcctcagccccccgagtagttgggactacaggcacccgccaccacgcccagctaattttttgtatttttagtggagacagggtttcaacgtgttagccaggatggtcttgatctcctgacctcgtgatccgcctgcctcggcctcccagagtgctgggattacaggcatgagccaccacacccagcctagaatatattatttttaaacaatctgagagagtatttctgaaacttaaaggcttaatttttttctcacttaaatttgtttagcaaattctgtaacaaatgtagtacccatttcactaagaagttcttttaggaaaacattttttatatatataacgacataccttacattcattaacttaatatccatttatacaataacaactctggactttccattgccattgatttggtaattgattatccaataaaagattatattcctaagcacatttcatttcaaaaatgtatgaagtacatataacatgggaccttaatgaggtcagagattgatataaaaactataattccaggtatcactgcaaagagagagaaggattctcaatgaactgcttcttttaagaaacttaagctcacttactttcagtgatgatactagtaccatattattaaaaggaaaacacagttaatataattcctttactatgctttataatcctttcaaaaataaactagggaagagtttaagtatccaaccttctataaaaagtagcagctttatatgccatgagcagaggaaagatagcaataagaagggtgtcatctgctcaccacagacaaggggaagccaatagcttcctgctactgcctttcaggaaagaaagtaaaaaagcaactgcctcaaccaaaatgaccaattaattatacacttccattgatcctccaatcaaaaccaagtttaggatttatgtcacaaatgaaatataaaaagtgcaatatcctcaaagtgagacaaggttctaagtatgcaacattcttttaaagatggcaatgatgtcctaactaccaaatccaaaaaacagcctttcttggttattattctcactggtctctctaccaaacatggtatgttggtgggcatatggagatgccagaactgatcataagactaccctcaaataatgagaccataaattataaactcagaagagatggccaatgttacttacagaaatagaactcttgatccagcaagactaaattatcacccaatgcaagatgttaggtaatatatttaaagagagaacactttcagaacataggattgagccacagtggaagcacagaggcaaacactggtgatgcctaacttagcaatagttagcaaaatgactttaaaaacaaccatccctctgaaaaggtattttatctcaagttacactgagtgagaagcgatgctttaaaattatccaaatcccttatttctgattttttgctcttttgtaataaagtttgccatggagtgctctacctaaatgaagaggacatgccagttaagctgacataaacatactaaattactttattgttattgctgttgtaaagtgaaaaattcagactccttgagcttgtttaaatagactactgtcagagaaatggatgtatactccaaatcaggaaacagaagctcaaagaagttcagtagcttgctcagggtcatttctgtaagtaaatgacagagccaggatgggaacccagattggtctgactctaaagcacaaactcttcttccctttacaccaaggatataacgaatctgtcagtacttgaaacaattccgaaagattcttactgacaaaaaatgattactttttagaaagatggaacataattcttgctaaagctttgacaaaaacaattcataattcctctaattcagaaaatactttgatttatgaatacacaaattcaagtgaacatacacacatacacaaaaataacataactaagcctagactgaacccccctgccactcttttttctaaacatttaccaggacatgaaagaaaaatagactaaaatctgtaaaaacattaagtaagatatcatcaattcattttccactgtactgaaagaaacaccaaccttattaatggcacatgcggtcttctcccggctggtgccactacttgtcctaatgatcttggatagatcttcacgagcagcaagtagatgtgccattgtaatcgttgtcttgggtgacaaagcataacgcttaggctgataaattcttgctatatcatctgtttttacctaaatgacaagagttaaggaaaaaaggaacaaaagtacattttaatgaaagagcaaaaacaatcataatctttagaaataaagaaaaggagataatgcataagcaaggagttagaaaagagcaaaaacacccaaatatctgagaatttatgaataatttagaacaaataaaatagaccaacaggtgttaaaaatatgtaactaccagcaacaactcgctaaaaaataataacaaaaaaatttctatacatattaacaaaaaatacctaaaaaatagttttaccaaaaccacatacaggacatttaaaagggaaacatcagtaaatcttgcaaaaacaaaaggaaaacttgtataaatggtaagaaataccaagtttctgtatgggaacattaagtattattgtcagttttcccccaaattaacttataatcctatataaatagtttttgagagaatgaaaaaaaaatctaaagttaaatccagaaactcaatatgtaagaataactaaaagcattttgaaatataatcctaccaaatactaatatgctataatacaaaattatcatcatcttatcagttaacatttaatgagaacttattaaatgtgccaggatgctgttcacttagtaaggcattatttctttaatcctcaaaatatccttttagagtggttggtttttattatccccttttgcagatggaaaaaaaaaatgaggcatagaaagcttaagttagtttccccaaaatatagagagaatcctagctctgcccacttagcaacaaaggtctacctgacccccaagcacaggtctagtatagataacagtttgctatcctacctccatctaattaactagaacttgggagaaaaaaacatagattgatgaaatagtatattgagactcagagcctcataaatctatgaatgcaataaatgataaaggagacatcacagatcaacgagaaaaggaaaggattatcttttaaatggtgctggaatgacctggtggctatctgtaataataacaataatacagcacaccatataacaaagggaattccaaagagaacaaaaagttaactgtttgaggtttaattttcaatttaaaaacaactacattataaaaattaaaatttctgtactttaaaagatataaaacaacatctaatgacaactggggaaaatattttcaacaaataattcaaccagcaaacttcctttctatataaaaacctcaaacacaaaaagaaaacagaattctacaggaaaaaaaaatgacaagacataaatagaagttaaaaagaggaaattcaaatgactaataagcttatgaaaacagttcaactttgtcaataataagaacagacaaaacaagttagtctttttaacatcaagttagcaataaagaggctaaagtgacacaacatttcatttaccttactggaaggagtttaaattcatataaa

SEQ ID NO: 23 - DNA, 5021 bp, Homo sapiens
cccgggggggagagagccggcaggcggcggcggtggtggcgggggcgatgcgccgcgcccggccgcgctaggtgagccggcaccgggagcgcgggccgcggccatgggcaccctgggcaaggcgagagaggctccgcggaaaccttcccatggctgcagagctgcctctaaagcaagactagaggcaaagccagccaacagccccttcccctcccatcccagcttggcccacatcacccagttccgaatgatggtgtctctgggacatttagccaaaggagccagcctggacgatctcattgacagctgcattcaatcttttgatgcagatggaaacctgtgtcgaagtaaccaactgttgcaagtcatgctgaccatgcaccgaattgtcatctcctctgcagaactgctccaaaaagttatcaccctctataaggatgctttggcaaagaattcaccaggactttgcctgaagatctgttattttgtaaggtattggataacagaattctgggtcatgtttaaaatggacgccagcttgacagacactatggaggagtttcaggaactggtgaaagctaagggtgaggagttacattgccgcctgattgacacaactcaaatcaatgcccgtgactggtccaggaaacttactcaaaggataaaatcaaataccagcaagaaacggaaagtctccctgctctttgaccatctggaaccagaagagctatccgagcacctcacctaccttgagttcaagtctttccggaggatatcgttctctgattatcagaattaccttgtaaatagctgtgtgaaggaaaaccccaccatggagcgatctattgctctgtgcaacggcatctcccagtgggtacaactgatggttctcagccgccccacgccgcagctccgagcagaagtcttcatcaagttcatccaggtggctcagaagctccaccaactacagaacttcaatacactgatggctgtgataggtgggctgtgtcacagctcaatctcgaggctcaaggagacaagttcgcatgtcccacatgaaatcaataaggttctcggtgagatgactgagctgctgtcctcctccagaaactacgacaattaccggcgagcctatggagagtgcaccgacttcaagatccccattctgggtgtgcatctcaaggacctcatctccctgtatgaagccatgcctgactatctgggggacgggaaagtgaacgtccataagctactggccctatacaatcatatcagtgaattggtccagctgcaagaggtggccccacccttggaggctaacaaggacttggtacacttgctgacgttatccctggatctttactacactgaggatgaaatctatgagctttcctatgcccgggaaccaaggaaccacagagctccaccactaacaccttcaaagccaccagtagtagtggactgggcttctggagtgtctcccaaacctgatccaaaaaccattagcaaacacgtccagaggatggtggattctgtcttcaagaactatgatcacgaccaggatggatacatttctcaggaagaatttgaaaagattgctgcgagttttccattttccttctgtgtgatggacaaagacagggaaggcctcatcagcagggatgagatcacagcctacttcatgagagccagctcaatctattccaagctgggcctgggctttcctcacaacttccaagagaccacctacctgaagcccactttttgtgacaactgtgctggatttctctggggagtgatcaaacaaggatatcgatgtaaagactgcgggatgaactgtcacaaacaatgcaaagatctggttgtgtttgagtgtaagaagcgagccaagaacccagtagctcccacagagaacaacacttctgtggggccagtgtccaacctttgctcattgggagccaaagatctgctccatgcacctgaggaaggaccttttacattccctaatggggaggctgtggaacatggtgaggagagtaaggatcggaccatcatgctgatgggagtgtcctcacagaagatttctcttcggctgaagagggctgttgcccacaaggccacccagactgaatcacagccttggattggcagtgagggcccttcaggtccctttgtgctgtcttccccaaggaagacagcccaggatactctatatgtgcttcccagtcccacctctccatgtcctagcccagtcttggtcagaaagcgggcttttgtcaagtgggagaataaagactccctcataaaatcaaaggaggagctccgtcacctcagactgcctacctaccaagaactggaacaggaaataaatactctgaaagcagataatgatgccctaaagatccaactgaaatatgcacagaagaaaatagaatccctccagcttgaaaaaagcaatcatgtcttagctcaaatggagcagggtgactgttcttagcccagaaactaagtagcacaatctgtagatgagtatagtgatctcatttcctaaactgtaatgcacagacctgaggaactttacactgaccagctttaaaacagtactttaaaaggaaaagcctgttactgtttatttacctaaaagattcctaatgtgcagcactgttttctctttcagttagttgactcaaagggggaaaactaaagaatgcaaaacttttgctattcataccactgatgttcatcaaaagtatgcgatctaaaacatgactatcatttcctgacaatggggcatctcggtggcctgcctggctgattcttccttaaaactaaaatctctggaaaatggatttgcttcttaccctgtgttttctgcaaactgacttactttgttccagccaaagcttgctaataatagaaaactacccatattccaaaagtagatttcctctgtatcccagcatactttgtgaacctggctccttcttcactacctcagatctaatcaattagtccatgtaccctccttcctcactacagtcataacacatgagcatatctacctagaagccaatttctactgatgtagccacaactttttagaggcctattaaacatgacgttatccaattgcaggtcaacttatagttgtagccttacaacttacaggcatcagaaaataagtaatcaaattaggtacctggaaacatagctattaccatctcatattactgtctaattaaaataaacataacgcaaacatgtttgtccttatatattctacagtggatagaattaggaattgatggcttaaaaaaaaaagtctatgaagagtctgtttaactcttcatgttccatctttctcttctgaagtaaactattttgaaagttctctttttgaaatgaatttgtgcttaactgtcttcactattaatactatttagaaataagctaattggatcagtggcttaaataatagctgactgtgtgtacatatgtatataatatgtatatacaatatcaggcatgcatgtggcttggaattttgtttcctccataaaatgtggaagtgaattaaacaagttttagtcatttatacaaagtcacaaatataaagttcagtttgtcacaagattaaattgctcacaaggtaaaattgtattgtttggcaaaatcacaagtaacaatcctgtgagttttctattatgaaggttaataataaatgggctcatttagttgcctgggcacctattcacaaattcatttgtcagcctctttttagttctcttaaaaaaaaaaaaatcatatgatcattttcctttttgggggtacttagcttccatgcctataaagtctggtaccagactgacttgaaattcataaacaagttgtccaattgccaagaatatgttaacaattaaaagttccaaactaaagccaatagcaccaagtcttcataagaatacaaagtatacatacagtattgcttacctggaggattcagatcatttaggaattctctttgatgaaagatcagttcccatttgagttcctccttgcactgagttttagtgatatagaactagcttgtagttagtgtttcattacattataaagaatagttttacacacgtatttaccgttttccaaatttaaactcagaaatacccaaagcaggcctgcttaagcccactacctggcatataaacttatagtaacactttgttactttctttttaataggacaagcatgagttaggacaaactctaaaaattcatattcttcactattcttgttttcctttgattgatatagaccaaagatggtgtactctaattttttaaaacagtaatggaacacaatttttttcattcttcctcctctccattcgaagtaaagatccccagttagtttttatataaataatctatagggattcaaaaggtgtcacagtccacttaattagtcaaattagcaatggctaaacagtatcaagtactgcagaatttatcactgaaatggataagaggaaatagtttagtcacaggtttttacagtccagcaagggccaaagaggtatagtatacaagttaatagtatttgtgttgagcaacatggggctagtgggatcacagaaatctggaaaaaaaaaaaaaaaggctttggcttatcaagcctagtgtaaatttctgcatctcacacgactttagtttggccaggtatttatctgccaaaacaaggacaaatcttgttgtattaacagcagggtcacttctcattttctttgctgacttacctttttactgaccgttgtgaatttctgtctcaaaatgtataatatagaaatgcaagaaaaaaacaaatgtacagattgtaaagttttttgatacctaatgtaagttttctttgtgtaatatttatatgataaaagacattaggatccctacaaaaaaaaaaaaaaaaaaaaaaaaaaaaaaaaaaaaaaaaaaaaaaaaaaaaaaaaaaaaaaaaaaaaaaaaaa

SEQ ID NO: 24 - DNA, 2394 bp, Homo sapiens
atgggcaccctgggcaaggcgagagaggctccgcggaaaccttcccatggctgcagagctgcctctaaagcaagactagaggcaaagccagccaacagccccttcccctcccatcccagcttggcccacatcacccagttccgaatgatggtgtctctgggacatttagccaaaggagccagcctggacgatctcattgacagctgcattcaatcttttgatgcagatggaaacctgtgtcgaagtaaccaactgttgcaagtcatgctgaccatgcaccgaattgtcatctcctctgcagaactgctccaaaaagttatcaccctctataaggatgctttggcaaagaattcaccaggactttgcctgaagatctgttattttgtaaggtattggataacagaattctgggtcatgtttaaaatggacgccagcttgacagacactatggaggagtttcaggaactggtgaaagctaagggtgaggagttacattgccgcctgattgacacaactcaaatcaatgcccgtgactggtccaggaaacttactcaaaggataaaatcaaataccagcaagaaacggaaagtctccctgctctttgaccatctggaaccagaagagctatccgagcacctcacctaccttgagttcaagtctttccggaggatatcgttctctgattatcagaattaccttgtaaatagctgtgtgaaggaaaaccccaccatggagcgatctattgctctgtgcaacggcatctcccagtgggtacaactgatggttctcagccgccccacgccgcagctccgagcagaagtcttcatcaagttcatccaggtggctcagaagctccaccaactacagaacttcaatacactgatggctgtgataggtgggctgtgtcacagctcaatctcgaggctcaaggagacaagttcgcatgtcccacatgaaatcaataaggttctcggtgagatgactgagctgctgtcctcctccagaaactacgacaattaccggcgagcctatggagagtgcaccgacttcaagatccccattctgggtgtgcatctcaaggacctcatctccctgtatgaagccatgcctgactatctgggggacgggaaagtgaacgtccataagctactggccctatacaatcatatcagtgaattggtccagctgcaagaggtggccccacccttggaggctaacaaggacttggtacacttgctgacgttatccctggatctttactacactgaggatgaaatctatgagctttcctatgcccgggaaccaaggaaccacagagctccaccactaacaccttcaaagccaccagtagtagtggactgggcttctggagtgtctcccaaacctgatccaaaaaccattagcaaacacgtccagaggatggtggattctgtcttcaagaactatgatcacgaccaggatggatacatttctcaggaagaatttgaaaagattgctgcgagttttccattttccttctgtgtgatggacaaagacagggaaggcctcatcagcagggatgagatcacagcctacttcatgagagccagctcaatctattccaagctgggcctgggctttcctcacaacttccaagagaccacctacctgaagcccactttttgtgacaactgtgctggatttctctggggagtgatcaaacaaggatatcgatgtaaagactgcgggatgaactgtcacaaacaatgcaaagatctggttgtgtttgagtgtaagaagcgagccaagaacccagtagctcccacagagaacaacacttctgtggggccagtgtccaacctttgctcattgggagccaaagatctgctccatgcacctgaggaaggaccttttacattccctaatggggaggctgtggaacatggtgaggagagtaaggatcggaccatcatgctgatgggagtgtcctcacagaagatttctcttcggctgaagagggctgttgcccacaaggccacccagactgaatcacagccttggattggcagtgagggcccttcaggtccctttgtgctgtcttccccaaggaagacagcccaggatactctatatgtgcttcccagtcccacctctccatgtcctagcccagtcttggtcagaaagcgggcttttgtcaagtgggagaataaagactccctcataaaatcaaaggaggagctccgtcacctcagactgcctacctaccaagaactggaacaggaaataaatactctgaaagcagataatgatgccctaaagatccaactgaaatatgcacagaagaaaatagaatccctccagcttgaaaaaagcaatcatgtcttagctcaaatggagcagggtgactgttcttag

SEQ ID NO: 25 - DNA, 23169 bp, Mus musculus
  misc_feature (2418)..(3132): "n" at positions 2418 to 3132 can be any base.
  misc_feature (5952)..(6013): "n" at positions 5952 to 6013 can be any base.
  misc_feature (8299)..(8346): "n" at positions 8299 to 8346 can be any base.
  misc_feature (9379)..(10000): "n" at positions 9379 to 10000 can be any base.
  misc_feature (18821)..(18840): "n" at positions 18821 to 18840 can be any base.
  misc_feature (19910)..(19929): "n" at positions 19910 to 19929 can be any base.
  misc_feature (21696)..(22021): "n" at positions 21696 to 22021 can be any base.
  misc_feature (23090)..(23109): "n" at positions 23090 to 23109 can be any base.
taatgaaattctgaagcctacagactcttcctaggggagagaggaagtattcaacttggtagaaaataaatgatgggtgagggaacaggaggatgaaagggcctgatgaacaggtgagcgcctatgactccgtggggtggaggtgatgttctggattatctaacccaatctccctcataatgttgttccgggacaatcgaattcatccagaaggatcttgcccaaggtaggtaaaggggattcagagaaaacttttctatgctttggtgctatgagataggagagcaaagaaaaatcacgaagactttggtcagcaagccaaatgccacatttgagggtgtcttgtcctcaacccaattctaaagggacccttgtgttactgtgcccaagaagttggaatttcccccaggagtttcactttaggggaagaaaaagccttgagtcctggttccagccagagagggagcttgccttcagggaagtgattgtccagatctcacagagttcttgcaaattgatattacagcaccttgcaagagaaaatggagctgagacaatgctgcctcaaaggtgggtgggaaagaccaggactcttgtgtcacaaatacctgtttcctttcatttagtcctatacctgtctggacatcgaagatgaactgagggcctgggatggggaagggggtggggggtcattgaacccctttatatttgtttctctctctgatgtgatcacattgaatgcacctctgttttccaccattgattgctaggctgcatcattggtctattgaggacgagtagtcaactcttgcttgttaacggctgccttacaactatgattagaacgagcatttaaaatggtgttacggggctggagagatggctcagagttaagagtactgactgctcttccaggggtcctgagttgctctcccagaaaccacatggtggctcacaaccatctgtaatgggatctgtctggtgtgtctgaagacagctacagtgtactcatataaataaaaaaaaaaagaaattaaaaagaaaaaactttaaaaatacacattaaaaaaaaaaaagataaaatggtgttaccaccctttcccagtgcccttttccgatgatggcgctgcatggtgaaaagcttgagttagtacttgtagctatgctgtccaaggatccgctgcaatccgtgcaggtcttcggacacaagaagacagtcactgctgtggcccactgcaaatgaggaaacgggctcatcaacgtgaatggatgaagcctctaagaaggagatcaaagatagcctcattcagtatgatcggaccattcttgtagctgacctccagtcgctgcgaatccaaaaaggttggaggtcctggtgcccgtgcttgataccaaaaatcctaccaataagcccatcccaaggaccagggtttgtttacctctgtaatgcacatcctaggattttttttttaaatgacattaccgatacaacccctcagccacacactcacccttggctaaactctctcggtgctagctttgaaatttcctccagcctccaatggcaaaatacatgcacctagtttggtggggcacctcaaatattataaacttcattcggctgtggtggtcagcttgtgattcaaattcaactaccacctaatttgtctcatctcagcctctctgaacccttcagagagttcagtggcaggtagtcaggaagagtaacagcaaatctgggtaggaaaacatagacttaagggtagtttaggccgggcgtggtggcgcacacctttaatcccagcacttgggaggcagaggcaggtggatttctgagttcgaggccagcctggtctacagagcgagttccaggacagccagggctatacagagaaatcctgtcccgaaaaacagagagagagagagagagagagagagagagagagagagagagagagagaagagaagagaagagaagagagtcaccaccaccacccaatcccgaatgttattctaatcaaaacaaacaaaacagaacaagcaactttgggggagaatgggtttattttagctcacaagcgcacgttacagttcactctacggcagggaagtcaaggcagcaagaagttcaaagggctggtccatccacagtcaggagcagagggcgaatgaagtatactcgacattccgttcactgtttccactcgaatacagctcagaacccaatcccagagaacggtaccacccacagtggtcgaggtcttcccacatcaattgaggcagtcactcacagacatacccacaggccaacgtgacctagacaatctctcatcaagactctctgcccagatgattctaggttgtgtctagttgataattaatctcaccatcataggtattagagatagatgtaaatannnnnnnnnnnnnnnnnnnnnnnnnnnnnnnnnnnnnnnnnnnnnnnnnnnnnnnnnnnnnnnnnnnnnnnnnnnnnnnnnnnnnnnnnnnnnnnnnnnnnnnnnnnnnnnnnnnnnnnnnnnnnnnnnnnnnnnnnnnnnnnnnnnnnnnnnnnnnnnnnnnnnnnnnnnnnnnnnnnnnnnnnnnnnnnnnnnnnnnnnnnnnnnnnnnnnnnnnnnnnnnnnnnnnnnnnnnnnnnnnnnnnnnnnnnnnnnnnnnnnnnnnnnnnnnnnnnnnnnnnnnnnnnnnnnnnnnnnnnnnnnnnnnnnnnnnnnnnnnnnnnnnnnnnnnnnnnnnnnnnnnnnnnnnnnnnnnnnnnnnnnnnnnnnnnnnnnnnnnnnnnnnnnnnnnnnnnnnnnnnnnnnnnnnnnnnnnnnnnnnnnnnnnnnnnnnnnnnnnnnnnnnnnnnnnnnnnnnnnnnnnnnnnnnnnnnnnnnnnnnnnnnnnnnnnnnnnnnnnnnnnnnnnnnnnnnnnnnnnnnnnnnnnnnnnnnnnnnnnnnnnnnnnnnnnnnnnnnnnnnnnnnnnnnnnnnnnnnnnnnnnnnnnnnnnnnnnnnnnnnnnnnnnnnnnnnnnnnnnnnnnnnnnnnnnnnnnnnnnnnnnnnnnnnnnnnnnnnnnnnnnnnnnnnnnnnnnnnnnnnnnnnnnnnnnnnnnnnnnnnnnnnnnnnnnnnnntatatatatatatatatatatatatatatatatatatatatatatatatatatacatacacatatatatatacacacacttaaaaacaaataagcatacctcaaaatctagcaagcagcatagcctggcagcacagtgcagtgtagagtatctggtgtttatcctcaagactgtaaggcttactagagagtatagcttgctatctctgcccagggctgttgaaagagtaccatatgttgttggttctgagaaagtattattattggagggggtaggggtgtcactcatgctacagcatgcctgtgaaagtcaaaagacaattttgtggcagtcagttctcctcttccaccgtgcaggtcccagagaaccaactcagggtgctgtgcttggtagcaagtacctttatccaataagccatcctgctggcgtgtgtgtgtgtgtgtgtgtgtgtgtgtgtgtgtgtgtgtgtgtgtgtgtgtgtgtgttttggtggcattggttggggggggggggtgtatctttgttttgagataggattttgctacaccaccaaggcaagccttcaacttctatatgtaacctaggttggcctgattagttagctcaggctaataccaaatttgcatttctttagactcagccacaatagcactaggatcacaggcaacacaccctgcttgttgattggcactaacaagtcttacagtgtttttgctattgacaaccttgaagcagtacgtattcttggtgatttgtcttaatctctctctctctctctctttctctctctctctctccctccatccatccttccctctccctctctctgtccctctctctgtccctctctctgtccctctctctgtccctctctccctccctcctttcttccctcccttcacccagggtatgacttagtctgtaaaccactctagtctcaatttatgtaaatctaccttctttggcccccgatgttgagtgttgggattaaagatgaatgtcactaatggagtctcagtttggttgttgttgtggttatggttttggtgtggttttgtttttgtttgtttgtttgtttgtttgagacaggatcttgctaaagacaccacattagcctcaattttgtaaatcttcccaattctccctcccaagtgttgatgtttacagatatgctctgttatcttcaggagttttaaaaactattttacattgcacacttatttattttaaggactgggtgagatcataggacagctttaagcagatgattctctccttccactaaatgagacccagggatcaaactcaagttgccaggtttggccacaggttcctttacccactaaagacatttcagcagctcttgctttattatctctttttgggtgattctagaatggaattctttctacttttgggacagaagcagcagtggtgtatgaaagtgttcgtatctctcactctccagcctcaccaccgttttgaggcaatctgctagactgaattgttaatctccctgagatttaatttggattgtcccgagtcaggcgaagtagcccattttcttgttggtactcaatttgcatttcctgtttggcaaattgcctattcatatcctagagccagattcctctctggcttttctttacctccattcagtttctaggatcccttcctgcacgaggaatataacctttgcctctgagggccctcaggaagtgccatcccaaatatgacatttttgagagctgatgaactcaaggggcgacggagctggaaactgcaagtgtaggcttagctgtaccccttatctacataaagacatcctcccaaggcagctaggctgttctgaatctactctccagtttcttatctcccagtggagattacctccgtgacacccagccaaggtagactctccctgacctattctgtgggccgcttccagacagggttaataatacctgagactgtatcggtctgataaagtcagacctgctttccttccctcagctcccagaacgctaggcatcccgggacactgcatgagtctcagtcatttgaccgtccttcagacctcagatgtgtgaggctcccatccactgacatattgttcagtgtattttctactatgctaatctgtctgttttgatagttctactttttgcagtcaaatcttaaaagccaacctattttcatattttactttttttgtgcaatgcagaatataagttttcttttctcctcttcctcctctgtctttttttctttcatacaatacttcctcatcgtcctcccctatccccgactttttaaaaaaataaagtcaattaatctgcaggattttttttttttagtatgtatatgtgttgacctgtttgcctcagaatgcatgcagagatcagcaaacaacttgcaggagtcttttctccccttccaccacgtgcatggggcctcaggcagttagacatagaggaaagggtccttaccacctgagctagcttaccaactgggtcccagggattttttcaactattttaagcaaaaattacaagtcctttattttgttgggcctgggtcttgtggtatagtccaggatgacttcggactccctgcctcagcctcacgagggctggagtacagtaccacaagggactgtgcctttatttgggcaggagaaatttggactcagtaaaatagtcccagaagaaacccaaaagctggatgaggttgttggtctactaaccatgatggattaaatcctcctgggtttgtgtacctgtgagctgtctttatttatttcatttggtaaagaaagannnnnnnnnnnnnnnnnnnnnnnnnnnnnnnnnnnnnnnnnnnnnnnnnnnnnnnnnnnnnntaaccaggtcaccttctctctgtcccctcttttctgaaacatcttatcttttagcagagtgaagagcacaggtgtggagagagaactttatccataactaaccaggccatcttagccgactttcccagtcccctgctgcttgagggagttctagtaggctggtcaaagtgtcctttacgtgtccgctgctgaagttctgaggaagattctagaagccagatgtggtggcacagacctgtagtcccagagtttgggtaatggcaagaggatcaattcaaggtcatcctcctcaataaaaatagagttcaaggtcatcttggactatatgagacctcggctcaaaaaacaaacagaaacacctctccttcccctccccccccccccaaagcaacaacaaaaagagaaggttctgggagccacacctatctctcccccactgtgccactaataaacaaaactaacctgccagatctggctgtctaaaagggttcctttcaatggagcctacctccagcagcatccaggaacacttaccatacagcccctgctgtgtatgtataattacaatccgaggcaaagttttcagagagccagcatcttgagggagaattcagcgggaggtctcggtttggaagaggccaggggtgtgaaaatgagggtgttaaaggcttttgcaaaggtaatgggttttacatatgtgagcccaataagaaaggccttggaagggtggctcaccctcattcacggctacttcctagaacctgccgcagtccccagaattatgtaggcattcggggacagatgggaagactttcacacatgctaatacacattttgaccttgactctctaggcattctcttcttcctcgctggaggtgaatgaggggtgtcattttcaatttagagggaaatggagacgcttccccacaaacaagcttaagggtttaaggataaatcccaccctactgagaatgtgtgttgaaaaagggcttcacccagggacccaggttactcctggaaagttttgtggggcaagagcatttatttttagccccacatttaggaaacagaccttttagcatgcttgcctagacagaagtgagacgctgtgggatggggagggagggaaatgtgcccacggctgtgaggaaagaatacacgcaccctgctctagtctaaataagatgtcgcgctctctctgttcacgccacctcgtaagtgaggcaaatgggacacaaagaggccaaattaatgatggctttccttgatgtcaccatccgtaggaactcgaggtatacagagcagtcagtgatttgggcaaggaaagcagcggtccgtaattcaaccctggcttcggaaaggcttttgttgggaacggtgggcgcgactttaggggacgtccctccacgcgtttcacaatcccttccgcggtagcaaggattcgctaattgtctcgcgggggtggccccactcgggctccgaggctgggcggtgcggctccgctttctgcttggtctccgcgaggtgtcgccttcggccgaagaaagcggtaaggcgccaccctcgtagcccgcacttatttattttcaaacaaggggggcgccccttcctttcaatttgaaactagaaacctcctgcggtctcgtttctacgtgggcgcgtcctcggcctcccattttgcactcctgtgtcgccttccttcgagatcacacacgaacagcccctcgaccaggccttgttccactttagcctggagctcatctttcacacaaacacacactcgcgcgcagtccacgcagggactgggctagaaacctcttttcccattcccagaacacacccagcgacctttaaaaaaaaaaaaacacggagtgcagcgggtgcaagccagggggtccaaaagggagggggaagcactcctcgggtttcccagctttgctgcttgcagtctgaaaaacgagaggggggagggggagagagaggaggggaggagggggagaggagaagaggggaggagggaagggagagagagagagagagagagagagagagagagagagagagtcggaaaaaaaagagaaaagcaaatggcttttggcgcgaaaggctttggcgcctcccctgatttttatggaaatcaagagggcggggaaaagcctcttgcctctgcctttctccctccccctcgtctgcgccacagcccccttctctccccgccccccgggtgtgtcagattttttcagttaataatatcccccgagcttcaaagcgcagccagtgacagnnnnnnnnnnnnnnnnnnnnnnnnnnnnnnnnnnnnnnnnnnnnnnnncccgccgccgctccctcagcccacccggagaccccagccccgagtcgcctccggatccccggcagtctgcgggaggtaagaagcggtacttgcgaagcttcgagcgcccggggaacggcggagcgctgcggctaggcaagcccctggacgcggctccgcaccctgcacccaaatatgccgggcttttctgggggagggggtaagggggcaacacaccgcgtctgcttccgaaacaaaaccatctgggttttttgtttttttttttttcctgaaaagcctattcagcacccgaaggcaccctggctggaagagacccgccctaatcccttttacagccctggcccaggcagagaaatagctttagcgaaaagaaattcgcccggctccacaagatttgtctgagtgtgaggtgactgggaaccggtgcgtccccaccccaagctggggttctccaaaaggtgccgcggggaaagaaggaaaaggggttaggcgaagctaggtgcctgagtgataatgtaggtcacggctgctccggcttaggagacgcgattctcgccggcgaccctgcaccattcctagggatggggttcagcctttccccccgcctgttgaagaggttgaggtctctgaaggaaggggaatggaaagggtataggtataggcagcgatgagtaccaagggtatctgccaagattgaggctctaggtctaggtggagagggttgtatgtaattgcctgttgttggtctgactggagaaaggcccttaataattaataaagtttcctgaaccccgttagcgtttgcgctcccgtgatcgcatttctgcaaaaggggaatgaaaggtacttcaatcccatgcctggtagctgggctagagagcaaggacttcctttaagcaactagtgcaagtggggtagtcgcgctagtaagagctgagatctgcagcttgaacagcccccctcccccaggcagtgccttgtgtgaatgaaacggcagtttcccaaagttgcagagagccacaccaccccctgnnnnnnnnnnnnnnnnnnnnnnnnnnnnnnnnnnnnnnnnnnnnnnnnnnnnnnnnnnnnnnnnnnnnnnnnnnnnnnnnnnnnnnnnnnnnnnnnnnnnnnnnnnnnnnnnnnnnnnnnnnnnnnnnnnnnnnnnnnnnnnnnnnnnnnnnnnnnnnnnnnnnnnnnnnnnnnnnnnnnnnnnnnnnnnnnnnnnnnnnnnnnnnnnnnnnnnnnnnnnnnnnnnnnnnnnnnnnnnnnnnnnnnnnnnnnnnnnnnnnnnnnnnnnnnnnnnnnnnnnnnnnnnnnnnnnnnnnnnnnnnnnnnnnnnnnnnnnnnnnnnnnnnnnnnnnnnnnnnnnnnnnnnnnnnnnnnnnnnnnnnnnnnnnnnnnnnnnnnnnnnnnnnnnnnnnnnnnnnnnnnnnnnnnnnnnnnnnnnnnnnnnnnnnnnnnnnnnnnnnnnnnnnnnnnnnnnnnnnnnnnnnnnnnnnnnnnnnnnnnnnnnnnnnnnnnnnnnnnnnnnnnnnnnnnnnnnnnnnnnnnnnnnnnnnnnnnnnnnnnnnnnnnnnnnnnnnnnnnnnnnnnnnnnnnnnnnnnnnnnnnnnnnnnnnnnnnnnnnnnnnnnnnnnnnnnnnnnnnnnnnttcgaattgggctacggagatgctgctgccggagccgacctgtggggcaacccgggcgaggaggatgcgttcggtctcgggggcctgggtggcctcactcctaatccggtcatccttcaggactgcatgtggagcggcttctctgcccgcgagaagctagagcgcgcagtgaacgaaaaactacagcacggccacgggcccccgggcgtcagctcagcctgctcggctcccggagtgggtgccagcagccccgggggccgtgcccttggtgggtcgtcgagtgctagccacaccggggccaccctgcctaccgacctctcccacccggctgccgaatgtgtggaccccgccgtggtcttccccttcccggtgaacaagcgagagtcggcgtcggtgcccgctgcccccactagcgccccggcgaccagcgctgcggtcactagtgtgtctgttccagctactgccccggtggctgctcctgctcgtgcaggcggccgtcctgccagcagtggggaggccaaggccctcagcacctccggagaggataccttgagcgactcaggtaaagcctagagtagagttcttgctagctccttacggactgggaaggtgggggtgctgcgttccctttgttatcatagatttgtgcgggtgattctcttctgttcaccagcctcccgggacagaagaggctggaaacaccagctacaccttctcttaaatttgccatcccctttttcgcgaatccttgcggtaggcatgccctcactgtggcaaaagttggtggccagctcagtcagtctgtggagtccaaaaaactacctgtacagaaatctgttagtccgttggaaaggaacctttaagccaggtcaaggaagggaaaagactccctgcaagacgagggctgcacaatcccacttgcaaaagttaagagaatgcctggcaattcctccctcccctcccctaggactctgagccctccgtgggtggtgggctgtttgcgtttggtgcgtggccagcaggcggcgttgtgtctgacgcaagacaggcaggatcaaaaagactgggggtgatgggggcaccccctccctccagttcagcagctggcagcaagtgcattagtggttgtgtacgttttcagagagcctctttccggttttgattgagtactagtcccgttgtgtttcctagctggaatttctgacctaattgagctgagttgtgttccataacccattgcccttgaaggttgagggcgggtccctaccactgccgctcctaaggaatgcacgcacccttaggattcattggttctattgtaagcctttatctgcgctgtcctcggaaagaaagggttaaaaagaagaagaagaaagctttttttttccatggggctgtgaaagtacctaccacactttacccaaatccagtctgcccttgtccttcgagctgtaggtccagcccccctattagaccttggaagccagtgttttcaaaatgccaaagaataaaaagtctaaatttcctcctgggctgtggagggatcgctctaaggctcctgggaggaaacttggtgataagcctgcactttgaaagggctctgtccctttaatgtctgtgccttgacagctttctgttaggaagcagttccttccaacagctgtcttcttggctgaaaaccaaaacactggcttaaagggacctaccggctggagcagcctaacatttcagccttagaagaagaaacctcacaattgttccgctttccggtcctccctagattaagcagacgatgtgttttggttttcgtgcttgcttttattttcttcttttaagccataattttctctcctagcctggcagtaaacgaagtcagaatgaatacacataggacgatacaggcttttttttttttttttctcgtgcaccgccccctttgggactctgagctactgtggattagagctttataattgagatctgatctctgcctagatgaaaaactgcttactccgtacaacgcatgttcgcaccaggaaaggttgttgtcgtagtgaatgagattgtcctagagttttaaggatggcagaatcaaacccagccatgggttttaccaaaggaggagcctccggtctgaagggcggctgtggaagtgtgtataagtaaatccatggggcagactggctggtgattatgctaaaagcccctattaccgagcatctgtcgccaagtctacatagtgtctgccaaactcaaacactgtggttattacccccattgaatagctgaggacactgaagagtttttccaggatcatgccgacaacggctcgttctgactccagttgggttcctcgagtttctgccacatcctcaagtttgtcaccaggggttgaatcctgggcccttccacatcagacaagtgccctgctggccccacaccacccagggaaggaaaggggtggggcgtacctcttgtccgcgttgtgatcagcaaacctagctgacttaaataacaagtgtatgttaatcgcacaattaaccagaaactatttttcccctcagatgatgaggatgacgaggaggaagatgaagaggaggaaatcgatgtggtcaccgtagagaagagacgttcctcctctaacaacaaggcggtaaccactttcacgatcactgtgcgtcccaagacctccgctctgggtctggggcgagcacagcctggcgagctgatcctcaagcgctgtgttcccatccatcagcagcacaactatgctgcaccctcaccctacgtggagagcgaggacgcgcccccgcagaaaaagatcaagagcgaggcttctccacgccccctcaaaagtgttgttccagcaaaagcgaagagcctgagcccccgaaactcagactcggaggacagcgagcgccgccgcaaccacaacatcctggagcgtcagcgccggaacgacctgcgctccagcttcctgacgctcagggaccatgtgcctgagctggtgaagaacgagaaggccgccaaggtggtcatcttgaaaaaggccaccgagtacgtgcacgccctacaggccaacgagcaccagctcctgctggaaaaggagaaactgcaggcgaggcagcagcagttgctaaagaagatcgaacacgctcggacttgctaaacgtttcccacacggacagtcactgccactttgcacattttgattttttttttttttaaacaaacattgtgttgacattaagaatgttggtttactttcaaattggtcccctgtcgagtctggatctgggtagggggcaggacacggggttctgccatgaccttggaaaaaaaactgacttatgggatgctgggtggcttgttttcctcctccatatcacctggtgacagccgtggaagttcgggacactaaggagcttcaggaggctgtgaagtcaccttgttccggtccaagattccaaacagagtcattccttctttttacaatggtgcttaagttccagcaaatgccacagaaggggggggttgccatttgatgcccctgggaacacttgtgtaaataccattgatacacccgccttttgtatacgtcctgggtaatgagaggtggctcttgcggccagtattagactggaagttcacacctaagtactgtaagaatacctcaatgtttgaggggcatgttttgtatacaaatatattgttaatctgttatgtactgtactaattcctacacggcctgtatactttagtatgacgctgatacataactaaatttgatacttatattttcgtatgaaaatgagttgtggaagttttgagtagatattactttatcactttttgaactaagaaacttttgtaaagaaattttactatatatatatattcctttttttcctagcctgtttcttccttgtttactgtatttgttcatgtttggtgcatagaactgggtaaaatggcaaagttctgtgtttaatttcttcaaaatgtatatatttagtgctgcaccttagagcactttgaaatacctcatgtttatgaaaataaatagcaattaaatgatgcaaggcgatgttttccttcctagcttggctgcagtctctgcacacagtccattccttacccggacttttaacattgtggaatcctggttagggagggtacttgtagagggataaatgggtttgtgaattccacagattagaaccaactactttcaataggcaatcaatgggtgttaaagctctttcaaatattttgttttgggtgtgagtgtgcccacaatgtcacatcccctgcaactggagttcaagtctaggaacaaggcagaggccctgcgcaacagtaacaagtgactcacccctgagccatctgtcaccccttcatttttgaggcctctttgggtctctagctgggattataggtgtgtgccccccatatctagttaccaaaacactttcacatactcgaactctcaaagcattttagatagtgtagataccagcccaaagtttggaataagcagtaaaattggcaagttgtgccgaaatttacataaacacttgtcctagttgtttggaaggacttgttcctgaagattcccccaggaagagctaggtgtggaagcatatctgatgcctgcagaggtgacaagaaaaatgtcacctagccctcttagcacagcaagcttctatattgcaagcccaaggccgcagagtaacacttagtccaaaagaaatctaggaccagtataatattctggactgagcactagtgaaataagaggatggagtcactgttcatcattgatctcggtcaccagcctcagctccagttcccagagtactgaagaccaagaaggggaaggagagctgtcattgggtggactgtgggggtgcctcaaggaagaatgagctacagaccttggagaaggccagaactaaacatgaaggaggcttccctctatctactcagggaaaattttctggaagtctgaagaccatctaccttacttaagaacaggacttctatttttctttggggtaacagactacacacagcatttccctatggtttcattcactgcaggtttttaacttcaagttgaaaaaaaaaatgtcttcatggaaaaatgcagcccaagggtccagacagctttgcttgtgtggctgtactgtcagggacagagatcaggctgcgcaggtggttggccagacaggtagaaggtgagccatggaggtccttatttggggtgacagctacagatgctgtcttaacagttgctgttgggttggtggtactgcctgcattctctggtgatttgacaaaggttggaaagtgggcaaaatgccctttacaaaatcctataactccccagtcccaaactagcaaataataagccactctgaaggtcccattcaaaagaactcatctgttgcatcttgcaagtcctacgtaacaagcccatcactgtatcagtacatctagaaaccaaatggaacttaaagatctcaggttaattgagcacctaagagtgttgaagcctgccgcagtcaactgaattgctctgtttctcttctcccaaaggggacctgaagtgtgacagatgagctagaattctactgtgtaagaagaaatagaacagagaccactgaactgaaatttctaccacattcttattttggtgactacggggaaacttgtagataatgctctcttacatctccaggacccacttctgcctcgaaagctctgttactctcttgacatcaatcacataacaacaacaaactctctgcattcggtggatcataaataaaagaacatatattgctcttccagtggatctgagttcaattcccagcacccaagttaggtggctaagctgcttgtaactaaggcaccagggatttgacatctctagactcctgtgacttacactcgcatagatacacacacacaatttaaataaatacatttaaaataaataaaaacacactaaaaactgttaacacttaggttaagacacacttttgtttcctcatctagctggaggaaagtgttcctactgtaactctgcagttctctgtacaataattggaaaagagaagaatccaagcagttgtctgaaaaacacaagactgagatactcacagaaagaaactctttcttaaaagagtaaactggcacttctgtggagtgttccaccatctctcaatcacttcctctcacagaatgcaggtggggtgtccctggactaacttggggcacaggactgacattgaggcctcgtgatcagcctggtggtatctcgcaggactcctgtaacctataggctggcctccacctcaatatgtagctgaggatggtctgagctcctggtcctccgacctccacattctggatactggctaacaaagtgagccaatatacctatgcatgtattatgtaagtgctggggatagaatccagggttttgtgcatgataagcaagcacttcctgagctatgtcacgtacccttgctgatggaattccctggctctttcctctcaaccaatgttattaacataggaactaacatttgtcaggtgtttctggtgcttgggagaaatcaatgaagaacagcaacaacaacaaaaaaaaaacaaaattgccaactgcacccaattcttgtctccttgtggtttataatctaggagacaatgggagtaagaatataaataagcaaagcaagccaacaaatagcaccaatgaggtagtgagtaatttataaaagaagtggactggtatagaggaattcaagattgccaccagaggggatggggagccaggccagtgcagatgcacctggtccttggacctgtggaggaaaacgcaaggtgactgacagggctgctcagccaccagagcaagctgctcaggttctccatttagtccgtctcccctcctcacaccctggacatgcgtgttccctactatgtcctttgcctatctgctgaaagcgaagcatcaaactatgatgcagctgcagtctgattccctgggactgagtcccacagttaacacagttcctcatattgtggtgacccccagccataaaagcatttttgttgctacttcataactatgattttgctactgttatgaatcgtagtgtaaatatctgatatgcaagatatctgatatgaaaccccagtgaaagggctgttcaaccccacaactgtttccacccacagactgagagtctctgctacagagaaaggtgtgtgtgtgtgggggggggggggttatttggtatcgacagaattgttcctttgtttcctctgtatttttctaggaaaaaaggactatttagaaaaatgagcagtaaagcaaatatataagcctgacctcaatgagaactctgcagacttttgttacccccaaaaggctttataaaacctaaaaaacgggcgctttggaaaagagtaaaggtaagctctgaagcctattttaagacagagacagatcctaggaacctgagttccacggaccatctatgctttctacaatggtttattagttctccttacttgtaaaggaaatcccttcataggcgactgaccaaggccacctgatctctcttgatactgacaggtcatactacaagacatccatcctgaaacctttgaccagaagtaacagagccttgtttatagtggaagcatggcgactggctgggacagtgcatatttggggaacacacacacacacacacagcctaggctgcttagatgtgaaacgtaggtgattggcgggagcatgtgtgcactgagcggcagcgtccagtggactttcctctgctatctagcaggccagagatttttttcaggccttaagggctaacagatctttttttaaggattatttttatttttattcctgtgtgtgtctgtgtacccaaatgtaccttcagatgccagaagaaggtatcagatctccagcaactgagttagaggtagttgtgagccactcagtgtgggggttgggaatcaaatccaggtccccaggaagagcaacaaaggctcttaactgttgagccctccatttatgccataatctttttaagttattcattcatttattcattcgtcactcagtggggggggggggggtgcatgccacagtgcatgtaggtatagaggtcagagggacaacctgagggagtcagctctttatttccagaccagctgggccttaggagagatctttggccatcaggctcaagggcaagagcctgttttttttttttttcgatgagccaaccatgtcaatggcccctgttagagaatctttgagaggcaggaaagcaagtagaggtcttctctaaagtttttctgaagtgagaaagagagtcagagatagacacacacacacacacacacacacacacacacggagagacagagagacagagacagagattcaatactgagagttgaacccagactttcacacatgctggacaagtgttgactaccacttagctacaccccaagctctccttttgccttgtattttgagacagggtcttaccaagttgtcaggctgggcttgcactccctctgtagctcagatagtccttgaccatgttgtccccctgtctcaggccctgtatagctggggttgcagacctgacccaccaggtctgtgtatttcgtgtgtctttgttttgtgtcttaggctccctttcatgagatgataggacgaggtgacactgagcgttgcctgggagacagactttgtgggccagcaaccagccttgannnnnnnnnnnnnnnnnnnnacctccctgttggctgtgaatatgtttccactgacacctttgggaggtgatttctccaggagtgcgacctcacttggtaattcgcctgggtaacaaaggtaccaggcctgtctgtcactgttgcccaacttcccactgaccctccggagtggaggctgctgctgccctgtaccctcaccaccccaccgtcaggtgcatagctgctgattctggttgagcaaccccagagtattgtttcttgggtattgtgatgaatcacaaagcaaaacaaggctggggaaaggaagtagtacttagtccaagttcaaagtaagctgctttcattggaggcagtgactacagagagcaggctaactgaggtagaaaacaccagacagcgcttggatgacttaacagttaagagcacagactgctcttgtagaggagccaagtatggctcccagcacacacactcaaggggatggctcacgactgcctaaaacttcagttccagggggctgacgccctcttctggctttcataggcatctacattcaagtgcacacacacacacacacttaaaaataaaatagaactcttaagccagggctacacagagaaaccctgtctcgaaaaacaaaacaaaacaaaacaaaacaaaacaaatctcttttactggtgttctttttccttctattatccagggtgactgaccaacccatcttggctttcaaactaaaggacctggatcctagggaacattgaggtccccttactctgccctgccactcctccccccccccccccccgacagtgtttgcttcttcattgtgcatcataaattgtacagccaccttctgcaggtcaaccaactctgccttctttgagggtcagccaaatgatagggaaaggagtgattggcccacgccaggccagactgggaggaacatggacttggggttggatagcccatagataagagatctggaaaccttccaagggtaataaaaggagagaaatctattttccttttcagagacattgaatgtgaagctggtgggtctcacataaatgtcagggaccaatttaannnnnnnnnnnnnnnnnnnnttaggctccctttcatgagatgataggacgaggtgacactgagcgttgcctgggagacagactttgtgggccagcaaccagccttgactcctctcgcttgctcaccttcttactctccggccaggaaagtttgtatcagttccccatctgtgagcagaacaggctggagctggtgagctcagagacaggtgcagcttgcagtcactcatcctgaggaagggctgcagccttcagcatccccacaagatgccaagcacggtgacacacgcttttaatcccagcactgagaagggaaagcctagcctggtctacatagcaagtttcaggatagctagggctacatatagagaacctgtcttaaaaataaaagatgactaaaagagctagggatgtagatcaagtggtaatttgtctggagtgcagcaaatataaacgccatattgtggtgcactcaggaaatcctacatgtaggcagaggatcaggcgttcaaggccatccttgcctacacagcaaaatgaagtcagcctggactatatatttcaaaacaaaaacaaacaaaaaccaactcagatgtcgtcagtgctggtaaacagtggcactgtggttggaaacttgggaacctatcagctctctgctggtcaccttctccagaactgtcgtcattcagtgcatccatccctctgatgcacgctgtcttccagcctaaaagcgggagctggggatgtttttcatctgtggagtgtggaagctagcttgcaggagggcctgggttcaatccccagtgttgcaaatgtaaaataagaatcacagctgcaaggttcttgcaaggatcaagtcataaaccactggagggatgtgacaaactttggaaacatgagcgccatccatgaggtcttactgctgcccggactcagaccacacttgagcagcctccctccagtctacagactgccatctagattcgaccctcagggtgtttccccaggcaacaaactcctttccttgtgtagcaggcttcctctggttgatcccttgtacctagaatagggctttgcttggcagtctagatgttattttcatagggaaaacctggctattttcttcaagccagctagagccatgattcctgcaaacgaactgggtactctggctggtctctgctgaaactagagagaagtatgattaatccattgttgaaattggttactcaaatgaaaacagaacatggtaacagacatttcataccttgagtctttgcttgggttatgctagtcacttctttttggcacaaaacaagaaagaacaagggctttaaaccaagagtagatacaagtttgctcttttcttttttccagagcaactgagctatagtaaagaaaaagaaaccccccaaagagtgggaaagcacgaaggaaagaacaccccaggtttaactgcatgggttgaaaaaaaattctttatcacctggcatggtggtgcatctctacattcccagcactcggaagaagcagaggattgttcagactgactggtccaggtacggtctaggccaggtggggctactatatactgagactttgtctccaacaaaacaaaataagaaaggaaatctttcccaccctgtggtgggtcctacttctgaattttctttctttctttctttctttctttctttctttctttctttctttcttgcttgcttgcttgcttgcttgcttgcttgctttcttgcttccatccttccatccttccttccttcctgtctnnnnnnnnnnnnnnnnnnnnnnnnnnnnnnnnnnnnnnnnnnnnnnnnnnnnnnnnnnnnnnnnnnnnnnnnnnnnnnnnnnnnnnnnnnnnnnnnnnnnnnnnnnnnnnnnnnnnnnnnnnnnnnnnnnnnnnnnnnnnnnnnnnnnnnnnnnnnnnnnnnnnnnnnnnnnnnnnnnnnnnnnnnnnnnnnnnnnnnnnnnnnnnnnnnnnnnnnnnnnnnnnnnnnnnnnnnnnnnnnnnnnnnnnnnnnnnnnnnnnnnnnnnnnnnnnnnnnnnnnnnnnnnnnnnnnnnnnnnnnnnnnnnnnnnnnnnnnnnnnnnnnnntcctttttttttttttttttttaatttgttttttttgacaaggccttgctatgtagccccaactagcttagtactatgtaaacaaggctggttggaactcacagcgattgttctacatcagcttcccaaagggctggaattacaggcatgagccaccaccttctattttattgctcatgttctgcccgcctccctccaccctccttctttggacagggtttttactcagcagccctggctagctcaaagagacacacatgtctttgcctccatgttttggaatgagaggcttatggaggcacactcagccttctgctagcatcctctagcttcctctagtctcctccttctttcagtctttgtacgctgccaaaagaaacggttgtccgatgaaagagcacaaagcaagctgaaaggaggtgagggaaacacgtaaaataaaatgctcccccagttcctagggaaaattgagccctacttagtaagaaaagctgcagattcaggtacctggatgtgggtcaggaccttgatgctctaggattataccatctcccaggaatcttcctggggcttcctgtggtggctttccacggtctcaggatgagaccacctgggcataagccagttgtgggtggaggggctgcattcctcagaacttgaagatggatcccttcacaaaaagaagaggatggaagaaagtagaccttccaggagcctttagcatgggtattcacatggatttaacttggggacaaacctgcggttaacttggttagcaactgcttgtaaatgggagaatccttattccaggggctggtgcacatgggggaaaaagacagagcagtccatggcctcctgaagggaatggttctatcatgttaatgctctgcatcttattacagtcaggacaaagggcctggagtttgggactgagagtttgttttggagtcttttaatatggagatgactctccctaaggggaaggaagaggaccctggagtcaacccacaaacttgtcttggcatggtggtggtggggtgttgagactcaccacaggtgcggtgccccnnnnnnnnnnnnnnnnnnnnaaatggaaacaaggactttggtgctactgatgtctgtctctctgcctatctcttggtgtt

SEQ ID NO: 26 - DNA, 7340 bp, Mus musculus
  misc_feature (172)..(172): "n" at position 172 can be any base.
  misc_feature (2306)..(2325): "n" at positions 2306 to 2325 can be any base.
  misc_feature (4127)..(4127): "n" at position 4127 can be any base.
  misc_feature (4696)..(4696): "n" at positions 4696 can be any base.
gaattcagtgggaggtcccggtttggaagaggctaggggtgtgaaaatgagggtgttaaaggtttttgtaaaggtaatgggttttatacatatgtgagcccaataagaaaggccttggaagggtggctaccctcattcacggctactccatagaacctgccgtagtccccantatgtaggcattcggggatagatgggaagactttcacacatgctaatacacattttgaccttgactacacaggcattacactattacttactggaggtgaatgaggggtgtatttaatccagagggaaatggagacgctcaacataaataagcttaagggtttaaggataaatcccaccctactgagaatgtgtgttgaaaaagggcttcacctagggacctaggttactcttggaaagttttgtggggcaagagcatttatttttagccccacatttaggaaacagaccttttagcatgcttgcctagacagaagtgagacgctgtgggatggggagggagggaaatgtgcccacggctgttgaggaaagaatacacgcaccctgctctagtctaaataagatgtcgcgctctctctgttcacgccacctcgtaagtgaggcaaatgggacacaaagaggccaaattaatgacggctttccttgatgtcaccatccgtagaactcgaggtatacagagcagtcagtgatttgggcaaggaaagcagcggtccgtaattcaaccttggcttcggaaaggcttttgttgggaacggtgggcgcgactttaggggacgtccctccacgcgtttcacaatcccttccgcggtagcaaggattcgctaattgtctcgcgggggtggccccactcgggctccgaggctgggcggtgcggctccgctttctgcttggtctccgcgaggtgtcgccttcggcgaagaaagcggtaaggcgccaccctcgtagcccgcacttatttattttcaaacaaggggggcgccccttcctttcaatttgaaactagaaacctctgcggtctcgtttctacgtgggcgcgtcctcggcctcccattttgcactcctgtgtcgccttccttcgagatcacacacgaacagcccctcgaccaggccttgttccactttagcctagagctcgtccccacacaacacacactcgcgcgcagtccacgcagggactgggcctagaaacctcttttcccattcccagaacacacccagcgacctttgacctttaaaaaaaaaaaaacacggagtgcagcgggtgcaagccagggggtccaaaagggagggggaagcgctcctcgggtttcccagctttgctgcttgcagtctgaaaaacgagaggggggagggggagagagggagggacggagggggagaggagaagaggggaggagggaggggagagagagagagagagagagagagagagagagtcggaaaaaaaagagaaaagcaaatggcttttggcgcgaaaggctttggcgcctcccctgatttttatggaaatcaagagggcggggaaaagcctcttgcctctgcctttctccctccccctcgtctgcgccacagcccccttctcccccgccccccgggtgtgtcagattttttcagttaataatatcccccgagcttcaaagcgcagccagtgacagtcatctgtctggacgcgctgggtggatgcggggggctcctgggaataagcgcgcacacactgcagccgccggaggacaaccccctcccgccgccgctccctcagcccacccggagaccccagccccgagcccctccggatccccggcagtctgcgggaggtaagaagcggtacttgcgaagcccgagcgcccggggaacggcggaggccctgcggctaggcaagcccttggacgcggctccgcaccctgcacccaaatatgccgggcttttctgggggagggggtaagggggcaacacaccgcgtctgcttccgaaacaaaaccatctgggttgggtttttgttttttttttcctgaaaagcctattcagcacccgaaggcaccctagctggaagagacccgccctaatcccttttacagccctagcccaacagagaaatagctttagcgaaaagaaattcgcccggctccacaagatttgtctgagtgtgaggtgactgggaaccggtgcgtccccaccccaagctggggttctccaaaaggtgccgcggggaaagaaggaaaaggggttaggcgaagcttaggtaggtgcctgagtgataatgtaggtcacggctgctccggcttgagagacgcgannnnnnnnnnnnnnnnnnnntctccaaaggttgaggtctctgaaggaaggggaatggaaagggtataggtacaggcagtgatgagtaccaagggtatctgccaagactgaggctctaggtctaggtggagagggttgatagtaattgcctgttgttggtctgactggagaaaggcccttaataattaataaaatttcctgaaccccgttagcgtttgcgctcccgtgatcgcatttctgcaaaaggggaatgaaaggtacttcaatcccatgcctagtagctgggctagagagcaaggacttcctttaagcaactagtgcaagtggggtagtcgcgctagtaagagctgagatctgcagcttgaatagccccccctcccctaggcagtgccttgtgtgaatgaaacggcagtttccaaagttgcagagagccacaccaccccctgcatctgcaagccccctcccactcccagtcctagacagcttgtacacaaaaggagggagtaggggagacgctcaactttctcccaccttccagagctgtggggagcttgcagaagagattgggggctcccactgcctgtccccaccaacccacccctttggctcattctctcttggtttgcctattggttgtagagttggaggttggcgcgactctgctgctctccacggggaggaagcactcccccatattaaaaagagcggagatattaaaaagagaggcgaacccatgcccagctgcaccgcgtccaccatgccggggatgatctgcaagaacccagacctcgagtttgactcactgcagccctgcctccacccggacgaagatgacttccacttcggcggtcccgactcgaccccaccgggggaggacatctggaagaagtttgagctgctgcccacgcccccgttgtcgcccagccgcgccttcccagagcacagcccggagccttcgaattgggctacggagatgctgctgccggaggccgacctgtggggcaacccggccgaggaggatgcgttcggtctcgggggcctgggtggcctcactcctaatccggtcatccttcaggactgcatgtggagcggcttctctgcccgcgagaagctagagcgcgcagtgaacgaaaaactacagcacggccacgggcccccgggcgtcagctcagcctgctcggctcccggagtgggtgccagcagccccgggggccgtgcccttggtgggtcgtcgagtgctagccacaccggggccaccctgcctaccgacctctcccacccggctgccgaatgtgtggaccccgccgtggtcttccccttcccggtgaacaagcgagagtcggcgtcggtgcccgctgcccccactagcgccccggcgaccagcgctgcggtcactagtgtgtctgttccagctactgccccggtggctgctcctgctcgtgcaggcggccgtcctgccagcagtggggggaccaaggccctcagcacctccggagaggataccttgagcgactcaggtaaagcctagagtagagttcttgctagctccttacggactgggaaggtgggggtgctgcgttccctttgttatcatagatttgtgcgggtgattctcttcagttcaccagcctcccgggacagaagaggctggaaacaccagctacaccttctcttaaatttgccatcccctttttcgcgaatccttgcggtaggcatgccctcactgtggcaaaagttggtggccagctcagtcagtctgtggagtccaaaaaactacctgtacggaaatctgttagtccgttggaaaggaacctttaagccangtcaaggaagggaaaagactccctgcaagcgagggctgcagaatcccacttgcaaaagttaagagaatgccttgcaattcctccctcccctccccttggttcagcagctgtcagcaagtgcattagtggttgtgtacgttttcagagagcctctttccggttttgattgagtactagtcccgttgtgtttcctagctggaatttctgacctaattgagctgagttgtgttccataacccattgcccttgaaggtcgagggcgggtccctaccactgccgctcctaaggaatgcacgcacccttaggattcattggttctattgtaagcctttatctgcgctgtcctcggaagaaagggttaaaaagaagaagaagaaagctttttttttccatggccatggggctgtgaaagtgcctaccacactttacccaaatccagtctgcccttgtccttcgagctgtaggtccagcccccctattagaccttggaagccagtgttttcaaaatgccaaagaataaaaagtctaaatttcctcctggactgtggagggatcgctcaaggctcctnggaggaaacttggtgataagcctgcactttgaaagggctctgtccctttaatgtctgtgccttgacagctttctgttaggaagcagttccttccggcagctgtcttcttggctgaaaaccaaaacactggcttaaagggacctaccggctggagcagcctaacatttcattcagccttagaagaagaaacctcacaattgttccgctttccggtcctccctagattaagcagacgatgtgttttggttttgctgcttgcttttattttcttcttttaagccataattttctctcctagcctagcagtaaacgaagtcagaatgaatacacataggacgatacaggcttttttttttttttttctcgtgcaccgccccctttgggactctgagctactgtggattagagctttgtggttgagatctggtctctgcctagatgaaaactgcttactccgtacaacgcatgttcgcacgaggaaaggttgttgtcgtagtgaatgagattgtcctagagttttaaggatggcagaatcaaacccagccatgggttttaccaaaggaggacctccggtctgaagggcggctgtggaagtgtgtataagtaaatccatggggcagactggctggtgattatgctaaaagcccctattaccgagcatctgtcgccaagtctacatagtgtctgccaaactcaaacactgtggttattacccccatttaatagctgaggacactgaagagtttttccaggatcatccgacaacggctcgttctgactccagttgggttcctcgatcgagtttctgccacatcctcaagtttgtcaccaggggttgaatcctgggcccttccacatcagacaagtgccctgctggccccacaccacccagggaaggaaaggggtggggcgtacctcttgtccgcgttgtgatcagcaaacctagctgacttaaataacaagtgtatgttaatcgcacaattaaccagaaactatttttcccctcagatgatgaggatgacgaggaggaagatgaagaggaggaaatcgatgtggtcaccgtagagaagagacgttcctcctctaacaacaaggctgtaaccactttcacgatcactgtgcgtcccaagacctccgctctgggtctggggcgagcacagcttggcgagctgatcctcaagcgctgtgttcccatccatcagcagcacaactatgctgcaccctcaccctacgtggagagcgaggacgcgcccccgcagaaaaagatcaagagcgaggcttctccacgccccctcaaaagtgttgttccagcaaaagcgaagagcctgagcccccgaaactcagactcggaggacagcgagcgccgccgcaaccacaacatcctggagcgtcagcgccggaacgacctgcgctccagcttcctgacgctcagggaccatgtgcctgagctggtgaagaacgagaaggccgccaaggtggtcatcttgaaaaaggccaccgagtacgtgcacgccctacaggccaacgagcaccagctcctgctggaaaaggagaaactgcaggcgaggcagcagcagttgctaaagaagatcgaacacgctcggacttgctaaacgtttcccacacggacagtcactgccactttgcacattttgatttttttttttttaaacaaacattgtgttgacattaagaatgttggtttactttcaaattggtcccctgtcgagtctggatctgggtagggggcaggacacggggttctgccatgaccttggaaaaaaaactgactcacgggatgctgggtggcttgttttcctcctccatatcacctggtgacagccgtggaagttcgggacactaaggagcttcaggaggctgtgaagtcaccttgttccggtccaagattccaaacagagtcattccttctttttacaatggtgcttaagttccagcaaatgccacagaagggggggttgccatttgatgcccttgggaacacttgtgaaataccattgatacacccgcctttgtatacgtctggggtaatgagaggtggctcttgcggccagtattagactggagttcacacctaagtactgtaagaatacctcaatgtttgagggggatgttttgtatacaaaatatattgttaatctgttatgtactgtactaattcctcacggcctgtatacttttgtatgcgctgatacataactaaatttgatacttatattttcgtatgaaattgagttgtggaagttttgaggtagatattactttacactttttaactataaacttttgtaataaattttactatatatatatattcctttttttcctagcctgtttcttccttgtttactgtatttgttcatgtttggtgacattaactgtgtaaaatgtcaaagttctgtgtttaatttcttcaaaatgtatatatttagtgctgcaccttatgagcactttgaatacctcatgtttataaaataaatagcaattaaataatgcaaggttgatgttttccttcctagtttggctgcagtctctgcacacagtccattccttacccggacttttaacattgtggaatcctagttggtgagggtacttgtggaaggatagatgggtttgtgaattc

SEQ ID NO: 27 - DNA, 1389 bp, Mus musculus
atgcccagctgcaccgcgtccaccatgccggggatgatctgcaagaacccagacctcgagtttgactcactgcagccctgcttctacccggacgaagatgacttctacttcggcggtcccgactcgaccccaccgggggaggacatctggaagaagtttgagctgctgcccacgcccccgttgtcgcccagccgcgccttcccagagcacagcccggagccttcgaattgggctacggagatgctgctgccggaggccgacctgtggggcaacccggccgaggaggatgcgttcggtctcgggggcctgggtggcctcactcctaatccggtcatccttcaggactgcatgtggagcggcttctctgcccgtgagaagctagagcgcgcagtgaacgaaaaactacagcacggccacgggcccccgggcgtcagctcagcctgctcggctcccggagtgggtgccagcagccccgggggccgtgcccttggtgggtcgtcgagtgctagccacaccggggccaccctgcctaccgacctctcccacccggctgccgaatgtgtggaccccgccgtggtcttccccttcccggtgaacaagcgagagtcggcgtcggtgcccgctgcccccactagcgccccggcgaccagcgctgcggtcactagtgtgtctgttccagctactgccccggtggctgctcctgctcgtgcaggcggccgtcctgccagcagtggggaggccaaggccctcagcacctccggagaggataccttgagcgactcagatgatgaggatgacgaggaggaagatgaagaggaggaaatcgatgtggtcaccgtagagaagagacgttcctcctctaacaacaaggcggtaaccactttcacgatcactgtgcgtcccaagacctccgctctgggtctggggcgagcacagcctggcgagctgatcctcaagcgctgtgttcccatccatcagcagcacaactatgctgcaccctcaccctacgtggagagcgaggacgcgcccccgcagaaaaagatcaagagcgaggcttctccacgccccctcaaaagtgttgttccagcaaaagcgaagagcctgagcccccgaaactcagactcggaggacagcgagcgccgccgcaaccacaacatcctggagcgtgagcgccggaacgacctgcgctccagcttcctgacgctcagggaccatgtgcctgagctggtgaagaacgagaaggccgccaaggtggtcatcttgaaaaaggccaccgagtacgtgcacgccctacaggccaacgagcaccagctcctgctggaaaaggagaaactgcaggcgaggcagcagcagttgctaaagaagatcgaacacgctcggacttgctaa

SEQ ID NO: 28 - DNA, 24009 bp, Homo sapiens
tacagatatctttcccttatggaataaaagcagggatagggctcattattccgatattatgaaccaggagaagttaatggaccgatctaaaattcctcaagaagtaagacacaattctaagcttgaagaactccagtcctctccccgggtgaccctgtgttcttactaggactaccttatactaccttgactctgcagtaccttctttcaagcctaaagttacttgattacggacaagccatgaagagtaaaggggtgtggcccagagagatttccagttgaagaaagaatgattcaacagtcccattaaaacaaagagacattttctgcaggctcccccaggacacacatgctatggtctattgctgcggggtacatggagcccctgcaggagggctgggactagaaggaagggagggaacgtttactggacatccattataagccagatggctactttgtgtaatcctcacatgatactaaaagaaagatgaaaaaatggccgggtgtggtggctcatgcctgtcatctcagcactttgggaggccgaggcggatggatcacttgaggccaggagtttgagaccagccaagccaacatggtgaagccccttttctactaaaaatacaaaaaaaaaaattagctgggcacggtggctcgagcctgtaatcccagctacttacgatgctaaggcacaagaatcgcttgaacccggtaggcgggggttgcagtgagccgagatggtgccactgcactccagcctgggcaacagagtgagattctctcaaaaaaaagaaaaaaaagaaagaaagcaagaaagatggagaaataaagcctcagaaaagttggactatccaacatagcagaactcgctgtcatgtctggtgtcagagctgttctttccagcattcgctgcaccagatgctgtagaagatggaaaggcaacatgggaaagggtgctgcactcaggaactgctcatcctgttaggggagtcgcacacacacacaggaatctgataaagaacccccatggccgggcacggtgactcacacctgtaatcccagctctttgagaggccgaggcgtgaggtcgcctgaggtcaggagttcgagacaagcctgtccaacatggagaaagctaaaaatacaaaaattagccgggcgtggtggcacgcacctgtattcccagctactcaggaggctgaggcacgagaatcgcttgaacctgggaggaggaggttgcagtgagcagagactgcaccactgcactgcagcctgggagacaagagttaaaaataataataaaaattaaaaaagaacccccttgttggcggcaagcagtataagattaatggagatttggggcagagaatgggtagggttaggggaagggaggacgagattccttccaggacagtctccagctgaactttgaggaaagaatttgaataagcagaaatgaaaggaaaagcctttctaggccagaagtagcagcttctggaaatgagcagatagaatcactgatatttatcagtgattgttatctgagtccaaggaaactgaaagggccagcaggcagattctagcaattccactcagatattgaggtagctcgggccgtccatggggctacaggaatgtatccagcattataggaaaatgaaattagcaagaatcagtgggtgagatcagccatctactaagtaatcacctgaggagaagatctgaaaacttcagcacagcgcgaggtgatctggacacatccaaagcacgtcattgtgtctggaaagtaatcccagaaaaaggagacccctgtccttcgtagagagcctgcctgtttcaaggggcagcgccaaatggactcaaaggccagatctggcatcagaattccttgtagcccttacagattcctactaagatgaggatcccctaattgtgagccattccagtgcactgacaaattcaagtttgaggcccacaaggggaaacctatttctccccaaaccccatacctgtggagcctggccctgagcagctgcctccagggacatctttcccattttgacttttagcataaggaaactaagggaaatgagaattccaactccacagcagcagtatcaccgtccattccccgtagctcttcatggtttgcagtgcattttgactcactccatcttagccctctctcaagtctacgtaatgcatgaagctggagggaagtcttcacagtggaaggggtctttgagctgcctccaaggatgcaaaactagtctctgagggcagtccagggtctgctggacacttcgattttctaaatcagtaatcaaattactggcattaaatgaagataatttttgttttaaacctaattatgctattacaaataaaacttcccacctccaaaactctctcagtggtggatctcaaactctcctccagcctcagatgtcaaaaaactatgcattttgccttgggcacatccaacatcatatacgttgaatggctttgatgggcatgattctaatcttaattaaagcagtgcccgttttggtccatcttggtctctttgaacccactctcagctgactcagttcaatagcagtttggtgggaaaaatgccaactggcctgggaaacaaaggagaaatttgggggtgactttaggcttcacaaaagggtcccttacatcacttgaaatgattaactttactgaaaagtaacaaaattatttttgaaaaataacaaaaacaaagaaattaaatttgttcataaccccattgctttaaaaaaaaaaaaaaagttataggccaggcacagtggctcacgcctgtaatcctagcactttgggaggcggaggtgggtggatcacttgaggtcaggggctcgaaaccagcctggccaacacggtgaaaccctgtctctactaaaaatacaaaagttagcctggtgtggtggcatgtgcctgtaattccagctaccagggaggctgaggcaggagaatcacttgaaccagggaggtggaggctgcagtgagccgagaccgtgccattgcactccagcccgggcaataaggcgagaccccatctcaaaaaaaaaaaaaaaaattaattaggcatagtggcgggtgcctataatctcagctactggggaggctgaggcacaagaatcacttgaacccgggaggcagaggttgcagtgagccgggatcacgccactgcactccagcctggatgacagagcgaaactgtctcaaaaaaaataaaataaataaataaaagttatatcaagaagaaagtttctccctccacctgactgattgtcttcttcaaagtaaacccctgttagcaacttggtgcacattcttctcaatttgttactggggggttgatgcagatatatctaagtacatatatatccaaaatgccagacagattgacctataccttgcttattttccttcatgttcaggaacatttcccgtctgtaactatagacctaacacattatttttagtgggtgtatgtaattccactgcatggatgtattacataccattctcctgtttaatttgttttagttatggatatttagattgcttatagtatttttgttattgagaatgatgcagccacacacattcttgtttatatgcttttatgtgtttgtcttattatttctcgtaggatggatcatgaagagtggaattgcttttcctcttggggcaggcacaccaacagtgtatgtgaggcccctgctcccactccccaggctggccagtactttgggccaatctgctagacccaaaaatgttaatctcactgagatttaatttgcattcccctgactaccggtgaagttgagcatcttttcatatgtttattgacaatttgcatttcttattcagtaaattacctgctcgtatcctagagtcatatttctgtctgcccctttttttctattcaatttgtgggagctctttgtatacctgggatctaatctttgactcatatatatggcaagtattttctattactgttgtcaactttttatcatagtaaaattcttacatccagcacccccacccctcccctgcccttttttttttttttttgcatttgggttaggcagagagctagctttactgttttccaaatgaagtcaatcgatcccaaggatttttaaattatttaatcagtaaaaatgtacacattttgagggaggtgtgaagatcctaggagaaactgtgctcttgtccctgaagacagactcagtagatcttttttttttttcttttgagacaaggtctcactctgtcatccaggctggagtgcagtggtgtgatgatggcacactgcagccttgatctccctgggctcaggtgatcttcctgcctcagcctcccaagtagctgggaccacaggcacgcacccaccacgcccagctaatttttatattttttgtagagacagggtttcaccatgttgcccaggccggtctcaaaatcctgggctcaagccatctgccctcctcagactcttgaagtgccaggattacaggcgtgagccaccatgcctggccaacccagcagatctttaattcacaatctggaaaaaccatctagaggctgttgctctcctagccagtcatgatttgggcccttctcaacatgtgtatgtgtgtgttgtttctttgtgtgtgtgtgtcttagtaaagaggagatttgtaaactaaaatattctcctctctcaaaaatcaccttaattataaaccaaatgctgtgtataactctatcctagcagttggtgattagattgaggcatccatttcagatgtgggtctccttccctggtccacagtgagctccttgcggctgtaccttaacttacctctgttccaaacccacccaggggctcagacacagtaatagatgggtacttgtctcagttcattttgtgttgctataacctaatagcacagactgggtaacttataaagaaaagaaatgtatttctcatgtttctggaggctgagaagtccaatatcaaggtgccagcaattgctgagggccttcatggtgtaccatcccctggcaggaaaaaggaagagagggcaagagatcaaactcctagcctcaagcccttttataattagcattaatccattcacaagagtggagccctcatgacctaaacacctcacattaggtcctgagacaggaataatataaggtggctgcagaataatagaagattttgggcagcaatttcacatgactagcaaaaggaaactgttgaaatggctgcagaggccatgggctaagaccgtgaaaaacagagtgtagaccaagctggctaagacccactgaacccagcatggcactggatttgacctaggtttctcctaggacctcattatacgctcattaacatactaaatcacacaccccactagcatcatgacacttccgagaacacccatatttggtttaaaaataggtggtgtcacagttctgagaaatctcctcctttttctaggaatgatcatgaatattccgcctcttggttaaagaaacccgtaaaggtagcaaccccaaaccccctttcgtgtgagtctctcgagtacacccatattcccttttcttgagtgtgtacttttccctttgcaataaatcgtactttcactattttccaactggtctttgaattcattctcttgatggtgtcaagagcctggacactggctggggtctaggtcccactggcatttggggacctcccctccaacactgttgcactgggggttaaacttccaacgtgtttttttttggaggacacattcaaaccatggcagtactgaacaaaaccttggctttgaaaccatatgaagatttgttttgtgtgtgttcacatagttgaagtatttcaacatttttaagagggattttcaggcttctctataagcagactaagaatcagcattagcatgttttctccatgtacaaagtcttttatctttctacttacaaatgaaggtaaccaataaatatttgttgaattttatcattctgttaaccttcagattcagacttgtcagtaattactggcttgcattaaaagcaggagattagagattgaggtccaggaagtataaatgatttgctcaaaggcatgtagagtaaccaggtctcctgtccctctgtcccccttttctgctacaccttgtccctcgacaaagggtgaatgacctagtgatggtcattcatctgaggagaaaggacaaaggtaggactttgaatcggagcaactgaacccatcctggcctattttcacagtcttgccacagaagatctggccaccttagaaggactcattcagtgatcttggtcttgaataataccatgagtacttactatatacaggtacactgctgtgccgtaaggattccctctggagcaaaactgacccaggtcacaggttagtgagggagactgagcctgtcttccacagtgtcacggaagtgagcactaaacaaatactcccaggcatggatcattacaaatggaggtgagtgctggacaggaaaggacaggatgctaggcgagaattcagcaggagggcttggtggcgattagggggctagggaaaagcagaagtggggctgtaaaaggcttttgcaaagatgaaggcttttacatttgtgagggaaataacaataataaaggtgcttggaagggctgctcatccgcattcatgggcctcttcctagaactctgggaatctttctccctagagctctgtaggcgtccagggtcagggctggaaaggccttcacaaatgctaatctgtgagcattttatgggttgccccctgaccctcagcatcctcctccttaactagatccaatggtgaggtgaagaggtgggggcgatggagaatggcatttccagtttggagaaaaaagtagggagaggcggggaagccttcccaccccaatcccagggccaggttcccctctctccaaacaagcctaaggaatgtttttcaaggcaaaatcccacctcactgtgtatttggttgtgaagggggctgtccaggagatcagggttgtttttggagagtttggagggcaggggcaataatgtctgaccccctgcaaacaaatacacctgtaagaaaagctagaccagagtgaagtaaagccaggatttgatggtggcgggaagggaaggggccaatgctgctgctggacagaggggtgttattttccccagaagaatagcatgtcgtggtcatcatcataataatagctgacacaactattatgggctggggacttataagagctttcataactctcaggtaggaggcactacgaactccatttcacaattgaggaaactgaggcacaaagaaacgaagtagtgacagcagctttcctttttcccttcaacagtttggaatcaagctgtttgagccgaggctgggtctcaggaggtgtggacagcacttccatctcggtaaatcagattcgcctgcccataattggggagaatggtggctttgaaaaggttaacttgggagccctggggacggctgcagggaacgtacgcccattccccctaggaagcagagccaggccgcctcctcctccgcagtggtgaggacgcgtggacagtcccgcgggggcggcgggagacctgcggagtggccgcactccaggtccgcgccaaggccgggcagctccgctttctgctcagtctccgcgaggtgtcgccttcggccgaagaaaccaccgcggcgccaccctcgtagctcgcacttatttatttatttattttcaaacaaggggggcgcccctcttctttcaatttgaaactggaaacatccagaggtcttgttcctaagggggcgcgtcctctccctgctattttgcaccttcggactagccttctttcgtaattacacaggagcaacctccctgcaaggccttgctcaacgttggcctcgcgctcagctgcacaacacgcagtcaaagcgggggctgggttagaagcatcggtctcccctccccaacacacacccccggagccctccgtaatttttttttcttttaatgacaagcaattgccaggctcgcagggtgggtgctgcattgcaccgctccgcgcgcagctggttctcagagtgcagccggtgcaagcccgggggtccaaaagggcgggaggagcacaccctgggcttcccagctttgcagccttctctctgcaaagaaaagcaagtggcttttggcgcgaaagccttggcgcctcccctgatttttatggaaatcaggagggcggggtaaagccgctttcctctcctttctccctcccccttgtctgcgccacagcccccttctctccccgccccccgggtgtgtcagatttttcagttaataatatcccccgagcttcaaagcgcaggctgtgacagtcatctgtctggacgcgctgggtggatgcggggggctcctgggaactgtgttggagccgagcaagcgctagccaggcgcaagcgcgcacagactgtagccatccgaggacacccccgcccccccggcccacccggagacacccgcgcagaatcgcctccggatcccctgcagtcggcgggaggtaaggagcagggcttgcaaaccgcccggcgcccagggaagcgacgagcgccggggcaaggcaagccctggacgggattgcgacgtgcgcaccgggcgccctaatatgcccgggggactgtttctgcttccgaaacaaaaccatctctgggttttcccagaaaagccagttccagccccgaaggcatcctggctagaggagacccgccctaatccttttgcagcccttaccggggggagtaatggcttctgcgaaaagaaattccctcggctctagaagatctgtctgtgtttgagctgtcggagagccggtgcgtccccaccccaggctggggttcttctccaaagggtgcccctggaggaagaagagggggggattaggcagggcgaggccgccgcggtcgcaatctgggtcacggctgctccagcttggaggagaggcggctctcccggcgaccctcctcgcgcgggcgcccctgccattcccgggaacaggggctcagcctctccctccctggaagaggacgttgtcgtgggtttggaagagcaggggtgggcttagagagcttccaattaagctattggcaggagtatccctgcagcgggtgaatgccgaggggcgtttgctcaaatttggggaggggaaggatttgtggatatgggtgtctgttgttggtctctgtctagagaaaggcttttttttatttgcaaagttttctaaatcccctgctatcatttgcactcctgaggttgcatttttacaaagggggtagaaggtactccaaataccattcccggtagctgggtcggagagcctggggcttcccctgagcagccggccccacaccgctgcgagtgcggttgtctgcgtgctcgtgagagctagaattctgcagccaggaacagccccctcccccaggcagtgccttgtgtgaatgaaatggcagtttccaaagttgcggagcctcgccaccaccccctgcatctgcatgccccctcccaccccctgtcgtagacagcttgtacacaaaaggagggcgggagggagggagcgagaggcacaacttcctccaccttcgggagcagtgggcagagtggggggcttggagggaagattggggaacctggttagagggggcgcccattgcctatcccctcggtctgccccgtttgcccaccctctccggtgtgtctgtcggttgcagtgttggaggtcggcgccggcccccgccttccgcgccccccacgggaaggaagcacccccggtattaaaacgaacggggcggaaagaagccctcagtcgccggccgggaggcgagccgatgccgagctgctccacgtccaccatgccgggcatgatctgcaagaacccagacctcgagtttgactcgctacagccctgcttctacccggacgaagatgacttctacttcggcggccccgactcgacccccccgggggaggacatctggaagaagtttgagctgctgcccacgcccccgctgtcgcccagccgtggcttcgcggagcacagctccgagcccccgagctgggtcacggagatgctgcttgagaacgagctgtggggcagcccggccgaggaggacgcgttcggcctggggggactgggtggcctcacccccaacccggtcatcctccaggactgcatgtggagcggcttctccgcccgcgagaagctggagcgcgccgtgagcgagaagctgcagcacggccgcgggccgccaaccgccggttccaccgcccagtccccgggagccggcgccgccagccctgcgggtcgcgggcacggcggggctgcgggagccggccgcgccggggccgccctgcccgccgagctcgcccacccggccgccgagtgcgtggatcccgccgtggtcttcccctttcccgtgaacaagcgcgagccagcgcccgtgcccgcagccccggccagtgccccggcggcgggccctgcggtcgcctcgggggcgggtattgccgccccagccggggccccgggggtcgcccctccgcgcccaggcggccgccagaccagcggcggcgaccacaaggccctcagtacctccggagaggacaccctgagcgattcaggtaaagaccgaactcgggtccggctgcctccctggggcactggaccccgggtcgcgtcccctttgttagtgctcgtatgtcttggcctggggagcattttggaggcagtgctaggggcagagaggtcctgtttcccccaagtctctcctcggggtaaagagaaggggctgagagaatgccgttgcaaaaggggtgctctccaattctcgccttcactaaagttccttccaccctctcctggggagccctcctctaggccatcacgggccctcacccggtcccccacctctcttttgcagcgcagtctgaggaataaaattggagaaagttggtggctaaaccgggtgggggtttagggggttgctgggtgcactgcctggacagaaacctgttagcgcaggggtgaaagggactctctggcccaggtcaggggagggaaagacatcccgagaagattcaagggctgtgcaaagccctgtttaaggcgcaggaacttataggagggttgcacagatggctagagccgattttctattctttttctttttctttttttttttttttcaaatgtcggtacctttcccttcccccatcctcggtgggtggtgggctatttgctcctggtgcgtggccagcaggcggcgatatgcgaggccagcaggcgggcccgggatctgaaaggctgggggtggtgggggcaccctccctccctccattcagcagctggctgcaagtgcaacagcagttgtgtacattctcagggggcctcctctttccagtgtgcagtggaaactggctgtagttttgtcttccagcctgaattccaggcctaatttgagatgtgagttgtatctgtaacccagtgcccttgaaggtgagggcaggcactcagcagcctctccaggaaggctcacatcctgggaggactcactgattagttctattgtgttcatttgtctgtgtcttaagctgaagggaagagttaaaaccaagcctttccctgggggtctggatgaacagaactcaacccaaagagtggcattgccttgtccttggagcagggagctgggaccccccttggactttgaaaaccagtgttttcagaatgcaggtggataacaagcctaaatttacttctgggctgaggagagatctttgaggctcctggaaggaaacttggtgataagcctccagtttgaaacggctctgtccctttaatgtctgtgccttgacagcttttggtgaggaagcacttccttccaacagctgtcttcttggcagaaaaccaaaacattggcttaaagggacccacagactggaacagcctcacatttcggctttagaacaaatcccacaattgttcagctttccggtccccttcagatcaagcagaagatatgttttgattttcatgcttgtattttaaacaataattttctaccccagcgtggtagtcaatgaggagagaggggaagaatgcgcacatgatgctacacgtttctgttgttgctgttattattggtggctttgaggagagctgctcccatttgggggtttataccaactgtggattatggctttgtcattaagatttgatctttgttaaatgaaaaactgtttattgtataaaactcaggtttgtggacgaaaagttgttttttttcttcagttaattaaattgttcctcaagtttgtttaaggacttaaaatcaaacacaaccatgtgtaaactgctaaatgaggctcctaaaatgagaggcctcaactctttaagtgtggagctagaaatgtaaataagtccacagggcagactggtgattatgataaaagctaccatttactgagcatctgtctactaggctcagctctatgctaagtctacatgttatctgtcaaagtggtatcatccccatttaatagctgaggaaacagaggcttagaaaggctgggtaacttgaccagggtcatgcaactagtctgcggtggagccaggattctgtctgaccctaaaggccaagttctttatatttatttctaccacctgctaaagtcttgaatggaggctgaaagcacagttggggtatggggaagaaaaatatatatacatacatatatgtatatgtatgtatgtatgtatggggggttgttttgtttttgtttttgataaggagttttgctcttgttgcccaggctggagtgcagtggtatgatctgggctcactgcaacctccgcctcccgggttcaagtcattctcctgcctcagcctcccgagtagctgggattaccggagcatgccaccacacccagcaaagttttgtatttttagtagagacagggtttcaccatgttggccaggctgatcttgaactcctcatctcaggtgatctgcccgcctccgcttcccaaagtgctgggattacaggtgtgagtcaccgcgtccggcctacagatatatttaatttaaagagatctaaaacaaatacaaaactgtccacatctatgttgatggacccataaaaatagcagtctgccagggtctgccggaagagacagataagcatacatattaacatggatatatatgtgaatttcattcaaatggttctcacatgagagtaactagcatctttctctcagatgatgaagatgatgaagaggaagatgaagaggaagaaatcgacgtggtcactgtggagaagcggcgttcctcctccaacaccaaggctgtcaccacattcaccatcactgtgcgtcccaagaacgcagccctgggtcccgggagggctcagtccagcgagctgatcctcaaacgatgccttcccatccaccagcagcacaactatgccgccccctctccctacgtggagagtgaggatgcacccccacagaagaagataaagagcgaggcgtccccacgtccgctcaagagtgtcatccccccaaaggctaagagcttgagcccccgaaactctgactcggaggacagtgagcgtcgcagaaaccacaacatcctggagcgccagcgccgcaacgaccttcggtccagctttctcacgctcagggaccacgtgccggagttggtaaagaatgagaaggccgccaaggtggtcattttgaaaaaggccactgagtatgtccactccctccaggccgaggagcaccagcttttgctggaaaaggaaaaattgcaggcaagacagcagcagttgctaaagaaaattgaacacgctcggacttgctagacgcttctcaaaactggacagtcactgccactttgcacattttgattttttttttaaacaaacattgtgttgacattaagaatgttggtttactttcaaatcggtcccctgtcgagttcggctctgggtgggcagtaggaccaccagtgtggggttctgctgggaccttggagagcctgcatcccaggatgctgggtggccctgcagcctcctccacctcacctccatgacagcgctaaacgttggtgacggttgggagcctctggggctgttgaagtcaccttgtgtgttccaagtttccaaacaacagaaagtcattccttctttttaaaatggtgcttaagttccagcagatgccacataaggggtttgccatttgatacccctggggaacatttctgtaaataccattgacacatccgccttttgtatacatcctgggtaatgagaggtggcttttgcggccagtattagactggaagttcatacctaagtactgtaataatacctcaatgtttgaggagcatgttttgtatacaaatatattgttaatctctgttatgtactgtactaattcttacactgcctgtatactttagtatgacgctgatacataactaaatttgatacttatattttcgtatgaaaatgagttgtgaaagttttgagtagatattactttatcactttttgaactaagaaacttttgtaaagaaatttactatatatatatgcctttttcctagcctgtttcttcctgttaatgtatttgttcatgtttggtgcatagaactgggtaaatgcaaagttctgtgtttaatttcttcaaaatgtatatatttagtgctgcatcttatagcactttgaaatacctcatgtttatgaaaataaatagcttaaaattaaatgatgcaactcaaccttttccttaatggcattacactctgtcccttaaggagcaaccataaataatccataacctatagagggaatttggtttccgtaaatagccctttttgcacctgtacaatcctggttggggggcatgagtcattgtccccacttaaggtggagggaactgagtttggggaaattaaggcagttctccaagattatgcagaatagagatgttattagcgactattgtgtgcattgtagcaatggcatttgataatttacagagcacttctgtatactgtggctccttagtggaattaagctgagacctcagatcagtccctttaaaagaaaagtaaaaatagccacagggttgtttaactcgcttgtattgggctttggtagtattcgtcccattggcagacagtcttctattttaaggtagagcatagtttgtctccaagaattcattgttaaaaacattcactaggatctgtggaggttctaggctaagcagagtaagcagaataaacagatggaaatgggttcctcccttcaatgaactcaacctgattcaccaaagtgtaattcacgagtgacagttacgtagtccagagcaagtaccaggtgcaggagagaccctggggtcacaatggagaccccatatgggtggcatggctctctacttgccattcctattacacagcagtgtcttggctacttgggctgccctttggaaatgggatcaatcttgcaggctccagaagacagagccaagacttgtgtgttaaggagatagtttacctgttgggacataagagccttgcttgtaagcagcttctcagaactaaaagtgtacaaataacctatttctcttttgagtgtcaggttgtactcggttatttctctagggttttgttcatctcagatttttaactgtgagccgaaaaaaaagaaaaaggccttttgcttcactgagaagaaagcaggtccagagatgagacagctttgcttgcctggacacacagtttgtcaggggcagagatgggagacaccaagccatgtgtccttgtctgctttggtcatttttatttgtttcttttgagatggagtctcactctggtgcccaggctagagtgcagtggtgcaatctcggctcactgcaacttccgcctcccgggttcaagcgattctcctgcctcagcctcctgagtagctgggactacaggtgtgtgccaccatgcccggctaattttttgcagttttagtagagaccaagtttcaccatgttagccaggatggtctcgatctcctgaccttgtgatccacctacctcgacctcccaaagttctggaattgcaggcgtgaaccaccatgcccagccgctttggtcattttataaaggcaagtaggagtttagaactcagtcctccttatcctgcttatcgcacacccttgagatacgaggttggtgatactaccatggacatctttctgatggtctcgccatgtagaaaataagataaaatgccctttaattctcctagtccccatccccagactaaaaaataatgcaccctttctttttgaattgtcattcaaaaaacttccgttcgtttgcattttacaggccccaaatcactcacggcctctgcccctgtgtgtgtgcaagagccaaaagaaagttaagcaacctcacattaattgtgtacctaagattcttgaagcccagctcagtcatcccagtttctctatttgtgattaccataaggaacctacctgagtgtgtccaatgaaatggaatgcttaaccgtgaagaaagaaaactgttcatatgaatgaggccactaaactacaattcctactatgctctctttttgctcgggctgctgggaagctcagagccaaattccaccccctctaacatctccagtggtcattctcttctaaatgtttacggtttcttgttttccattgttaggttagtcatctttttaatgtatataatgtagtatataacatgaaacgtttttgcattaggtggaccacaaatatgcacctaaaggattaaaactaaagtgaaaaaatcccatatttgccttttctgacctagctgagggaatgtcaccaaatttagctctgcaattatctataaagtaattgctgtagtcacagaagaattgaactagttgtttcaataacatgagaaaccatctctgcattccaagagcagttttgagactgggaaagagctctacatcatttagttcaataaacgatagagctgagacgaagcacagagatcatctcattgaaattcatttctcagaatgagggtgcgggatcccacctggaattaatggcttaacccagggagactagagccggtgtctcctatgacccgcccagtgcccttccccataacattcactttctcattgcccacactgtagcctccccacctcctggcctgcccgtccacctacatcatgcttccatattaacccttctaaaccacctactctttatgcaaacttccaacagttccctactatttacagaatcgagtcccgactctccagcccagcacagaggcacttctacccagtcccaccagctccattgcccatggccctccatgtgctggactctggctgtttctcatccgtgacttgtttcaccacatccctccttctaggttacccagattccattaattgaaatccttctcaatcttgcacccccaggtaggcctttcccagcccttggcctctgtgcacttatcttctagctgccttatgcacctcctggaccccctaaactgtgggctcccttaaggcagatagggctctcatttgcctctgattctgagcatctgccctgtgactgacaggtgacagagccttagcagatgccagcagtatagacggtaacagaggaaggagcgaggagaggatttccattatgggtgggtctcccaccaactccagttcacaagctctcaggctaattcagatgggaaaagacatcccttagacatcaatgagtgtctggtactgactatgctggcagttctgaagaagtgaagataaaatgctcatagaggactgtctacaaggagcccacagtctgcaagagagttaaagccctgggggttgtatagaaggcaagaagagaaaccaagaggcactgggttgaggggctgatgaatgaaagcatatgaggggcctagtggctgagtttggggctatctgaaggaggaagctggtcctctgcctgggttcactgagtctacgcctggcctggcttgtggcagctcagacacttgcctcaggccacagatggtctacactcgtagtgaaaaaggttgcaatgcctcccacccctgtgtagcactgcagagcttcccaagtttttgtatgcatgagtctcaaaaatccttgaggatttttgaccagtttatcacattcccacattataagtgagggaatctggtcttctgagttttagtttcattaatccctatggtggctatgttttgaaattctgatgtgagttgttttcgaaatcagaggttgtttgatttggaagaggcatagaagccaactagtttactctcccatttcaggggaggcacctacagtctgcttgtgagaattttatttttcctttattttatttttcttttttttgcaacagggtcttgccgtgttgcctagcctggcgtggagtggctaatctcaggcacagtgccactgctgatcagcacaggagttttgacctgctccatttctgacctgggccagccagttcatacttccttaggaaacctggtggtcccctactcccaggagttgccatattgatgctaaacttagtgtggacatccagtaggcatagggtgctacagctcagaacttctggactcaagtgatcctcctgcatcagcttcctgagtaactcggacaacaggtgcacacacactgccgtgcctggaagcgttcttttttctttttttctttccctctttcccattctttctctcaacaaatatttatttaacagttaccatgtatcaagcactgttctaagtgcttgggagacatcaatgaacaaaaaagacaaaactctcccaaatcttctctgctttcttgaagtttatagtgtaacagagagtgacagctgtacaaataaacataataagcaaataaattaaacagcatctaatatggtggcaaatgccgtaaaaaataagtagaaaggctagaggaattcagggatgccaacagcagaggtaggaggctcagggaaggcgcatctggtcctgggagctgaggggcagggcctgtggggagagtgtcctgccctgggcactcttgtgcttgctcagaaaccagatctcaggcctcaagcttctcggttcagtgcttaacttcccttatctctggctgggcgtggtggctcacgcctgtaatcccagcactttgggaagccaaggcaagtggatcgcaaggtcaggggtttgagatcagcctgaccaacatggtgaaaccccatctctactaaaaatacaaaaattagctgggcatggtggctggtgcctgtaatcccagctactcaggaggctgaggcaggagaattgcttgaacctgggagacggaggttgtagtgagccgagatcacaccactgcactccagcctgggtgatagagcgagactccgtctcaaaaaataataataaaaaataaaaaatcttcccttatctccctctggacattggtaaatgtaccccaccaatttccattcattgtctcgaggagaaaccattgagcatagtagttaagagtatgaatctgggctgggcatggtggctcatgcctgtaatcccagtactttgggaggccaaggcaggtggatcacctgaggtcaggagttcaagaccagcctgaccaacatgatgaaaccccatctctactaaaaatacaaaaaaattagccaggtgtggttgcgggcacctgtaatcccagctactcgggaggctaaggcaggagaattgcttaaacccaggaggcggaggttgcagtaggccaagagcgcgccattgcactgcaccctgggtgacagagcaaaactccgtctcaaaacaaagagtatgaatctgaagttaagactccctgggtttggccgggtgcggtggctcacgcctgtaatctcagcactttgggaggccgaggcagggagatcacctgaggttgggagttcaagaccagcctgaccaacatggagaaaccccgtctctactaaaaatacaaaattagccaggtgtggtggctcatgcctgtaatcccagctactcaggaggctgaggcaggagaattgcttgaacccggaaggcagaagttgcggtgagccaagatcatgccattgcacgccagcctgggcaacaagagtaaaactccatctcaaagaaaaaaaaaaaaagttaaagactccctgggcttgaatttgattcccaaactcacaggctctgggttgtgcagctccccaactggtacaacgaggggataacactgggattattagcgggttggcatcattattattaatatgttttaaaatggtctcactctgattgcccagattggagtgcagtggcctgatctcggctcactgcagcctcgacctcctgggctcaggcgtttctcccacatcagcctcccaagtagctgagactacaggcgcatactaccatacccaacaaattttttccatttttagtggaatggggttttactgtgttgcccaggctggtctcgaactcctgacttcaagtgatcctcctacctttgcctcccaaagtgctgggatgacagacacaagccactgcaccccgccttcaattgatttatatacagcacatagaatagtgtctggcatgtgacaggtgtggtttaagcctgctcaataatatgatttgatgttgatggggtctttcctctctctatttcctcagtatgttaccagggcaaagaacctttagaaaaaaacatttaccggtagaacaaattcacaagcctgagtttaacaagaactttgcagacttttgttcctcaaaagaggccttacaaaacctgaaaacgggtaccttggaaacaaatgaatgtgagctttgaagcctattttaagacggagcctaggaatttgagtgccgcagaacatctacgccttctacaatggtttattagttttccttacttgtaaaggaaatctcttcataggccactgaccagggttacctgatctcttttgatattggtgtatcaagctacaagacattcatcctgaaacctttgaccaggagaggtaacagagcctttttatggtcgaagcacacagacctattggtacaatgcacgtttggagagcacacacagcacaaactcctctgatagctacagacaatttgcaatgggatttgctcggaagaggcaacacaaaatcaacttttctctgcattccagtgggcctgagattctcagcagacctttgaggtagggtgggggaaacaggcccactctttcacaaagcttgacatcagttgaattttgtgtgttcttgttttgtggctcaggctatcttcagccatcttcctgagagaggacaaaagagcagtccctccactggaaaaatgttgttccaggttcactgggaggcaatcctgagtcacagaaacacttagtttggaagaagcccctggattgggtcttagatcagttattgactattttcaaccttgaaataggaaagtaacttcttgttgctcagtttccttgtctataagtagaatgggctgaagtcagtgatctctggggctccctgtcaactttgaggatccagagtcattggtcctttgcaatggctgcagctttaaaggtggctgcaagactgcagtgtctgtcaacaccctctggttggaagatgtgccctgtcaagttcatatgatggaaatttaatccccaatgcaatagtgttgggaggtgggtactaataagagatgatcagatcatgagggctccgccctctcaaatggattaatgtgcttactgggggagtggattagtgaccttgaaaccgccattacaaaattgtaactgagacagtgaaagagctgacctaaccaactccatcttgtttctaacctccaagctgtccttgttctttgctgggcgtaggctgaactaactttgggaggaacttagtttgtagattagccctttcccaaaacaaacctccttcttgcctggggactagactgcctttgtgggactaacaccagccacaagattagaaattatggtttaggagccatgcagctggaggctacaagattccgaccctccctaaactgctcctaagatcagtgcttgagatattctgcagaccctgcacttgatgatcagctggcaccacccagattgataaactggctcatctgatcctgtggcccccacctaggaactgactcagcacaagatgatagcttcgactccctatgatttcatctctgaccaattagcactcctggctcactgaattccccacactcaccaagttgtccttaaaaactctgatccccaaatgcttgaggagactgatttgagtaataagaaagctctggtctcccgcacagctggctctgcatgaattactctttctctattgcaatttccctgtctttataaattggctgtgtctaaacagcagacaaggtgaacccactgggtggttacaacctcaggagtgagtgggcttattatgaaagcgagttaagcagcctttctctctctctctctcttgcatcctcttcctcttccacctcaagctatggagtgacacagtaagaaggcccttgccaggtgcaggtctcccgaccttggatttctcagtctccagaactgtaagaaataaatttcttggccgggcgcggtggctcacgcctgtaatcctaccactttgggaggctgagacaggtggatcacctgtggtcgggaattcatgaccagcctgaccaacatggagaaaccccgtctctactaaaactacaaaattagctgggagtgatggtgcatgcctgtaatcccagctactcaggaggctgaggcaggagaatcgcttgaaaccgggaggcggaggttgcggcgagctgagatcgcgccattgcactccagcctaggcaacaagagcgaaactccgtcccaaaaaaagaaataaaaataaaaataaaaaataaaaataaataaatttctttcctttataaattacccagtccgtgtcattctattacaacagcagggaagagactcagataggagccctggggcatatcttggctctgcaattcaccaactccatggctgagggtcagtcacttccctctgaatctcactgtctctctctaaaacaacaagaataatcaccacctcaccaggttctcataaggaccaaatgacgtataggagggaggtgctagcacttgaagatggggcaatcttttaagaaccctcattgccctcgatattgacacattcagcccttgtccagcacggcccacccattccactgttttgctttctggattcatctctaagtgggtttccccaggtgggaaactcctttaaagacaattagcatacctctgggtgctcccctctacctagaacacggctatgctcataatagctgcttcataatgtttgttaaataatgacaaccaatgaaaagacttgactgattgttcaaagccagatagagagactcaatgtgtgcagacaaactggttacacaggcttgtctcatctggaactatggaaaactatgattaatctggtttttaatttggttacttgaatgaaatagaatatggcaacagacatgtaacaccctgagtttttgcttgggttggtttagccacttttctttggcataaagccaggaagaacaaggaatttaaactagagatttgaaaccaaggaagctttagttagatgcatctttgttggtaaagagggcagaattgagacctgagtttattattataaatagc

SEQ ID NO: 29 - DNA, 2440 bp, Homo sapiens
ctccggtgtgtctgtcggttgcagtgttggaggtcggcgccggcccccgccttccgcgccccccacgggaaggaagcacccccggtattaaaacgaacggggcggaaagaagccctcagtcgccggccgggaggcgagccgatgccgagctgctccacgtccaccatgccgggcatgatctgcaagaacccagacctcgagtttgactcgctacagccctgcttctacccggacgaagatgacttctacttcggcggccccgactcgacccccccgggggaggacatctggaagaagtttgagctgctgcccacgcccccgctgtcgcccagccgtggcttcgcggagcacagctccgagcccccgagctgggtcacggagatgctgcttgagaacgagctgtggggcagcccggccgaggaggacgcgttcggcctggggggactgggtggcctcacccccaacccggtcatcctccaggactgcatgtggagcggcttctccgcccgcgagaagctggagcgcgccgtgagcgagaagctgcagcacggccgcgggccgccaaccgccggttccaccgcccagtccccgggagccggcgccgccagccctgcgggtcgcgggcacggcggggctgcgggagccggccgcgccggggccgccctgcccgccgagctcgcccacccggccgccgagtgcgtggatcccgccgtggtcttcccctttcccgtgaacaagcgcgagccagcgcccgtgcccgcagccccggccagtgccccggcggcgggccctgcggtcgcctcgggggcgggtattgccgccccagccggggccccgggggtcgcccctccgcgcccaggcggccgccagaccagcggcggcgaccacaaggccctcagtacctccggagaggacaccctgagcgattcagatgatgaagatgatgaagaggaagatgaagaggaagaaatcgacgtggtcactgtggagaagcggcgttcctcctccaacaccaaggctgtcaccacattcaccatcactgtgcgtcccaagaacgcagccctgggtcccgggagggctcagtccagcgagctgatcctcaaacgatgccttcccatccaccagcagcacaactatgccgccccctctccctacgtggagagtgaggatgcacccccacagaagaagataaagagcgaggcgtccccacgtccgctcaagagtgtcatccccccaaaggctaagagcttgagcccccgaaactctgactcggaggacagtgagcgtcgcagaaaccacaacatcctggagcgccagcgccgcaacgaccttcggtccagctttctcacgctcagggaccacgtgccggagttggtaaagaatgagaaggccgccaaggtggtcattttgaaaaaggccactgagtatgtccactccctccaggccgaggagcaccagcttttgctggaaaaggaaaaattgcaggcaagacagcagcagttgctaaagaaaattgaacacgctcggacttgctagacgcttctcaaaactggacagtcactgccactttgcacattttgattttttttttaaacaaacattgtgttgacattaagaatgttggtttactttcaaatcggtcccctgtcgagttcggctctgggtgggcagtaggaccaccagtgtggggttctgctgggaccttggagagcctgcatcccaggatgctgggtggccctgcagcctcctccacctcacctccatgacagcgctaaacgttggtgacggttgggagcctctggggctgttgaagtcaccttgtgtgttccaagtttccaaacaacagaaagtcattccttctttttaaaatggtgcttaagttccagcagatgccacataaggggtttgccatttgatacccctggggaacatttctgtaaataccattgacacatccgccttttgtatacatcctgggtaatgagaggtggcttttgcggccagtattagactggaagttcatacctaagtactgtaataatacctcaatgtttgaggagcatgttttgtatacaaatatattgttaatctctgttatgtactgtactaattcttacactgcctgtatactttagtatgacgctgatacataactaaatttgatacttatattttcgtatgaaaatgagttgtgaaagttttgagtagatattactttatcactttttgaactaagaaacttttgtaaagaaatttactatatatatatgcctttttcctagcctgtttcttcctgttaatgtatttgttcatgtttggtgcatagaactgggtaaatgcaaagttctgtgtttaatttcttcaaaatgtatatatttagtgctgcatcttatagcactttgaaatacctcatgtttatgaaaataaatagcttaaaatt

SEQ ID NO: 30 - DNA, 1371 bp, Homo sapiens
atgccgggcatgatctgcaagaacccagacctcgagtttgactcgctacagccctgcttctacccggacgaagatgacttctacttcggcggccccgactcgacccccccgggggaggacatctggaagaagtttgagctgctgcccacgcccccgctgtcgcccagccgtggcttcgcggagcacagctccgagcccccgagctgggtcacggagatgctgcttgagaacgagctgtggggcagcccggccgaggaggacgcgttcggcctggggggactgggtggcctcacccccaacccggtcatcctccaggactgcatgtggagcggcttctccgcccgcgagaagctggagcgcgccgtgagcgagaagctgcagcacggccgcgggccgccaaccgccggttccaccgcccagtccccgggagccggcgccgccagccctgcgggtcgcgggcacggcggggctgcgggagccggccgcgccggggccgccctgcccgccgagctcgcccacccggccgccgagtgcgtggatcccgccgtggtcttcccctttcccgtgaacaagcgcgagccagcgcccgtgcccgcagccccggccagtgccccggcggcgggccctgcggtcgcctcgggggcgggtattgccgccccagccggggccccgggggtcgcccctccgcgcccaggcggccgccagaccagcggcggcgaccacaaggccctcagtacctccggagaggacaccctgagcgattcagatgatgaagatgatgaagaggaagatgaagaggaagaaatcgacgtggtcactgtggagaagcggcgttcctcctccaacaccaaggctgtcaccacattcaccatcactgtgcgtcccaagaacgcagccctgggtcccgggagggctcagtccagcgagctgatcctcaaacgatgccttcccatccaccagcagcacaactatgccgccccctctccctacgtggagagtgaggatgcacccccacagaagaagataaagagcgaggcgtccccacgtccgctcaagagtgtcgtccccccaaaggctaagagcttgagcccccgaaactctgactcggaggacagtgagcgtcgcagaaaccacaacatcctggagcgccagcgccgcaacgaccttcggtccagctttctcacgctcagggaccacgtgccggagttggtaaagaatgagaaggccgccaaggtggtcattttgaaaaaggccactgagtatgtccactccctccaggccgaggagcaccagcttttgctggaaaaggaaaaattgcaggcaagacagcagcagttgctaaagaaaattgaacacgctcggacttgctag

SEQ ID NO: 31 - DNA, 47098 bp, Mus musculus
  misc_feature (1)..(2265): "n" at positions 1 to 2265 can be any base
  misc_feature (3596)..(3722): "n" at positions 3596 to 3722 can be any base
  misc_feature (8341)..(8429): "n" at positions 8341 to 8429 can be any base
  misc_feature (11699)..(12095): "n" at positions 11699 to 12095 can be any base
  misc_feature (15548)..(15567): "n" at positions 15548 to 15567 can be any base
  misc_feature (28136)..(29283): "n" at positions 28136 to 29283 can be any base
  misc_feature (32385)..(32404): "n" at positions 32385 to 32404 can be any base
  misc_feature (40354)..(40373): "n" at positions 40354 to 40373 can be any base
  misc_feature (43523)..(43982): "n" at positions 43523 to 43982 can be any base
nnnnnnnnnnnnnnnnnnnnnnnnnnnnnnnnnnnnnnnnnnnnnnnnnnnnnnnnnnnnnnnnnnnnnnnnnnnnnnnnnnnnnnnnnnnnnnnnnnnnnnnnnnnnnnnnnnnnnnnnnnnnnnnnnnnnnnnnnnnnnnnnnnnnnnnnnnnnnnnnnnnnnnnnnnnnnnnnnnnnnnnnnnnnnnnnnnnnnnnnnnnnnnnnnnnnnnnnnnnnnnnnnnnnnnnnnnnnnnnnnnnnnnnnnnnnnnnnnnnnnnnnnnnnnnnnnnnnnnnnnnnnnnnnnnnnnnnnnnnnnnnnnnnnnnnnnnnnnnnnnnnnnnnnnnnnnnnnnnnnnnnnnnnnnnnnnnnnnnnnnnnnnnnnnnnnnnnnnnnnnnnnnnnnnnnnnnnnnnnnnnnnnnnnnnnnnnnnnnnnnnnnnnnnnnnnnnnnnnnnnnnnnnnnnnnnnnnnnnnnnnnnnnnnnnnnnnnnnnnnnnnnnnnnnnnnnnnnnnnnnnnnnnnnnnnnnnnnnnnnnnnnnnnnnnnnnnnnnnnnnnnnnnnnnnnnnnnnnnnnnnnnnnnnnnnnnnnnnnnnnnnnnnnnnnnnnnnnnnnnnnnnnnnnnnnnnnnnnnnnnnnnnnnnnnnnnnnnnnnnnnnnnnnnnnnnnnnnnnnnnnnnnnnnnnnnnnnnnnnnnnnnnnnnnnnnnnnnnnnnnnnnnnnnnnnnnnnnnnnnnnnnnnnnnnnnnnnnnnnnnnnnnnnnnnnnnnnnnnnnnnnnnnnnnnnnnnnnnnnnnnnnnnnnnnnnnnnnnnnnnnnnnnnnnnnnnnnnnnnnnnnnnnnnnnnnnnnnnnnnnnnnnnnnnnnnnnnnnnnnnnnnnnnnnnnnnnnnnnnnnnnnnnnnnnnnnnnnnnnnnnnnnnnnnnnnnnnnnnnnnnnnnnnnnnnnnnnnnnnnnnnnnnnnnnnnnnnnnnnnnnnnnnnnnnnnnnnnnnnnnnnnnnnnnnnnnnnnnnnnnnnnnnnnnnnnnnnnnnnnnnnnnnnnnnnnnnnnnnnnnnnnnnnnnnnnnnnnnnnnnnnnnnnnnnnnnnnnnnnnnnnnnnnnnnnnnnnnnnnnnnnnnnnnnnnnnnnnnnnnnnnnnnnnnnnnnnnnnnnnnnnnnnnnnnnnnnnnnnnnnnnnnnnnnnnnnnnnnnnnnnnnnnnnnnnnnnnnnnnnnnnnnnnnnnnnnnnnnnnnnnnnnnnnnnnnnnnnnnnnnnnnnnnnnnnnnnnnnnnnnnnnnnnnnnnnnnnnnnnnnnnnnnnnnnnnnnnnnnnnnnnnnnnnnnnnnnnnnnnnnnnnnnnnnnnnnnnnnnnnnnnnnnnnnnnnnnnnnnnnnnnnnnnnnnnnnnnnnnnnnnnnnnnnnnnnnnnnnnnnnnnnnnnnnnnnnnnnnnnnnnnnnnnnnnnnnnnnnnnnnnnnnnnnnnnnnnnnnnnnnnnnnnnnnnnnnnnnnnnnnnnnnnnnnnnnnnnnnnnnnnnnnnnnnnnnnnnnnnnnnnnnnnnnnnnnnnnnnnnnnnnnnnnnnnnnnnnnnnnnnnnnnnnnnnnnnnnnnnnnnnnnnnnnnnnnnnnnnnnnnnnnnnnnnnnnnnnnnnnnnnnnnnnnnnnnnnnnnnnnnnnnnnnnnnnnnnnnnnnnnnnnnnnnnnnnnnnnnnnnnnnnnnnnnnnnnnnnnnnnnnnnnnnnnnnnnnnnnnnnnnnnnnnnnnnnnnnnnnnnnnnnnnnnnnnnnnnnnnnnnnnnnnnnnnnnnnnnnnnnnnnnnnnnnnnnnnnnnnnnnnnnnnnnnnnnnnnnnnnnnnnnnnnnnnnnnnnnnnnnnnnnnnnnnnnnnnnnnnnnnnnnnnnnnnnnnnnnnnnnnnnnnnnnnnnnnnnnnnnnnnnnnnnnnnnnnnnnnnnnnnnnnnnnnnnnnnnnnnnnnnnnnnnnnnnnnnnnnnnnnnnnnnnnnnnnnnnnnnnnnnnnnnnnnnnnnnnnnnnnnnnnnnnnnnnnnnnnnnnnnnnnnnnnnnnnnnnnnnnnnnnnnnnnnnnnnnnnnnnnnnnnnnnnnnnnnnnnnnnnnnnnnnnnnnnnnnnnnnnnnnnnnnnnnnnnnnnnnnnnnnnnnnnnnnnnnnnnnnnnnnnnnnnnnnnnnnnnnnnnnnnnnnnnnnnnnnnnnnnnnnnnnnnnnnnnnnnnnnnnnnnnnnnnnnnnnnnnnnnnnnnnnnnnnnnnnnnnnnnnnnnnnnnnnnnnnnnnnnnnnnnnntgtccaaacctctttgtttgatggcatctgtttacagtagttacactttaatatcaacctgtttcctcctcctccttctcctccttctcctcctcctcctcggtgacctccttctcctcccctttctccggagaaacttcgccccggcggtgcggagcgccgctgcgcagccgggggagggacgcaggcaaggccggagggcagcgggaggcggcaaccggttgcggtcccccggggctcttggcggagccccggcccgccttcgccatggcccggagaccccgaacacaggtaatggggaggctgagagggcggcctcgggctagggcgcgcggggatccaggcatcccggagcaggtgggaatgccttccctgttggtttgcggggctgtcagccagtggcagaagacactcgggagaaggatgaatggaaaactctgcgagaagcgcacgggtatagtgggaagcatgccctgaggctcttttttattttatttccctttttctttcttttttctttttctttttgcaagttgctcggggattcgtttctctttggggggtggggtggggggggggctcggcactcttcagccgaggactgaacggttccatcagacccgaggagcccaccaggtgtttggcttgatgccccgagtgtcggcgagggagtcgcagcctaattgctgcatgcattgaggtgtgtttgcacttgaagagcatatggcagatatagggaaaggccgggttgtttagtagctgcaggtagttcatttaaatttcattcattcattatggaggcgagagaggtgtcagctgacaggcaggcagctgcaaagattttagggggacaaaatgggtttgcagattgttttaaacccagccgtttgaagattcttgtacttgttatggaagaagcttttgcaaacactgcacgcgcccgcgtcgcacatgtcaccgcaccggccgagatgatgcgtgcactctctttccattttggccccaccttcgggaagagggatcctctcggaactgtcagttgctggcgctcaagtccggcccgactcggggtttcccgaggacacgccggggctcccagagagcaacagatgcggggcttagctcggtggcggtcgccactcggcgcaaagtgctggaggcaggcggcacccaaggcagctgcagtgcaccccgggcgatgtcgccgctcttctcctgggccgcgcacacgtggaagcagctgaggtcgccgctgctcccagcactctgctccagctgcttttggtggcccgcctctggcaaagccaccgaccgaccgaccctaaggaagnnnnnnnnnnnnnnnnnnnnnnnnnnnnnnnnnnnnnnnnnnnnnnnnnnnnnnnnnnnnnnnnnnnnnnnnnnnnnnnnnnnnnnnnnnnnnnnnnnnnnnnnnnnnnnnnnnnnnnnnnnnnnnnggtgaattggggagaccttgaatcttggctcccagtgcctggccccgggcctgccgcgccagcctaagtgccaccctttaagaggtttcgcctttcgcttttgggacctaaaccgcccgcacccaggtcacctgttctgcagaaagctgaaacctgcagcaggaggagggagttaggaaggggtgctcccaggaggtgcggcccaagctggccgccccaaggttcagtcggggcgtggccgcgcaggttccctggggctcgcaggtagcccggagcggaggcggcagggaggggcgggagccttgaacttgactcagggggaagagaaacccggctgcgggctcggagccgtttcttgcagggctagcgtcaactcggcagggattattaaccaggtcagcgaaatgactctgaaccccttttctagaatcacgtagcggccacaggcacttcctccggtccccctccctcttcccaaccccccagtgttctttttcgtttctttgcacggtttgtttccttgatagaatgtaacattcatagttgtactcttgtaaccacaccggctctcgcaggtggagcagtcgagagcatctagcttgaaatcagcctttgaaagtcctttgactgttgggtctgagatcttgtcggagcagataaaggaaaagttatttcgggtcctttgtcgaaattaatcatgctaccgaggcgaccaggtcattttagagcaaggaaatggcatgcagagctcagaggcaagccccttgtcaaagctgacagaatcctggactcgcccagctccctctcacagcctttcaagatctgcaagagtcacacgccacatttcaccccaagactttggctttgcacatctgcccagggcttgctttttaagaggcacagaagacagtagaggcatgcctctggaaagtaccttaaacatagaatcccctccctagtgtgtaagatgggatccacgagagggaggggggtttgtccaaatcaaacgactaggtgcgtggacaactagggctgttagaactttgctcctagaccccctggtcctgtgtgatcccagttctccctcacctgactattgactgccccctgtgggcgactgagggtgatgcttgtttttagattaagttttgaccagaggaaaatttgcttggaaaatgtccacaatgctgaaagtgacacctccagatctggacaagcctaacaggcgaatctaatgagagttaaatcggtggctccactctcaggtcccgttggctttcttggtatccctgatacttcacaaagggatgtttcatcctgagagctttccaagttccttaacaaaagggaattgtcacccaaagaggctggtttgcagttccggcctcataactctttttcccttcacaacaccatgttttataaaatcgtaattattactgcacagaagttatttgccgcctcctgtttactgttggaaataaaactgcttttggttgaaaggatttacactaagtggaaaaatatattgcagatcatgaataaagtttcctgggattttttttttctttttggtggtgttattttaacgttagatcacatcctgtcaccatgaagcctgagccatcagtttgaggctcagaataatattttagatgatgaaaatcccaatgtttggtaaacactttggcttaacttttagggggccagaaatatacatttagtgagttcgtctggaaagacaaatcctattatgaatgtaagtttgccttttaaaaataattttcattatgatgttgtcttatatcatcttgctggttcgataggtttttcagttttacaacagtgagtttgttaagtggagttgttaagtgtaaaattcttcacattttaagtcttatagagtgataacaaaaactaaactgcagaattactctgttctgtatatgattgatgagtttggagttccttcagctgccatcaaaattcacactgttactcaacccggtaaaagaaaaggctgttttgaaaacagtctttttttttttttaacctgtagatttcatctgggggaaccccttggtttttaattagatacattgtaaggtattttagactccatgcactcagagacagagaaaacaagagtaagtaggagtctgaatagccagtgccctggccatgtgcttagttactcaggagacagcactgtaaacacaagcacagcttaggtagagtagacacgggcgggcagcgtttgaatgatttgcaatttatgttaatcacaaaacagtttgagggatgtctcctttaccaggtcttgaaaatcttcctgatttttttttcccctagtgccatggtctttaagaggtgatcacaactatactttggaatgtattctgtcttggtttttttattttatcagactaccagtactcttgagacacacttgattggtctgttgtgttcagaaactatttaaatgatttgctatttgctatatgccagagttggagtgtgtatttatagcaaggacatgggctcttgttcttctcattgtccttaacattgacttttaaactcaagcatcaattggttgggagtttgccagatgtgtaacttgtcactgatctaacagtaacaggttcaaacatgcagagcaatagaaaaatgccagggctcttggtgtctctgtggatactagtaacagcaaaaccagtttacaaacactacagcaccagaatgcagaaaacctcattgcgcaactgtgcaaggttttgtttctgtagacttttaacaagcttgctgaagcgtttctgtctgagtttcataatccaatagtttagatcctctgcctttggcccatgtgtgtccattcttatttctgcagcatctacagtagcgatgaagatgatgaagacattgagatgtgtgaccatgactacgatgggctgctgcccaaatctggaaagcgtcacttggggaaaactaggtggacaagggaagaggtaactagtcattttatcaaaacgtagggaaactctgtagagtctgtgattggtgaaaactgaaatctcggctaagctacatgtgcccttctgaagactcttgaagaggttatcttggcatgctgtacagaatgctcgtgttcttctctcccagtgtttattctgctttctgttcccaacctgtttattgttccttaaatgctttctcctttttcctttccactttgcctgtctggttctcattctggaacctcaccattccctacacattgccttttctgtgaaactgttactggccaccatctttaaggctggatgcaccctcccgtggtcccaacccccctgggcacatgcttggctttattggtgttgttacatatttgtctttcccaacacactgccaattccttgagggttaggactaaagtatctcttcatctttgtgttcctcaaactcaaaattacttgctaaaatgtaggatagtaatgaatgttctctggctaaagtgatgctttgctattttctaagctaaagtagccgtagaatttattgtgttgtaatatgctcagtgaacattcgttacacatgatagtcacatgacctatgtatgtgaaagattattctgaagagatccagtaataggagaagatatgcccacttctttctagagcaaaaatcatcaaagtatgaagaaaggtttcttccttctctactgaactgtgaccttgattgcatgctaaaatcaaagctcctgagaacaggtggaagcactcccagggaggcacttagggaatgcacgttctgtctgtctgtcctgctcaggcccgtggatgctcccttggagtgtgaacttctgttgttaaccatggattcccagactctgtctgttttgtcattatgtgtgaatgcagaaacctatgaagactgtgtttacaaaggtgtgcatgagctagcatgtagatgagcgtatgtgctgatggagccagcttgggaatgtctagctagtgtcttctgtgttctcatccataaactctgaacatattgatgcagatccttaatggctttactgcatgaagtacaccttcaagtcaaatgtgtcaaatatcttcttctttgcatatggagaaggttgaaccaatgggaagctgtctcatccatggtcttatctttctcagggttgaacggtgactaagtttaacgttggaattcattttcccccatttagtaagagtgttaacagttaccatctattaaacactaacacatgcccggcttcactgctttacataatggtattgtgtaatctccagataacaatgttgatactaccattcctatcttatagatgacaatagaaatctgtttatataactactcaacagctgtgtcaaagtaaaagctttagtgtgcctgtgagtaaatgtatgcccagaccagtatattacattaatattggctttatttgagtggttttgaaagctcccccccacccccgatcatgaggttggttccttttttcattaaacttagacagagctgttcagtaaacaagtgatgcctaggattgtctttacacaccttaggatgagaagctgaagaagctggtggannnnnnnnnnnnnnnnnnnnnnnnnnnnnnnnnnnnnnnnnnnnnnnnnnnnnnnnnnnnnnnnnnnnnnnnnnnnnnnnnnnnnnnnntctttcgaatggaaaaatctcatctggatttaagaaattattggatagtttactaaaatactatgtatttgctcatatagagttaagaggaagagagccatccgtaatttttatatctgactacacaacatataattgaggtttctagagttactatccagagattttgattttttttttcaacaattgcttcttgttttgttttaaaataccctgatagtgtaagttaacattctgatgggttgttccaggataaaattttaaacttggtattccctccaagttagcttctaaattctcctattctcatcaacagccacatttttggtgtgtgggtttaaaaatctagagcgtcttttgtcttatagcctcccaggtccatctcaatgatgagtcgggagcgcagaatttctttacagtccttctcttccacttctttcctatggtctggtcacagggcagctgccctgccctctctatcatagtggcttccttcttggcttcaccatcttggcttcaccacgtgtattctttgagcttaccaccagttccaaacactgctagctgagggagcctcctaaacggcaactactcctaactactctgcttgcctagggtgtctgagtccctaggtttggtctcctgcaccaataaaatcaacaaataagcaaacaaacccccagcagtggtgacataggttctcacatggcaagtgggctaccttgacctggcatccagtttctctcctatctggtctcaacttacagtcccactgccctctccctcctctacccgctctgtttcctgcttcctccccacaagcaggtttggctgtgttcatttctgctttttctcctctgggcttttcttcctgctgatttcacccccaccccccacccccagcatgttctctcttgcttctccagttaaaagtactgagcaccctccaaaggccggatcatgagctctcgaatgcctctgaaggaagcagaacctcttctttaagagtccttttctcctcaccccaacagcacgtggcttaggtctcatcttacagataaagtcagcctttggtgtaatcagttacatgtccatctttcttcttctaagattatgtctaagaaagtgagaaagttttattgttttcattcagtctaatacaagtgtctgtggtcctgaacacacagagaggttgaatgggaggcacttcagttccttaggatggatttttattgaggcgtggccatgtgggatcactaatgcatcttcagccacagaggtacaaaccacagactgaggttaacgataagtcacgttggcatctatgtgtgtactgtgatgttccttctatgcacatggcagaccattaccttcaggctccaatcttagatgcaacttggatacattctctagtccgtgagcagtgtgggatggataggtgggctctctgtacaggcttctaaatgttcttagatgttttcactatgtatcatccacatgtgatccctattgaacaaagccttcatgtgttcttcacgccttatcatcccaacgctgtgtactttgtctagaaccggacagatgtgcagtgccaacaccggtggcagaaagtgctgaaccctgaactcatcaaaggtccctggaccaaagaagaagatcagagagtaagttctgtccccatagatgtgtgacttgcagttaagaatattgctaaaacaggtttctcaccccaaggaagcaatttaaatcttcaaacaggaagtaaagggctggctcctgcatgtccagtggatgaaagcagattatttcaagatctgaagatcttgtaacattgaggcttgatgacgctgactctttccgtaacattaaaacacagattatttttctgttcatctgaaggtcatagagcttgtccagaaatatggtccgaagcgttggtctgttattgccaagcacttaaaagggagaattggaaagcagtgtcgggagaggtggcacaaccatttgaatccagaagttaagaaaacctcctggacagaagaggaggacagaatcatttaccaggcacacaagcgtctggggaacagatgggcagagatcgcaaagctgctgcccggacggtaagacttgggcaacaaatatattgattgggaagaaccaagggatggtcgctaaacattctctgtgtgtgaatgaattacattcgagcaattataagcattttgtcagataaaccagaaacaccaacttttaggagcgggcaagagcttggagtttgttccgttggacaaggctagtgacacctgggtggtgagccccagccaaacctttcggctttcctccactgttgctcctccatttgtgaaatagctgatttccatgagttaacgttaggatcaagtgaaatgaatgtcaggtattctgtaagctaaagcacctacctgcctaagaagggagtgcagacacagattgctctcgggctgaggccatccagccagttcagccattactggtcactcctccactttagcaatttccgttttcctaacacctgcattcacctcatttcccatttgattactgggtgtttttttggttttgtttttctgagactaaaaaaagcctgtatgtctagagttgtcacgacaacttcaggttttttaactaatctcagtgttatgtcttatttttaccaaacaaggaggggaaatgacgcctttgtataggataattatggaaactcacctttgacccactgtctacacatatatacattgattttttttttttagctattttgagaaatactttcactgtaaattttaaaataaacaatattaaaagtattcttattcttgagctttttgaccccaaagtggggaaaggattgtttcaggatggcttatctagtatttcctagtcttgcatcaatggggtagctccctcatgccttgagaactttaagaagccatggatctggtcaaaggaggcctttcctcccatgtggcctcagaggatatactgttgacttttctaaagactaaaggggcaactgaacttcctcttttttaaaaacacacatttccccacccccatggaaatagtaaaaatgtttttacttaatttttctttcttttccttttctttttcttttttatttttttagctaagaaacttcctgaaaatgggaagagtttagtaaaagcaccttgcagtttgaaactatactagggggttgaatgtggtagcacatgcctgtaatcccagcannnnnnnnnnnnnnnnnnnnnnnnnnnnnnnnnnnnnnnnnnnnnnnnnnnnnnnnnnnnnnnnnnnnnnnnnnnnnnnnnnnnnnnnnnnnnnnnnnnnnnnnnnnnnnnnnnnnnnnnnnnnnnnnnnnnnnnnnnnnnnnnnnnnnnnnnnnnnnnnnnnnnnnnnnnnnnnnnnnnnnnnnnnnnnnnnnnnnnnnnnnnnnnnnnnnnnnnnnnnnnnnnnnnnnnnnnnnnnnnnnnnnnnnnnnnnnnnnnnnnnnnnnnnnnnnnnnnnnnnnnnnnnnnnnnnnnnnnnnnnnnnnnnnnnnnnnnnnnnnnnnnnnnnnnnnnnnnnnnnnnnnnnnnnnnnnnnnnnnnnnnnnnnnnnnnnnnnnnnnnnnnnnnnnnnnnnnnnctaagccacaatggaagggctttataacagtggggactctaagttctattaaagtccagtggcacgtgaattctgaggacctacgcctttatcaagaaatcaaaatgctaaaataaattttgcaggaaacttgatacatcccaaatcaggtgagcaagagaagagtggcttttcagttaggcgacaaggtagaaaagatgaagacaatttaaaagagggaaagaaaagttagtggaaccacagcaattaaaatgagaaaataaaagtggaaccacagaaattaaagtattttttgtttgttttttaagaaacagttttctgttgattgactgtaatctgagttaaaagttttataaagtttgtatatggtacatttctacacaggactgataatgctatcaagaaccactggaattccaccatgcgtcgcaaggtggaacaggaaggctacctgcaggagccttccaaagccagccagacgccagtggccacgagcttccagaagaacaatcatttgatggggtttgggcatgcctcacctccatctcagctctctccaagtggccagtcctccgtcaacagcgaatatccctattaccacatcgccgaagcacaaaacgtaagccactcccgagaatgtagagggagaagagaggtggttatatcacctggggtcataaaaatactttacagttgtgtgctttgcatagatgttgtacaagcatggtcacagatggagatgtgtcgatggccctcagctagacccactgtgtgaggtaggagatggccctcagctagacccactgtgtgaggtaggagatggccctcagctagacccactgtgtgaggtaggagatggccctcagctagacccactgtgtgaggtaggagatggccctcagctagacccactgtgtgaggtaggagatggccctcagctagacccactgtgtgaggtaggagatggccctcagctagacccactgtgtgaggtaggagaagatacacttggcttccgtttctggaaacaagaatgaaaaggaatttgtccatcacattgaagtagtgctgaatagaaccaaagtcgtctgattctagttttctgctccaaacctgatttaaagatcgtgttttaatgtaaatgtacttgtatattgctaaatcttaagagtaggtgaacatagatagatgcatagtctgttagctttcttttccaaaatgaaaaattgatgtaatattacatttaaggtcataaagaggagatagctaacctctgaaacatgaaaggagattataagttcaattctggcaatgatctgaagaaaatgaattgatttatatatccaggaaatgtttactttcttactcagagtcaagggctgtactgtgatattaatttggtgatgtgctccttcatcctcgcttgggttggtatcatttcttcctcatttctagacattcatatctagcgaaagaaatcgcttacagtacatgggaacaaagtctaaagaggagaatatcaagaaatgcttatcatcgagctgatgctaaaaaatgacaaaactcacccaagaatcacaaagaccatatgcaaatgttatgtaaaacatatgcatgtgtagttctcacgtggctctatctgtttcttagatttgactacagaatttccagaaaggtctccagtgaatgaattatcataaaagtttctgtgctttttattaaaaggaacattattctaagaaaagtacccctagtgtacttttttcacgcatcccacgaacactttcccgttgttcctctctccaactgagggatgttttctgttgggataggcagactctttgggcctctctccctgtttcttgaactagttagccatttttaagtatctggctaactttcaagttagagaagtttttgtttttgttttattttaatcattccatgaattttatcaaccaagtactttctcccttggtcacagagcaaaattttagagagctgaatcctcctggcgcacttgttaagtaggaatgacttagtctttgttttcttttcctggtctagatctccagtcacgttccctatcctgtcgcattgcatgttaatatagtcaacgtccctcagccggctgcggcagccatccaggtgagatcatctgacgggcaaactccttagctgagcaaggcactgcttttaaagaatactttctttctacacacacacataccatgtaatagaaaagctaacagcattgccaacctactttgggctagcctttatttacccttggtggcttctggaattttctgatgcatccatgagcaggtgctctagcctctgccttaccccttgttgccttaagtcccgtatcactttgagcagatagtggtgaattctgtggggtgattccacatggaagttctctgggctgtgtaaggtacctctccctcagaccttgtctctccctgcttcacttgaaactctagagacactataacgacgaagaccctgagaaggaaaagcgaataaaggagctggagttgctcctgatgtcaacagagaacgagctgaagggacagcaggcattaccagtaagactgtgaccttgggatgggtggcttcgctcagtgctcttctctctcctcctctgtctccttttctaaagactgtctcatccaagttctgtgtgtccgctaacaatgctcaaacaacagaaactgctactgatgactgataaaagtctgttagtctcagaatgtgcattgagtgactggaagtcactgttttagaataggaccacagtacccacttgtgactgtcaggatctccattgtaacaaagcacaaagctttgcctgcttgtttgattcttttactgttatccttttaacctggatttacatttcttacaatctcaaattccatttgaagtgtatttattatatacatgttttttaaaagggatctatacataagccactctttaaatgtttgctatcttttatttgcatgtatgaaagctctctgatcagtagtgataaggtgtttgtgtaaacacatatatgttcccatagatatgtgtatatatgcgtgcagatttctgtgcatacatgtgtccaggccagaggttgacaccaagtgtcttttttgataggtttccacattaaaaaatgtagttgtatgactaccactcataaggtactataagatatatgttgaaataaactctttcctctcaaagaaaaaaaaaacactagttgtaattgtgtatgcatgtgtacatgtgcttgtgtgcactcttggaggtaagaggacaccgttccagaatcagttctttccttctaccgtgggctctggggatcaaactcctttttaactgcctagtcatcttgctggccatccagcttatattttgaaatagggtctcatgaaagctggagtttgcccattnnnnnnnnnnnnnnnnnnnnccagtgagctcgagggtgtacctgtctctccctctccagtgctggggttacacaatggagctgctgtgggtgcgtggagatcaaatccaggttcttacgattgcatggcagtctcccttcagagtgagacaaccccctcccctttttttttgtgctgacaattgagcctagagtctcagacatgctacattgcacacacacacacacacacacacacacacacacacaggatccagctctagctcttgtatagaccgtttctgaatccttgaatgggcagctcacggaaaaagcaaactttggagttttggtagtttagccaagaagtgagtatgtgaaaggtgatacccactagcgattcttcaggtgaaatgttctttgttgttgttattaaataataaaataatgtacttgtgctagttcaaccacttttgaactttagttactattttgcaatttcttctcttgcatggacatgctgtaaggggacttctgttaacttgatctactttcccaaccacatatactctgcagctctagcttgcatcagtgcaacctatagccaaaaaaaaaaaaaaaaaaaaaaaaaaaaaaaagaaaagaatagaagcaacaggatatgtacagatagaagcaattctaacccttgaatgctttcaagggcttaacatgcaaataggaccattcttaagtcatagcaatggggaactgtttttaaattaaactccaatggaattctaagacatctaagacttgtattttgtagcagtcccaaggtttaacatttgactaaaatcttagcaactgaagcaatcctctaggtataaattggagagctattgcaaagctgtcaaaaaggaaacatcttgacaactgtctggcaggcttgagttttggatgaagcaaccactttttatcttgcctccaacagcatctgataccttgtgcaacatagttgctaagtttcttcttcctttcttctctccatccttatttctacacacccccttccccagacacagaaccacacttgcagctaccccgggtggcacagcacctccattgtggaccagaccagacctcatggggatagtgcacctgtttcctgtttgggagaacaccatgccaccccatctctgcctgcagatcccggctccctacctgaagaaagtgcctcaccagcaaggtgcatgatcgtccaccagggcaccattctggacaatgttaagaacctcttagaatttgcagaaacactccagtttatagattctgtaagtagaattgctaaggcacgttgatgtttctggaagaggaattgagaattggtatagcataaatcattgccattttctatagcaaatacggtttggtcctacattcatgtaaagtgaaagacttagcttttacgattccacttctctcagtggtcttgattttgtaggctacccacccaaaattgtttgccttccaggtgtgaattaatgaagttctgacttaccacaaagggctcagaatgagagctgtgtctgaactattttaacaaatttcttatatattttgcttacttctttgtgattctctagaaaatttctttgttgttttggttttgcttgctttttgttttgttttgtctgttttgggacagcacatttggacttacgtttcctcgtaaccttaagctttcagttcaagggtggggcatatagatctctctacagcatactgtaaattgattgacaatcatagtaacaccaaaataaaccatcttgaaccatcttgagtgaaacaaatttgagttcagcagtcactcagttcattttcttggtctcctaattggttaaaaagcacttattcccttcacacgggacagggccagctattgccataatgtatcatctagaaatgttttctgtttgctttaaattgcatgcaaaagagagtgcctgagctctccacagcagatgtgcaagacaacccatgcaccgctgtaatccctgagctagaaagcaggcaggcaggcaggcaggcccagcgttttcgtccattgctctttcagtgctgtgtttgggtgatggtggcgctgtcacttgcataccatctcagaagctctgtgcctcccacgttgtttcaggattcttcgtggtgtgatctcagcagttttgaattctctgaagaagcggcagctttttcacctagccagcagcccacaggcaaagccttccagcttcagcaaagagagggccatgggactagatctgcaggagagcctagcctgagggtgaccaggcgagtgctgagcgaggcatccctcggcccagactcaccccaagcgaggcacagcaaggttccgctggtcgtcctacgaaaaaggcggggccaggccagccccctagccgctggagagcctagcccctccctctttgctgacgtcatcagctcaactctcaagcgttcccctgtcaaaagcctacccttctctccctcgcaggtagagcacaatttctgcacagctgttactaattttcagcatacacccgagccttaataattagaaactaatctaaatttgaacaaatgactaatgactgccgtcctggcagatttaattccgcgttcaatctcactggggtagaggtggctagcttcctggcatttgggctgacacactggtgattttgtcgcatctctttctctcgaagtcttggtgttttggaaaatggacagaaagttgcatgggatgtgtttccatttcccttttcactacatttccctttttccgtccctcccctcttctcccttgtcatccttgcctcttcacattttaacacgatgtctgcctctttgttcattgactactaagtgatttactgaccctggggaggagggaaccaaattatgattacataacatttggattacaactagaaaatgaaccactatgccccttttctaagtgaggatgtttactgagatgatgaaaaagagatgcttctgcaaaataatttaacattttcaacactgggtcttttaaattctgctatgggattttgctaaggtaccgttttccaaagaatacccttacttcatatagtgttcttaaggtatataacactataatgcttagcagagccacgtgctttccaaattataattaagagacaatttggctccttaaatttttttcccaattatatccgttgaagatttggtactttgttttactttacttcattttagtagtagtagtaatagtagtagtagtagtagtagtagtagtagtagtattgtggttcttagaatctaacctggagcctcatgtgtgctagggaagtgccctaccactgagctatacatatttctggacttgtttttaaaagaactttaagtatagacaaatgatccccccattccccaaaacaattggtctccaccccccacccacccccatattttcctaaaccgtgttttgtgaaatcatttctgcaagatagatgtctcagggaaaatgatctaggtagacataaacgtttgggaaatgctaactcgggctttaaacggcttctttaccagagggtccttcaggcttggcgtttgtttggattttttattctttaatttttcagaatgcagacagtcttttattctgctcagcttgccttatgctcctgagttcaagaggcgccctggcttctgagtgactgactgcaggcagcagccactgctcctggcttccctgagagcgttgagtgtgctcatcagtctacccaagagataagatccattgcctttcccaaacctgtgttaccctgggagcgtcaggatgctgagagacaaaccttcttactggataatttcccacatcacgcaaaccttacacaacaacagtctgagttattagaccattaaaccgagaaaaccaaatatgaaagaaaaagaagataacctttttaatgttgatcaagagcacatatcattctcttaagtgacaaatgtcatttacagagaagattttctttgaattttgcaaggtttgaagctttgaccctttagatgttctttcttataaatctctgaaccttgcctaatcaggtggaataaatcaatatccttgccaacactgaaagattgttaacgttgtcgtagttggggttgtgagtcagtagaggacacttgcctgccatctgggtttggcttcaaactgcatgatcacagactcattatttaatcagtttttctttctttctttctctctctctctctctctctctctctctctctctctctctctctcccttccttcctccctctctcccccctccctccctccttccctcccttcctttcttctctcccttcctttctttcttccatgtttagttcttgaacacttccagcaaccatgaaagctcgggcttagatgcacctaccttaccctccactcctctcattggtcacaaactgacaccatgtcgagaccagactgtgaaaacccagaaggaaaattccatgtaagtcttagttcaataagaaaaatgtttattttatttatttatattaattaaaatgtctgacccccccttgtatgtatataatgcattcactgtatgtatcctatgcattctcataatggatacatcccaagtaagttacaaccaaccagggaagaaagtagagaataattaccttctgtagtacattctgatgtcttatgtgcatgcacagggagtttctgtaccattccccaccccccaccggccaggtttttctttccactgtttttcaatatccttactaaaaacaaacaaaagagactgaagcattcagaataaaattgagaatggttcatagtttatattttttaatcttattttttctttttgtaacaaatacattaggatctttttgcatactcacaggaatgaaaatgtatgtatgtatgcatgtatgtatgtatatatgtatttcaaaagccaggggtgattaagtaattgaaaagaaatacattcttattacttccaaataaaaacaaagttttagacatagcgtgttttggccccgtttgagggagcaggtgagactggtttacaaatgatcccagatatcacggtgctagtcaccattatacagatccaaggccattacctatgcctcaggctcattctcaaaaggtgggaactacttcagagctcttagtctcagggcacgatagtttgaagtatttgtagatctgcaatctggtttaattcagatctacaatccctcaatgaatgcatttggctaatcagcattgcccttccttgtccgttgcagcctcttagtgtccacgctgacggcgtcatacgggatacatgtctttttattctctgcttcttctcttctttagctttagaactccagctatcaaaaggtcaatcctcgaaagctctcctcgaactcccacaccattcaaacatgcccttgcagctcaagaaattaaatacggtcccctgaagatgctagtaagttcaagaaaggtccttagatttagtgggcttaggagtgtagacaagtttcctctgatctggaaatatccactcttcccttagcctcagaccccctcccatgcagtggaggacctacaagatgtgattaagcgggaatcggatgaatctggaattgttgctgagtttcaagagagtggaccaccgttactgaaaaaaatcaagcaggaggtaggtcgccctcgctgctttgtgcactttgaactgtttgacatcactgctaaggaacagtaacacttgtcatgcaagacttttgtgcaagcaagttgaaaggcactgtcataatgaggacttcaaccttccatttggaaagtgacttccatcaacttctttaggcagaaaagatgctagagaggggtaaagggaagagggggcagcgggcttatactcttctttcaaaatttattgacaacatagtattaatcgcacatatgcaaagagaaagactcccaacccaaatcatgaccacattaattagagcaagcttttttgtgtgcacaggctacttctctgtaagtcaagagattagcattggacatggggaaaataagggtttttgtagttcaggagtagagggtttccaaatgggggttttggtaggcaaaaagccagggctacaggagccaaacataagcatcacaaattgttcggaacaacctcgtagaacaaaagcatagttaacaggtggtcatgacaaggtgatcataacaacctttgaaacacagacatcattgccatgtcctggaacaggcagtacagagccatttgtaattgaggtttcagatggggcatagcccaatgcttgagaaacagaggtttaatcataaacaggaatggatctaattggtctttactttaagatggctttcaagcctaagatggaggcaggtgaatgggcaagaggatggatagacaagcagtcaacagagaaacagattccagattcattcctgttgtctttctaaggactaagaaatagtttattataagagtgaccatgcccagagaatgtagattcaagttaccctgagtggtatgacccgttagagaacaggagtttgcaagcacaagagaatgaaattttagccatcaagaatcagtgttaactcactagggagaggcacttgcaaggagggtgaacttcctttcatgacgactttatttttgcaagaataggtagcaatttacacctgagagtaaaggtctccagaaagtctttcttccatacacagcacttcctgtttgcttttaggtggagtcgccaactgagaaatcgggaaacttcttctgctcaaaccactgggcagagaacagcctgagcacccagctgttctcgcaggcgtctcctgtggcagatgccccagtaagtatcaggcggatctcggactcttctgtgatcacgtggccacagcgtcccgcgtgtggcatgtgggaccccatgccttcagcactcactcttagagcacctgcttcctaagtattcacagccacatgattctttttgcatttgcattatttgtcttctaagtgctgtgtttcctcctagttaagcagtatgttgtgtggttccatgtggtatctagcatagagtcaatcatggtgtgtaccaaatatttggcatgctaggagcctagtcaaggggtccttatggagccacaggagaatggcccacaggccagattctcacgttccacaattataatggcatggtatttgcatataactcattgggtcctcctgtatactttacattagctttagattaactcaactctcacattgtataaatgttgtgttaacagcacttcaccgtcttagtgttttgaccgtgaatccggatgcaaagtggaaactctgtcaccttgctctggttgtcacagtctaacagtctgtggatagcgtctcctacatcttatggaaaaccagagctagtgaaaattgtgaatacttactcagtgtgttaactgttaattatcatttcagggactttagatgaattaattcctgtagtcctcaaaataacattgtaacattttcactttcattaaagcaactgcaagttgggtaacttagtgatttggttgctcaatattatatacttaacttagtgctgctgcattagaactttgaaagtcagctcataaataccacgctttcaccatttgtagttgatgttgccgtagatttgtagacgtcaaacacttctgtgccgatatatacaacataagatgactcattagcacatctcttagttagaagaatggattggtaaattcatttagtagatagctaggacatgccacatgcttagaattaagcggtgccctacagtgttttcaccattttggtgatgtttgcagcagagagatgagaggcctgtgtagagttggctcctttcagctcccagagaaggttaatttctggtggatacttgctaatgtgtggcatttcacagtaatctctctagagttaggtctgtattcgctcttgtattatcctgcctcacttaaatgattcctttccctttagaatattcttacaagctctgttttaatgacacctgtatcagaagatgaagacaatgtcctcaaagcctttaccgtacctaagaacaggcccctggtgggtcccttgcaggtaatgactgttctaacatttggtgtcttaaaattttttaactgaaagtccgttactttgcgttgtttttaatgttttatacataaaggaatgatactttaagacaatgtcttgatgtctagaagtgagcctatggtgttttgttactaatcatgtgagacactggaaattcttgttcagtcgggggcccccaaacatgatgaagtgaaacatttttttaactgtaactgagactgagatcatgtgttgccctaggctgtgacagtatctccttctgcttttaaacaatctttaaaatatgtatctgtgtagttttttttcagaatgtaattatgtatgctttatcattaagcaaccaaggcctcagagactaaatttctaataaaatgggaaattagctagaaaataattgcaatgcctttgactctcagaacaaaagggcagccctcagtgttggtggaccatctgccgtcaagttttaatatcaaaagagatttcccttgcaactctgaggtagatgtgtattgatgaaatacaacaaattccaaattaatcctgagccaagtgtaaataagaatgcaaatttgttccctcaaattagttgaagcagttcccaacattaaatagcgtagcacctggccagctgcacttctcttccctctgttcccccattgttactcaggggggaaactctaccaagcagagaatagcctggctagaagtaaaaagtactatttgatgctgtatgcttaaaggcaatgtaaaagatagtagcctttgagagctggcctctctgtttatagggccgtcttgccactgatattctgtctaccccaagttgtgagaatcttaaagtctaaccttgtattatttgctatcatttaaaatgtctttgttaattctttgaggatttcatgcattgtgttttgatgacattcatctccaagtcctttccttaactcttcggacacccctggtctcctacttcttgtcttcttcgtcgttgttttgttcaataacctactgacctaatttgtgctacccataatactcgaagcaactcactgtagtaagctcagcctgccaggagtctcacactcttaaagaaaactgactcaccctcccccagaagccaccaactgtccataggtctgcagttgagggtaagggtttataaacccctcccacatcatcgttgattggtcttgtgtaggctctgtgagtttgtgaatgccgtggtcctgtcatgcccagaagacactgattttcttcatacttccgcagtctctgacccttagaaccttctatccctcttctaagtgttggagagagctgtgatatggatattacatggtggctgaggacttctcagtcacgtgttctctatgtttaataacctattgactacagcagtgagtttctgctttagccatcatccagtaaaccgagaagagtatctgatgaggtctaagagcttcactaatatacaggtgaagagataggaatttagaagatagattagtattgttcccatttagcaaagtaacagtagtagatttacatatggggcctatgaactgcctagccatgggttcttggccaaatttgcaggcatatgctaactcctatgaagcaagtcttaagtttaagaagaaaacggttggttgcctctctgacgtttgtgccaccgttgctgccatgggcatatcttgtcacgggggtcattattgaggttcacagtgttcacaactgggtaaaactgattggagctctctgccctgtcagcagccttgcatgatgtcttctggtattgtgaaaactagcaaggatggaggactcttcctggtcagtatgaatccagagaggcaaacataccatgtagattttattgctgaatctttgtatttgtgtgtttaatttggatggtcggtataatcgaggaatctggaaagggttcattggtggggaaagggaagaaaagatcttaaggaggggaatggttaaacaaagaggagaaaatggggaataatggaagggaggcttaagtgtgggggatgagaggatagactagaggatgggttaggagacagacaactaacactgagaatatttggaaaagccacttggaatcccactattttataaactgtataataatgtatcctttaattcatcctacaaaggggagtatgcttattttagaagctatagaataaaaagcccagtgctaggttcagggtacctctccactagttgttggtcagaggtgtcctaggaaccctgaaacaatacaggctactgccattgctcatggtattaagactctgttgctgaagacaccacatgcttcagtcacaagacatggagaagtcaacttggtatttgctgtcaccttttaggacaactggatgaactgtaggcatggttatttcttaactcagttggattgggtccctgtagctttcctcaggtacatgaactgctctgatgaaaggtgggtgggcaggagtacggaagaggaagaccaatacaccaagtcagctcttagggcagtcagccttctcttgccctatgtagagagaactcagaatacctcaaagatatggaaggtaaagaagaaagcacacttcacccaggtctagtgggatacaggaaggggattcaaaggatgtcagagcaaaggtagctatttaatacagtactgatccttggtggagaggaaacaccttgctttttaattggccctttggtttccaaagcatagaatttgactaatgctgtttgtatgttaagctacataagtttcatgcatattttataacctagcccgatattcagcctatgtttattgaagtataaagtgtagcctgacatgaggttgcatgtctttaatctcagcattttggaagcagaggcaggcagatttctgggtttgaggccagcctggtgtacatagagttctatataccagcacaggtacatagtgagaacatgtctttaaaaataagacgagaaaggaaggaagagaggtaaagaagaaagaaagaacattcagaacgtcagagtaagcgtgtgagtgtatttggtggcagtaatcatttcatatattgaaaactcatgactgtgcacctaaaatggaatcctatcagtttccagctttaccatgcagtggtttaggcctaactattcagagctgaacatgggctagcactattttgctatattcttccttacctgtgagggtatagtttttttcccctccccacagtggtacctgaattgtggctgatatcaaacattacatatatgatgcttttacatatctatcataaagtctaatctatagactaggcagtaatgagatacagaagtatgataataaactgtaatataaagcatcctaatcctatgagttgtttatttctgcatcttctgactgcatttgccccaggtaactgcactacaaaatgctgagactggtgcacagggagatccactgttttttcctgtactgggagctttgtttgttgaagcataatgccatttctagtgtttccaccaatacttcaattggatctgattaggcagatcttccatatgtggtattggtgagcatactgttcatttattaaatagtctaacttggatactttctttcccttttactatgaaataaatatctgacaaaagcaaattaaggaaggaagggcttgtgttggcttgtacgtcgttggagggtgccagccatcatggcggcaggagcttgaggcaggcagcggtcacatctcccccaggcaggaagcacagagcaatcgacactactgttcagtttgcttccccctttttatgcaatccaggaccccagtgcagagaacagcactgcggtgtttagagtatgtagtcccagttcaattaactagtcacgataatcccttacacatactcccaaaggcttgcccctggaagtgactctattttgtcaagttgccggtcactatcagccttctcactgaataaagaacatttcatagaatctaaaacttttctcatttgtacttttaagataaattaaattttcaatggatctttagccaaaccatttggatattcttgacactgcatagtttttcgttattttggttttattttcttgaaatgagctcttactatattgtgtagcccaagctatccccaaatttgggacaatccttctgccttggccttctgagctttgggattgcaaattgaaattcactgtgcctagcttttacctaaaacaacaaagcactattccccaaatattttacaagttgactgttttataaaatacaaaatatttgccacttttctagtgtaataaattgcaaatgtaattaaaaccagttttaatannnnnnnnnnnnnnnnnnnnnnnnnnnnnnnnnnnnnnnnnnnnnnnnnnnnnnnnnnnnnnnnnnnnnnnnnnnnnnnnnnnnnnnnnnnnnnnnnnnnnnnnnnnnnnnnnnnnnnnnnnnnnnnnnnnnnnnnnnnnnnnnnnnnnnnnnnnnnnnnnnnnnnnnnnnnnnnnnnnnnnnnnnnnnnnnnnnnnnnnnnnnnnnnnnnnnnnnnnnnnnnnnnnnnnnnnnnnnnnnnnnnnnnnnnnnnnnnnnnnnnnnnnnnnnnnnnnnnnnnnnnnnnnnnnnnnnnnnnnnnnnnnnnnnnnnnnnnnnnnnnnnnnnnnnnnnnnnnnnnnnnnnnnnnnnnnnnnnnnnnnnnnnnnnnnnnnnnnnnnnnnnnnnnnnnnnnnnnnnnnnnnnnnnnnnnnnnnnnnnnnnnnnnnnnnnnnnnnnnnnnnnnnnnnnnnnnnnnnnnnnnnnnnnnnnnnnnnnnnnnnnnnnnnnnnnnnnnnnnnnnnnnnnnnnnnnnnnnnnnnnnnnnnnnnnnnnnnnnnnnnnnnnnnnnnnnnnnnnnnnnnnnnnnnnnnnnnnnnnnnnnnnnnnnnnnnnnnnnnnnnnnnnnnnnnnnnnnnnnnnnnnnnnnnnnnnnnnnnnnnnnnnnnnnnnnnnnnnnnnnnnnnnnnnnnnnnnnnnnnnnnnnnnnnnnnnnnnnnnnnnnnnnnnnnnnnnnnnnnnnnnnnnnnnnnnnnnnnnnnnnnnnnnnnnnnnnnnnnnnnnnnnnnnnnnnnnnnnnnnnnnnnnnnnnnnnnnnnnnnnnnnnnnnnnnnnnnnnnnnnnnnnnnnnnnnnnnnnnnnnnnnnnnnnnnnnnnnnnnnnnnnnnnnnnnnnnnnnnnnnnnnnnnnnnnnnnnnnnnnnnnnnnnnnnnnnnnnnnnnnnnnnnnnnnnnnnnnnnnnnnnnnnnnnnnnnnnnnnnnnnnnnnnnnnnnnnnnnnnnnnnnnnnnnnnnnnnnnnnnnnnnnnnnnnnnnnnnnnnnnnnnnnnnnnnnnnnnnnnnnnnnnnnnnnnnnnnnnnnnnnnnnnnnnnnnnnnnnnnnnnnnnnnnnnnnnnnnnnnnnnnnnnnnnnnnnnnnnnnnnnnnnnnnnnnnnnnnnnnnnnnnnnnncagtttcctttacagggtaagaaacatgctttatgctaataaacatttctactgccagattcaaacccatgctcttgctcttagccgcctgagcttcattttcttttacgttatcattcctttttagtcctgtttgaaacatgagtgcaagcgctgtgtttatatgcgttctttactcatgcactctcctctggattgttttgtaaccacagaatgacagccttaaattttaatttcctgacttggtttgtcaaagccttactcttaaaaaaaacaacaacaacaacaaaaaaaccaatgagtttgaaaacatttcttcagtctttaatacttcagcccatcctcagaagttccagaattttacaggactgttagcagaaattgcggctctcttccctcctctgttctgtgtaattcagccggtaattgtctgcatttcactcgtctgtaagtgttcatacttttccaacaacaccctttccttgtgactgatgttgctccgaagtgacatgagttctcacatgggcatcagagcctgggctctgctctgggctccttctcatcctatttggaggacttgattaaatggagcaaatgaaatgaattaagttactcttgtctacagttaaggaccgtgatgtgtccttccctggtctcttaagattgctgtaaagatcatatggatcggatgattccaagatggcagcacataagccagcctgctcccatgatatttattatcagagaaaaactgcatgcagcctctgtcctgtcaaagaaatgcagctgagctggcagagtgctagcacagcatgcatgaagccctgggtttaatccagcaccaggtgtagtaatgtaaatctataatcccagtcctctggaagatcaggagttcacctgtaactacatagtaactttaaacatagtcttggttatataatgaaaaaatctaaatatagcttaaaaatcttaatacagtagttaaagagcaagtaagtaggtctccctattgccaggacttcttgtattatgttaataacgtctacaattcctattccaccttgcagaaccaggtcagtgggtcactaaaagaaatagctgagcagatcaggtagtcagggctcctactacagcagagatgaagcaggtgacgggcggcctgggtttcttttctttcctgctgttgtgtgggtagcaggaagatggccgcagatacagagtgcattctgagtgtctgtctgtctgtctactgtgctgccgggtttaactccagggtgtcttcgcaattgttgctattctctctggtcactatttttccacccatgtcactctcagaagtgtttcagtgaccagcattcaattagtgatatagattaagtaagctttctgtgtgtatctctgggatggaatttctctgatgagctgagtcggtctgccctgcccaagttgttccaagacagtaactcttcatacactttgtttgatgatatttaaaacaaacgtggagatagaagttgccttgggtaggtcagaaaaggtaaattgcttcagagagacttgacagttgtctgactactgataatcaagcactaggggatgtccgaggaaggagctgttcttcctaaaacttgggtaccccaagctatagaatgtaagttattgaggtgtctataaacatgttagaatgaacacttctagagacatctggataaaagcccatatctgcgaaagatccctgtgctctacccattgttaattcagcctggacacagaggcactaatgggtagggggcatcctgcagtaatgagtaaggggcatcctacactagtgggtagggggcatcctgcactaatgagtagtggggcatcctatactaatgggtaggggggcatcctgtactaatgggtaaggggcatcctgcactagtgggtagggggcatcctgcactaatgggtagggggcatcctgcactaatgggtagagggcatcccgccaccacctacattgtccatcccttcagttaggaaccctgaagttgtaagtatttcattgtgctgccacaggtattcactagtgaggaagtttgctacccattgatctcactgtagcaacctcttgatacaatgaagattttctgtggtatcctttatgaatgccgttttacgcagatgtccctgtgggaaggaattctgactttcagaatctcattaaggatgagatgagtagtatttttgtttggatgaattaaatagaatcggagaattcttactctggattccttagacactatcaatccatatatattagtttttttaaaagtaatataaatatcaataagatagtaattatatgttataataataaaatattaaataaataataaaatatatattagattcatctcgctgtcttattacatcttcacattgtaaaatagaatttcccaggcgccttgacctcagcagatactgtgtggctttatgaatgtaataatacagttattcagcatgaggggagcccacgggaaatgttgcaataatctagttctgtcagaaaaccacctgtgggcgtggtctcggctcctttcatttattgggcttttgcaaagggtctggatgtttttttttcaaagtgctttaacaggatatcccagttaaagttttgacagactgtttatagctcacgtctgcccagcggcaatgaaagatgcattacaggataagcaaggtgactctcctggccgccacaggaggatgtagggtaggattctattaacatttaaatgaattcagacaggctgacatctacagaacactgggtttagaagcagcaagaattcacatgcagaagctgctgcgcctaactgctctcttaaagtaaacagaaatgcaggagttgaaaacagaaacacacagaaattgaggtgacagcattcaaaaatagcccttaacagaaagacacctaatcctggtttgtcacagctatcatgttcttgagaagttgctgtggggtccccagttcaagatcctaaggaaaaaggaagctgaccttgacagtctttttttctcttctcttcttctcttctcttctcttctcttctnnnnnnnnnnnnnnnnnnnncctccctccctccctctctccctccctctttctgtgtatgtgtttgggagaagcacacagatggtatgttgcagacagaggacaaccttggatagtgttcctcagagtctgtccatcccaccctaccatctcttttgagacactccctgaaactcatcaaatacctaagtaggctaggctggctggctagtgagccctagggatccacctgcccctgccttcttagtgctaggattccaagtgcacactaccgtgccaatcccaccccccttttaaaaaacacagtttctggaaatccagcccaggttcttcctcactgaagagtaaaccctttactccccgggccatccccctcgcttgaaccatagtgcccgcctacctgaccttgctctccattctcgccattggtatgtgttctgttcagcttattacattctctgtgatgtacctactgtgtgccctcctagctcccaaagccgcttagctcatgcgagctgcctttctgcccacagtgattccacacacgctagcttactgcaccctatcgtgtgcacaccaagaactgcgtgttctgacctctccctagccctaggctctgaggctctgacctagcgctaggctccggcttagcacacgtgctgaggagtctgggtattttcattattgtgaatttgatctttagacattctcttttgtaggagaacctgattatttgaaaagtccccacaaagtactcatgagaactatatagtacattctttatatattgattctatcttaaatatctagtcctggaggaaagacaaaatatcactccagggatgatcaacctggagatttatcaaagtcacaattcttttcaaattgataagttgatatgattctctgaacaggcatggacagttaagagtcatctaacataccatacagcaaaggacggctcagtgtgtggccatcagcaggagcaaacataacttatattgtggtggaagcttaagaaacttaatttgcatacaggaattttattctgtattaaatcaggccaagtagaaaatttcttttttttagtaggaaaagctcttagaaaaaaatagaaataagccttttttgtttcaatatgttttttccttcattcttcctcctccattcttttgaagatacatgtttttggtaatacacatacatatatatatgtgtgtgtgtgtgtgtgtgtgtatgtatatatatatatacatatatgtgtatatatatggtgtaattttaaatctacatgcacagtatcattaggttaagttatacagtagcctcctcacttagtcagtgtttctaagcactacatatgcttctctgtagaggatacaccatttgatttgttgtctcgttttttgtttggtttggtttggtttttttgagacagggtttctctgtgcagccctggctgtcctggaactcactctgaagaccaggctggcctcgaactcagaaatccgcctgcctctgcctcccgagtgctgggattaaaggcgtgcaccactactgcccggctctgatttgttgtctcttaactgctcattattatatgtcatattttgctgcaaggattacaggccctaactcagtaattaaattgtattagtttaggtgatatagtgtgtctgtttgatttctgtgctgcactggaaaaccttcgctcctgcaagttagcaggcagtaacactcaagcagaggcgctgggcggactgaaaccctgcgcagagccatgtgtgttcggtctgtgcatttggatccagggaaatactcattttacagcacttctcagtcttcctaatctgcaaccgtttaatactactactgttttgaattgtaaagtatgaatctgtgttttcccatagtcttaggtgactccctcaaccctcccccacaccctcaaaggagttgcaatccacaagttgagaacagctggtttagaaccatttcaaaggatgttgtaactaagcttattgttaggaaaaatatcaaatgtgactttgtgttcagaagtcaacctgggatggctgccatcttggttgcagcctgtctgtgacatgctgtcccttggaatgctgtaggacgattcagtggctatggagtatgtcaagctgcacctgattgtttcgagcacacttgtgcacttggctgtgactgagaggcagccaggcaagctaagaggctgtgactcagggaagtcagaacacagcgcgctgcaaactgaaagtcactggaactttagtgtagtcactgaggggggtggcggggagatcaggacctcagcaccatgtccagcagtgttccttcaaggttgccatagttactcaccaacaagcatgcctcttctcactccacccccacccccacccccatggttctgtctgtactggaaggtcctggtgataaacccctgaatttcctatgcacatccctgctacgttcctcataagaggtcttagaggtatgggctgctgaatcccacctcattcagattactgtcccctcgttccttagtgatctagtcttgagtgtgttgctcatgtgctgtcttctatgttaacttcctgctgtgtgacctatgtggggtgctacagaggtggccacaccatgggtgttctgtgtgagagtttaagtgtgacaggatcacagcagtgcagtgtaagggccgttccatgatgccttgcaaccactacatcctttgtttctccatagtctttctcaccaacactgttcaaaccgaaactccccaccctcactatcctttccctccggccgttcttaaacagcgttctcagcgtcctgtgtcctgttctcttgcatgtggcactgcaaaccgccacgcgccggggttttttttttgcagggtataaaagcacatgtgtgttttatctctcaaaagacgcttgaggttctggagagcaaaagcttcaatgttggagacaaagctatgtagcccatgttggccttcaattcactaagtctcaacattcccttcctagtgttcttgctttttgttctttaaaaaataatttatttatctactttatgtgcattggtgttttgcttgcatgtattttctgtgtgaaggtgtcagatctcctggaactggagttacagacagttttgagttgccatgtgggtgctgggaattgaacatgggtcctctggaagagcagccaatcagcgctcttaagcactgagccatctctccagtcctacttctctactttagaaccactgttgtatttgtgctatgaacgctgtaaaccatcctgagaattaagtgggacataaactgtacatattccagtttgagtagacatggagaaacagcaggaaccaggagatacagtgggcagaacaccgttcaagctattgtgtgtacaccatagcctcacttgggcaagttctctctaaacctcaccccttcatttacctgtccagctacggtgtgtctgaacctttcctcgtggtgtgtctgcactatgtacatgtgactatgtgcataagacccagtactgtcctgggtatctgtatgttgctcttcattacttttatcttgtgatttccaatgtatcccttaaaactacgctaacgtggggctggagacatagctcagtccgcagacttcttctctgccatacattaaaccctgacccagcacttggggagttgaggcagcacttggggagttgaggcaggggagtcgaagtcagctcaactacacagtgagttcaagaccagtctgagatacataaggctctgtctaaaaggagaggaaaaggttaagctaatctaggagtttgggttgtagtttaatggtagagcatttgcctagaaagtgtgtgaggctctgggtttaaccttcaacgccgcaaaaagaagctgtgctgatagacatactaataaagataactttgaaatgtacatgtgtgcaaatagatgtatgtgttttagatatttgtatgaattgtgtgggttttatcaggtagtggtacattacagaaattacgctgcttggctcaagggctcgtcaagtccatggagtgagtaaaggcctaggatctatctgcctcaggtatctgtagagtgatgcccagattctgtctccaaccttggaaaactgcctgcgaggcagaaggcattccaagaacaagatgttacatcttacgaaagttctgagagacaaaggcttgctagcatggactgcttcccgcctggctgccctgctagggtggggaagcctgggcctcctggcctgaccctaatgtctccttctcctccctcattagccatgcagtggtgcctgggagccagcatcctgtgggaagacagaggaccagatgacggcctccggtccggctcggaaatacgtgaacgcgttctcagctcgaactctggtcatgtgagacatttccagaaaagcattatggttttcagaacacttaaaagttgactttcgacacatggctcctcagcgtggagcgctccatggctgagagaagagcctgattttgttgtggtacaacagttgagagcagcaccaagtgcatttttagttgcttgagatctcacttgatttcacacaactaaaaaggattttttttttaaaaataataataatgaataacagtcttacctaaattattaggtaatgaattgtgaccatttgttaatatcataatcagattttttaaaaaaaataaaatgatttatttgtattttagaggatacaacagatcagtatttttgactgtggtgaatttaaaaaaaaaatttacacaaagaaatatcccagtattccatgtatctcagtcactaaacatacacagagagatttttaaaaaccaggagaagcattattttgaatgttagctaaatcccaagtaatacttaatgcaaccctctaggagctcatttgtggctaataatcttggaaatatctttattatactaaaccatttcatgaggagaattttgttgtcagcttgcttgaaaagttattactgtatgaaatagttttattgaaaaaattatatttttattcagtaatttaattttgtaaatgccaaatggagaaatgtgttcgctgctatggttttagcctgtagtcatgctgctagctagtgtcagggggcaatagagcttagatggaaaaaagagaaagagactcggtgttagataacggactatgcactagtattccagacttttttatttttatatatatgtaccttttccttttgtaattggaaaacttatttgggagaattttgcatttgttgtacatttttgttttttaggatttttttttttgttgttattgtcggtttataaaagcattgcacttctttttctttttttgggagatttgtgttgtttatgtcatatgttttgttttgagttcagcctgaatgttcatccgtttgggcgtttttctgacttggaagaacattctctgtaggtttctaagtgtacagagccggaactgcctcgtggttcctgggcttcagggaagacaaatatggaagtcaacagccagtttctgccttgagagcatttgcaagaatgctggccttgaattctgaaatgacagtgtatctactgccttgtagcaaaataaagctatcctcttattttacatacttcctgatgtctctcgattctgtgatttggggtggtggttacatattcgaggagatgagacaaactcaaaataatcttcactttaaaaaaaaaatgtgcttgccatctaactttttacatggagagtcatcgccacttcagggaacgaaaagacaaaccaaggtaagtccacagaaccgtcacaacgaccgttggagggctcttccagcctgtgtcaaacaagggcactgaagctctttaattgaaacaatgcactctagaagtaaatgctggtatctgagttagggagatggctcagtctggaatgttcttctgtcaagaatataacctgagccgggcgtggtggcacacgcctttaatcccagcactcgggaggcagaggcaggtggatttctgagttcgaggccagcctggtctacagagtgagttccaggacagccagggttacacagagaaaccctgtctcgaaaaaacaaacaacaaaaaagaatataaacctgagtccccatctccagaagccccacaaagccagacaaggcatccatgtctatagtcccaccagacaaggcgtccacgtctatagtcccagtattcctgtggcaaaaaaacgggagttgaagatgaagattctcggatgctggcatgcacccagcaaacccacacaagaaatggcagagagctaagagatgctgtctcaagacaaggtttgaggggagaactgatagccaaggttgttctccatagaggacatgtggcatgcatatgccccgcctccaccatgcacacagaggctcgagaatttaatcgcatataggtaggctgtgagaactgaaaggtcatgctcatggaaattaggagactctgagagatgcgatgagccctggtgatgcaaaggctttctctttctgcttcccagccactctgatgcaaactgctccactttcccatcgtaatgggctgacatctctgaatctgtctttccacaagctgcttctatattttatcacagtgaaaaaaagtaacaaacacaggtgttccaatgtggtctattcagtgttcagtatcccttgcacaaatactgattgattctcacaactcaaatccaaactccaattttgagttttcataagcataacatagttggtgttcatcaagccaaggatatgatagatctaatgactaatcttcagagctattttataatccttgatcctggtgagcaatacattttctgagtgttgagtagtataactgatgagtagcttttgtcagaaaatggagccttgatgaccagttagctatctcagtgagtcaaagtattagagatgatgaatgtgactagcaacgaggagcctaagtgtgtggttcagtggcagggcaagagctgagcatgtgaatccctcttatagaggcttcgaccctctataaactcttacctatatgtaaatcatagttatatggcaggcaactgggaatggctgttttactacccagatttttctagtgactttcaggaaggcagtggtcataggtttataacacaatgctttaaagtatattgttctctagttctgggtgctagaaagtccaagttcagtaggtggatttaaagtctggcgagagcatacttcctgtttcgtagaagatacgattttgttgtgttttctgttttcacatgacagaaggccctggtttattttgttgattgggtgggtaggtaaagtgggtgggtggtttggtgggtgggtgggtggttaattgggtgggtgggtgaatggttgtttggttggttgtttgggtgggtgggtgaatagctggttaattggttggttgggtgggcggatggtggttatttggttgggtgggtggttgggtgggtggttatttggttaggtggttgggtggttgattggttggtttggttatttgaaacagggtcacctgtaacccaggctggccttgaagttgttatgtagctttgaatggtcttgaatccctgaacttcttacttccaatttccaggcgctgggattataggcatgggccagtatacccaactcttgctagtttactttggttgttggttttgtttcatgttttagtgaccctactctctgtgacacatgtacaaatgcatggatgtactatatttactacctaaatgagaagctattccaatgtcactataaagtggcatgtgaggaacaggagagacactgagaggaccaatactgtccactgacctcatataggactggtagatgcgagtgttgtcannnnnnnnnnnnnnnnnnnnttctgcatcaccagggtcctgtgttagggccccctgcattgcctcatctgatctgaagtctgacaaaatttggttgtaattcagactttaccatcgttgttgacttcacacaagtttgatgtcatctctctaagttcattttacttatattggatatcaaatataggtattatgaagatgttgtgaaacaggaaatccattcatgggtctctcttaagattctgtggcacctgtccgtaagatgctttgctagttcatctgtgcaaacaagaactgtgtgtgccattcggtgatgaggaatgaaagatttctgaggctcatgtccctgcttgcaagttacatgtactcaaatataaatattccttcctaatattctcagttattctacagtagataaattcttcttatgtaacatatatgcaaatgacagcacagcttcccttcaacctcttggtttctagtgcagtgtatcttacacacactcgttctcatccattgccgttctcatccattgccggggggtgatatcagcagggatgcagggtggctaagtgcttactgcatctactgtcaaggagggaggtgacctggttcccagcagtgagaagtgagaggcgaggggcaagataggaggctgtgaactgaggtttggactttgtcctttgcgatatggggggttattaaaggcttttaggtagagaaataaaatgattaatttatatctgatgtatagaaatcctgttcaaactctttattcacatatagtataaaattaatcctcagattagtagggagagatgatcagagtccaaattccatgccagttaacttatttttcatagcatgtttcctgctgcctaatttcagaagcatgcattttaatcctagaaaatctaactcgggggggaaaaaaaaaccaactcaactttgatctgtgcttcatgaaacatcatttcaagtgttataatccataaagtagaaattgactcaggaagaaacgattgcccagaacacttttctcctttagaagtgggacttttccaaccattactttctcagaccttctctgctaaacctcccactgaatcattatgtggtctaatccttggttctttatggatattttgatggatttttgtattcactgattaaggaatctttccagcatttgttcctgaagaaatttcaatgtagtgttatattgtagtctacccttcacactagaacaccaatgatcagtgggtcttgggttttattggacacagaggctaagaacactggtagattgaagttaagtcaggaatgcgtcctgtgtaaactctgcatcccatgtttgacagccaccaagtgactccaacacaggaggactgagggaattgaactacaaagacccggttttgtgaacaaatttgcaacctgagctttctatctgaccattccgcaagccttacccgtttctattgaaaatgtccattggtctgcaacagaaccttagaaaacataacccacagctacagggttttcttaactctaaggatttaatttgttactagtgttggtaattaggtcttttgtctggtgtttacaattgcaggaagcataatttcattcacaatacacttgggtctctcttatcatatggctctgttgtccgcgtcccatcaaaagggaatatacatcgatgaattcaacattaaagcaaagcaaagctgttgttcagagagattcttatttcgaaaccaggctgcaatgaacttgctgatctcctttgtttgcctaaacctctgagctttaggtttccgttcaaatggaggaagtatttaatcctgtatatagttacaaagcatacagaatttctcagatcagagataaacaaaactcaaagaatgcttcagtagtccaaagccattggaacacacagtgtgggctgcgagatttttaggtcaagaacaccctccaagatgaacctactatgcttggagaatatgtaaggacagagtcacgggttgttttcatttgactgatctctttaaaaacataagtgttttcccactttctaatagtactaaatatatctgaccatggatggagcaactcatccagctagtagggttagaacctaccactcatttttttccaaaaattctttttttattgagcacttccaatgcaaggccgagttcagctgagtatatacagctcacaaacataataagtacacacaagtatagtgtgtacaacattcacaattataggcaggatcattttcttggataccctcgaacatatgaaggaaaaaaataggcttatactttggtaactatgtttctttaagtcatacctgtcactgtttaggtaaccaagaaccagaggttagatggaccagagacctacagtaagaaagcataaaagatagtgataaaacgacccctaatgatattctgctatagtcatagatcagtggctctgttcagccatcagagaagcttcctcccacagcagatggaaagaaatacagagacccacagccagacattacacacagaaagaccttagaacactcagctccaagtgggatgtctccatccatcaaatctctcccctcagagctcagggaccccccccacacacacacacacacacacagaagaggaaggagggtaagagacagaggaggtgggccaccaggaaaacaaggacctttaagtttacatgaacaaagcacatatgaactcacagagacttagcagcaagcacagtgcctatacacgcctgcaccacgtcctctgtgtgtatataacggctttcagttttgtacttttatgggactcctgtctgtgttaaaaatgggtcgctgattcttgtgccttcccttggggctcttttccttctgttattttatcttgtccaacatcaatgcgatggtgttctttcttattgtgttttattttgtcatattattattatcatcatcacttagaagcctattcttttctcctgagagacaggaggggagtggatgcagacgggagccgagggacagagggcctgagcaggatgggggatgggaaatgatcatcactctattctgtatgagagaagaatctactttcaattaaagtgaggaaaatctaagatgtctcttttaannnnnnnnnnnnnnnnnnnnnnnnnnnnnnnnnnnnnnnnnnnnnnnnnnnnnnnnnnnnnnnnnnnnnnnnnnnnnnnnnnnnnnnnnnnnnnnnnnnnnnnnnnnnnnnnnnnnnnnnnnnnnnnnnnnnnnnnnnnnnnnnnnnnnnnnnnnnnnnnnnnnnnnnnnnnnnnnnnnnnnnnnnnnnnnnnnnnnnnnnnnnnnnnnnnnnnnnnnnnnnnnnnnnnnnnnnnnnnnnnnnnnnnnnnnnnnnnnnnnnnnnnnnnnnnnnnnnnnnnnnnnnnnnnnnnnnnnnnnnnnnnnnnnnnnnnnnnnnnnnnnnnnnnnnnnnnnnnnnnnnnnnnnnnnnnnnnnnnnnnnnnnnnnnnnnnnnnnnnnnnnnnnnnnnnnnnnnnnnnnnnnnnnnnnnnnnnnnnnnnnnnnnnnnnnnnnnnnnnnnnnnnnnnnnnnnnnnnnnnctggactacagacaagtctgtggtgcacttttttgattagtggttaatgtgggagggctgggccaccgtgggcagtgccctacctgagctgtggtcctgggttgaataagtaattgggctcagccagacacaatgaataagccagtgagcagtgtctctccatagccattgctttacttcctgctttcaggctcctattctatatccctgtccttgccttcctgggttcccgctccgatgaactacagtctttaagggtcctacttccgtttggacctactcctgtcttgtccattcctcctccatctccctgggcttgaactgcctgctcttgctatccctatacagtgcacttcaacttttatcctggacacctgactcactgacagagtcacagggctggtttctgtcatcctacatctggtaagtccttgattcctctccttggtggtatttgatctttatcactactgagaaggaagccccagaagtttcttttttcttcttcttaataaaaagagggcggggctcaaaccatgactcagagttggaacattaattaataaaggaaccttttctaggccagcagacaggagttgcattcttgccaatcctttctaagagcggatgggcaatgcctgcatccatcctgcctaagtcatcttgaaactgagggtagctgatgcttttattggcatccttcctttgaatttgacttttcagctcctctgtggttttgtctgcagaccctggtggtgaggtgaaggggcaacgctttgctcacactgcagcgttcttcacgagcatattcgtccctagactactgagcagcctgagcagagatgaatacaggacagactgatgaatggttgtgaatggtagatgatgagtcgacatagcaattacagtccaatgttaattgtcaactagacagggagtatgcgtgtatctgctttgacttgacatttttttctaaatgtttacaatactcaaaatgtagagtttcagggttggatgactacaaatctaaaggcttcgacattgacaccataaaatcccctctgacttgaacgccctgaagctcatcatgcttctaagttgttttgtttgttggttggctgttgatcattttttcatctttaggtatattcttgtgattgtccaacatggaagctttaaaaaatgggtattttttcttttcaaaaagagagctgggagtagtggcacacacctttaatcccagcacttgggaggcagaggcaggcgaatttctgagttcgaggccagccttgtctacagagtgagttccaggacagccagtgctatacagagaaaccctgtctcaaaaacaaaacaaagaaaagaaaagaaaagaaaagaaaagaaaagaaaagaaaagaaaagaaaagaaaagaaaagaaaagaaaaggaaagaaaagaaagagagctttaggctggcctggaactcactacgtagccctggctggccttgaacctatagccatcttccagcatcatcctcctgagtatgtttgattacagatgtgagctaccagactcaattcagtttgttaaaataatagccaattgtggtcttttgtgaacccgtagtccgggatttcttcaggtgtctgtatcttgctcagtttttggtcttgggcttggtgagggttagcacagctcccgggggcaggaagagaagtacagagcagttagttcatcatcacaagatcagctaagcatctgagagagggccctgggttccatctcctattggcaagcaatagactcacattgcagagagtatagaagggcatcaaccagttttggactctgtattagtcagggttctctagagtcacaagacttatgaaatgtctctatatattaaaggaaattgttggactgacttacagtctgcagtccaactaatccaatgatggacaactgtgaataggaagccaaagaatctagctcagccccacaagactagttgtttcagctggtcttctagagaagcaggttccaacagatgtgctggcaagtaagagcaagcaggtgaagaatggacccttccttcttctattgtccttacataggcctccagcagaagtatggccaagagtaaaggtgtgtactaccatgcctggacctaagttgttctttacttggaacttgctctgtcccaggctggccttgaactcagagatctgcttgcctctgtctcctgggaataaaggtgtgtactgtcttgcctggtcctaagcttttcatggccactatgcctcaagatctggatcccaggtgtgccctccatttctggattgtagttcattccagatatagtcaagttgacaactgggaatagctatattacagactctatcaatataatcacccccttagcagttcatcttttaaaatatcattaaaggatgtggagaaatggctcagctgatatggggcattagttatggaggaagtgtctgtgctgggcatggatgcattacaattcggagatgtgattagcaaatgaccctgacaaatacggttagcaaatgtaatttctccttccctcccctccttcctttggatgaataaataggtgtttgcatttataaatatataagtctcccttcttacctacactttgctttctgagcttaagtttacctgaaatcaagcacaggtcaaaaatattaagaagaaaattctaggaataaacaattcatgcatttgaaactgcttttattatagtatagtataacaattactgtatgctgttgttattatcactgcatctaatttatcacttaaaccttacctaggtttataggtactgcaaacacacacacacacacacacacacacacacacacacacacacacacacacacacacacacgttgtgtatgttggttagggccaagaccgccaggcaggagaacccgaactccagctgctcggcctgattctgatggaaaccctgacttccggccagctcactgcctttcgggtgctgtaggatccctgccctcccccagcatcagcttccgcagaagacaagtgtgctcggggctcctcttcacacccttgagcccacactcccacgggcg

SEQ ID NO: 32 - DNA, 3413 bp, Mus musculus
gggagtgtccaaacctctttgtttgatggcatctgtttacagagttacactttaatatcaacctgtttcctcctcctccttctcctccttctcctcctcctcctcggtgacctccttctcctcccctttctccggagaaacttgcccccggcggtgcggagcgccgtgcgcagccgggggaggacgcaggcaaggcggagggcagcgggaggcggcaaccggtgcggtccccggggctcttggcggagcccggcccgcctcgccatggcccggagaccccgacacagcatctacagtagcgatgaagatgatgaagacattgagatgtgtgaccatgactacgatgggctgctgcccaaatctggaaagcgtcacttggggaaaactaggtggacaagggaagaggatgagaagctgaagaagctggtggaacagaacggaacagacgactggaaagtcattgccaattatctgcccaaccggacagatgtgcagtgccaacaccggtggcagaaagtgctgaaccctgaactcatcaaaggtccctggaccaaagaagaagatcagagagtcatagagcttgtccagaaatatggtccgaagcgttggtctgttattgccaagcacttaaaagggagaattggaaagcagtgtcgggagaggtggcacaaccatttgaatccagaagttaagaaaacctcctggacagaagaggaggacagaatcatttaccaggcacacaagcgtctggggaacagatgggcagagatcgcaaagctgctgcccggacggactgataatgctatcaagaaccactggaattccaccatgcgtcgcaaggtggaacaggaaggctacctgcaggagccttccaaagccagccagacgccagtggccacgagcttccagaagaacaatcatttgatggggtttgggcatgcctcacctccatctcagctctctccaagtggccagtcctccgtcaacagcgaatatccctattaccacatcgccgaagcacaaaacatctccagtcacgttccctatcctgtcgcattgcatgctaatatagtcaacgtccctcagccggctgcggcagccatccagagacactataacgacgaagaccctgagaaggaaaagcgaataaaggagctggagttgctcctgatgtcaacagagaacgagctgaagggacagcaggcattaccaacacagaaccacacttgcagctaccccgggtggcacagcacctccattgtggaccagaccagacctcatggggatagtgcacctgtttcctgtttgggagaacaccatgccaccccatctctgcctgcagatcccggctccctacctgaagaaagtgcctcaccagcaaggtgcatgatcgtccaccagggcaccattctggacaatgttaagaacctcttagaatttgcagaaacactccagtttatagattctttcttgaacacttccagcaaccatgaaagctcgggcttagatgcacctaccttaccctccactcctctcattggtcacaaactgacaccatgtcgagaccagactgtgaaaacccagaaggaaaattccatctttagaactccagctatcaaaaggtcaatcctcgaaagctctcctcgaactcccacaccattcaaacatgcccttgcagctcaagaaattaaatacggtcccctgaagatgctacctcagaccccctcccatgcagtggaggacctacaagatgtgattaagcaggaatcggatgaatctggaattgtggctgagtttcaagagagtggaccaccgttactgaaaaaaatcaagcaggaggtggagtcgccaactgagaaatcgggaaacttcttctgctcaaaccactgggcagagaacagcctgagcacccagctgttctcgcaggcgtctcctgtggcagatgccccaaatattcttacaagctctgttttaatgacacctgtatcagaagatgaagacaatgtcctcaaagcctttaccgtacctaagaacaggcccctggtgggtcccttgcagccatgcagtggtgcctgggagccagcatcctgtgggaagacagaggaccagatgacggcctccggtccggctcggaaatacgtgaacgcgttctcagctcgaactctggtcatgtgagacatttccagaaaagcattatggttttcagaacacttaaaagttgactttcgacacatggctcctcagcgtggagcgctccatggctgagagaagagcctgattttgttgtggtacaacagttgagagcagcaccaagtgcatttttagttgcttgagatctcacttgatttcacacaactaaaaaggattttttttttttaaaataataataatgaataacagtcttacctaaattattaggtaatgaattgtgaccatttgttaatatcataatcagattttttaaaaaaaataaaatgatttatttgtattttagaggatacaacagatcagtatttttgactgtggtgaatttaaaaaaaaaatttacacaaagaaatatcccagtattccatgtatctcagtcactaaacatacacagagagatttttaaaaaccaggagaagcattattttgaatgttagctaaatcccaagtaatacttaatgcaaccctctaggagctcatttgtggctaataatcttggaaatatctttattatactaaaccatttcatgaggagaattttgttgtcagcttgcttgaaaagttattactgtatgaaatagttttattgaaaaaattatatttttattcagtaatttaattttgtaaatgccaaatggagaaatgtgttcgctgctatggttttagcctgtagtcatgctgctagcttgtgtcagggggcaatagagcttagatggaaaaaagagaaagagactcggtgttagataacggactatgcactagtattccagacttttttatttttatatatatgtaccttttccttttgtaattggaaaacttatttgggagaattttgcatttgttgtacatttttgttttttaggatttttttttttttgttgttattgtcgatttataaaagcattgcacttctttttctttttttgggagatttgtgttgtttatgtcatatgttttgttttgagttcagcctgaatgttcatccgtttgggcgtttttctgacttggaagaacattctctgtaggtttctaagtgtacagagccggaactgcctcgtggttcctgggcttcagggaagacaaatatggaagtcaacagccagtttctgccttgagagcatttgcaagaatgctggccttgaattctgaaatgacagtgtatctactgccttgtagcaaaataaagctatcctcttattttacat

SEQ ID NO: 33 - DNA, 1911 bp, Mus musculus
atggcccggagaccccgacacagcatctacagtagcgatgaagatgatgaagacattgagatgtgtgaccatgactacgatgggctgctgcccaaatctggaaagcgtcacttggggaaaactaggtggacaagggaagaggatgagaagctgaagaagctggtggaacagaacggaacagacgactggaaagtcattgccaattatctgcccaaccggacagatgtgcagtgccaacaccggtggcagaaagtgctgaaccctgaactcatcaaaggtccctggaccaaagaagaagatcagagagtcatagagcttgtccagaaatatggtccgaagcgttggtctgttattgccaagcacttaaaagggagaattggaaagcagtgtcgggagaggtggcacaaccatttgaatccagaagttaagaaaacctcctggacagaagaggaggacagaatcatttaccaggcacacaagcgtctggggaacagatgggcagagatcgcaaagctgctgcccggacggactgataatgctatcaagaaccactggaattccaccatgcgtcgcaaggtggaacaggaaggctacctgcaggagccttccaaagccagccagacgccagtggccacgagcttccagaagaacaatcatttgatggggtttgggcatgcctcacctccatctcagctctctccaagtggccagtcctccgtcaacagcgaatatccctattaccacatcgccgaagcacaaaacatctccagtcacgttccctatcctgtcgcattgcatgctaatatagtcaacgtccctcagccggctgcggcagccatccagagacactataacgacgaagaccctgagaaggaaaagcgaataaaggagctggagttgctcctgatgtcaacagagaacgagctgaagggacagcaggcattaccaacacagaaccacacttgcagctaccccgggtggcacagcacctccattgtggaccagaccagacctcatggggatagtgcacctgtttcctgtttgggagaacaccatgccaccccatctctgcctgcagatcccggctccctacctgaagaaagtgcctcaccagcaaggtgcatgatcgtccaccagggcaccattctggacaatgttaagaacctcttagaatttgcagaaacactccagtttatagattctttcttgaacacttccagcaaccatgaaagctcgggcttagatgcacctaccttaccctccactcctctcattggtcacaaactgacaccatgtcgagaccagactgtgaaaacccagaaggaaaattccatctttagaactccagctatcaaaaggtcaatcctcgaaagctctcctcgaactcccacaccattcaaacatgcccttgcagctcaagaaattaaatacggtcccctgaagatgctacctcagaccccctcccatgcagtggaggacctacaagatgtgattaagcaggaatcggatgaatctggaattgtggctgagtttcaagagagtggaccaccgttactgaaaaaaatcaagcaggaggtggagtcgccaactgagaaatcgggaaacttcttctgctcaaaccactgggcagagaacagcctgagcacccagctgttctcgcaggcgtctcctgtggcagatgccccaaatattcttacaagctctgttttaatgacacctgtatcagaagatgaagacaatgtcctcaaagcctttaccgtacctaagaacaggcccctggtgggtcccttgcagccatgcagtggtgcctgggagccagcatcctgtgggaagacagaggaccagatgacggcctccggtccggctcggaaatacgtgaacgcgttctcagctcgaactctggtcatgtga

SEQ ID NO: 34 - DNA, 57763 bp, Homo sapiens
ttgagaaaaacatgtaacagtgtgaaggtaaaaggtatcttcttttaaaaagtattttgcatagatattgttctttaaatgttccatgaggatatccttaactaccagttatttagaagaaagaaagaagcagcaaaagagttttcaaagaaaaaaaagtatatgcaatctaaaagccagctaaggtgctatgcacaccctctaagtcccagctgcttgggaggctgaggcaggaggatcacttgagcccaggaattcaaaaccagcttgggcaacatagcaacatctcatctcaaaaaaaaagagaaaaagttatcaaaactccatgtaacctagattaaaacataattagaaattttatacatatatcaaaatgtcatattgttccccataaatatatacacttataatttatcaattattgataaagaaataagagcttttatatcacgattttggtgtacctgacatttttcaaacaaattccgccttttggggccaaagtgctctctgtcaagctccatactaaaggatcaaatgagcctccccaagctcccagcagaactagcactttggaactttgtcaaaattttaagacaaaggattataaacactttgatatagtttccttagaggctgaatgttttgcttaacacaaatatttaaaccaaattaagataactcaagaactgatatgtttcataaactgattgtttttatttttctcagaaccgttaccttaactgaagagtaaattggaataagcaatttctatagatgtcaaaactttgtaaaattgattttttacatcatccacaaactttgtatttctagcaacaaatgtaaaagaaagagtagagttatggtacacttcatcctaacagggttcacatttaaaatcatgtagtccacttctgtgaagggcccaagaaaaataactcccttaaatccgttcctttcttcttgttctgttcgagttaaaaactttattttcttagactttggttaaaaaaaaaaaaaaaaaaaaaacaaggaaagacatagtggtgattaaaaaacatgccatttcttaccaaatggttttcacaaagcctaaaaaaacctacagttgctggaattaagcactcattcacttattgattttatgactaattttaaaatggatggcccattgaggtaaattcaatattatataaagatgtagtaaagtcaacaatcagataaatatacaatgataaagtaggagagacagaaataagattcagaaaaataatatgtgaaacatcatgctttaaaagaaaaacagttccaaagtcatattgccaaacagacagaaatctatccaaatcatagaaataaagcactacaagtaagcttaaaattatgattttgctatcatttgtaaggttatcaacctttatctgaggacagaattgaatccctttgaaggactcacaatacaggaagaattacaagaacataaaggcataggagttaaaagttgaaggctgccagagagtagcggaaagaactttggatttggaacaaaaaaaccttcatttaaacagtcccagctctggtaaatgttatctgtgtgaccttgtgcaaattacttcacctgtttcaatttcagttacttgacctggaattgaggaaaataatacctgcgggggagacataggcagaaaggcatgaactgctgtgaggattaaatgatataatatatggcacagcctgttgtaatctctaaagccaaatataacgtgctaataagtatattaaataaaaaataaataaaacagctccaactagttctcatcagttgtcatcagcacaacaaagatttatgtacgtacttatgttcaagaccccgttctaggaactgagtaggtagaaaggtaaaagatactgtctctcctctctgacctataatgaaggctccagatgaaataagacacatttataaatagatagatagatgatgcttagatagatagataggtaatagatgacagatagatagatagatagatagatagatagatacatagatagatagatacatagatagatacatagatagatagatgatagcaaagaaaggtaacataggccatacactcaacaagagtcagggaaggtaggtattaacacaactcacaggtgggagaaatgactgtggattagcaaggtccaagaaggcttcagaaggaagatttggacttcagcagggcctgaagaatgggtagcacttacataagcagagaggagaaaggaaggcattgcaggcaggaggcatgcttgtaaccaaaggcctgagattgccaatggttttttgggggaggaaacagagtgaacagagtatgataagagataaggctgaaaggtaggttgtgttctaaggcaaaatggcatgcagtcagtgtgcccgtcaagccctgcaggttgtctatagccaggcccactctgattggccaatacatgagccacttcaggtattaaatactatcacccctgggggtaaggttgtctgggcacagaggccagagcaagctcagtatagggaatgccaagttaaggagttcagatctctatcttgtcaacattagggagccagttaagggtatttaaacagatgactaacatgctaaaagtgagtataatgagattattgagcagtgggatgcagaatgcatgggggaaaagtggccacagggtggaaaattaattagggggctgttatggtagttcagggtgaagtaataatagcctagaagaaggtggtgacaatagaaagagaaaacaggccctgaatgtgcaggaatcatctagtaaaagttccacttctttctttctgcaggcccaagccttgcacagtgcccaacactaagtaaacacatgtgtttatcaactataaggaactatggaaacattgtcagggatacaaaggtaaattgagagacctgagtatttaagaaagaaacagaatattaaagactggaaacatttttaaagatctctactgcagcctccatggattgaaggtttgaaatatgaggctcagagaaactgtgtgctgctcatacatttgatgaacctgccttaaacaccctgttatttgttattccaataagcccctaaatgttattaatcttttgttgttgttgtttctattagcatttctactaataaaagcttactgttttgttgactaactttgaaagctgctattttacatttataacatatgtgggaaagtatagagaaggaggggaattgactaagaacagttgtgagaagagataagagagaaattacatctgtaggccgggtgcagtgtctcacgcctgtaatcacaacactttgggaggcccaggcaggcggatcacgaggtcaggagttcaagaccagcctggccaacacagtgaaaccccgtctgtactaaaaatacaaaaattaactgggcgtggtggcaggcgcatgtaatcccagctactcgggaggctgaggcaggagaattgcttgaaccaggaagtcagaggttgcagtgagccgagatcgtgccattgcactccagcccaggtgacagagctagactccgtcaaaaaaaaaaaaaaagaaagaaagaaagaaagaaagaaattacatctgtaaactggtcttgaagaatttccccgaaagctttaaaaagataggactgtcacttggagaaaagttaacgattccataaaacagatattctaaagcagaaagaggtaagaccttcatcctctacagcaatgtttttcaaactgcgattcactacctataaacagagcacgaaaacaactttgggatcctgaccagaatgaagagaagagaagagaagaggtctcagattgcatgcttggtagtaaggggtaagtattgttttgtgaaacttttaaaaattattatttaatagggacaaggtctcactatgttgcccaggctggtctcaaactcctggtctcaagcaatcctcccacctcggcataccaaaaaagtgctgggattacaggtgtgagccaccacacatggccagaacttttcttagctctgtgtgtgtgtgtgtgtgcgtgtgcgttgagataggatgtaagatgtgcttcttatcgtgtcacatataaaaatatttgaggccgggtgcagtggctcacgcctgtaatcccaacactttgggaggctgaggcgggtggaccacctgaggtcaggagttcgagaccagcctggccaacattgtgaaaccccgtctctactaaaaatacaaaatattagctgggcgtggtggaaggtgcctgtaatcccagctactcgggaggctgtggcaggagaatcgcttgaactcgggaagcggaggttgtcgtgagccaagatcgcaccattgcactccagcctgagcaataagagcgagactctgtctcaaaacatatatgtatatacgtatgtgtgtgtgtatttgaaagccaccttttcctcaaataaatcaaagcctttcaaaatcagttgaaaaaatacagaattttattaaaagaagaaaacatttgtgtgtgtgtgtatatatatatataactttctttattccccaacaggtctctccacccagcctctacctctcagtctcagccctgtcttttaacctcttaaatattatccaaagactttcccttggtcagatctctacattagcaactctatgaaatagcacagttgttgccttcatgtaaataaactcttaaataaagcatttatttgatgtgctactggtgaatgtttaacaatcagttttccaataagaaaaagcccttatttgtagcacttgccatttcctgtggtgtaaatactccaactagagccaatttcaagttactaacattacatcactacatatgaaattggaaagagatgcacaacagcacatattacattgtgtgatagacataaataacctcaagtatgtagataataggaaaatgtcataaaataggaagtgatgagttttgaatatttattgtcttttaaaataaaatatatttaactgtaagtttatataatttactttttaataatggctgtgtctaacaattaactcacaaaatttagctcccgtgtattcctgacccagcttgacttcgccagcaggctctgatcccacactctctaccacctgctgaacaactctacccggatgtcttccataagaaaccacaaatttaacataccgaaatctaaacatgctttcctctttgaatctcccagtgcatacttctcttcgcctcttgacttccctatttctattaatggtgcctctaatatccttagcaacccaatcagttgctaagtcttgaaggctctgcctatgttcttctgatctgcctcctccttttcattccacttacggttactgtcctaccccagacaattacctagcctcttccccttgtctcttctcactccaatctatctgacaatactgatagattaatcttccacacacacagctctgataatatagctttgctattcaacgcacatacatgaatccggccttcaaagctctccttgcttcaggcaatctggctagctccttctttcctgtgctgggaacatgccttgtggattctgattgtgtgattttgctctcacttttgactttctctggactgtccttccctctttatggaaagactcataacttttatacaagacagctcaaacaacaataaaaatatgtgggttggttgtcataggaatatgtaagttgatgagaatctggagagcggaaacaaacaagaagtgccaaatccaggaatcattttaaaataaaaatttatttggtcactatctgttatggaggttctatgaaacatactacactgttatggaggttctatgaaacatgctacactgaggtagcacttagtccactgtcattactaaaagattttctgggggagtcaacatgagatttatctcaaaactatggatttcaattatacatgccacagcttttcttcattaactgaaataattaagaattgtctgcattttaaccatttactgtaactatttccctcttaatgccctgagccaaactgggttgagtgggtgaggaaaggtgggtggtagagacatggagcccctaatctggtctgttttcaccattgatgagcctgattcatctttgggatgtggatcacgaggattaaagatccaccacgtgcccaggatttcccagcaattagaagcaaagaaactagaatttgtatcttttatatatattttgtccttcagcccttctccagtgcttagagtaaaataaaatcccttaagtgcttgcttttttcagcaggagaatcctaatgatgagcagcatgtgatcaagcgattccttttccttcaagctgaggttgaagttcagtagcgaaggaagaaggaacaggcagctacagccctctggtcagcagcaccaactttctcacggagttaaattagtttgggttatggagagcctgaatctttagcccaggagaggtgaaagtgaatgagggagaggaaggcggtgagagacaaatggcaaaggtaaaagtgggctgggtgcagtggctcacaactgtaatcccagcactttgggaggctgaggcaggaggatcaagcgcttgagcctaggagtttgagaccagcttgggcaatatggtgagacctcttctcaacaaaatatttaaaaattaactgggcatggaggtgcatgcctgtagttctagctacttgggaggctgagatggaaaaatcacttaagcctgggaggtggagactacaatgaactgtgatggtgccactggactccagcctgagcaatagagggagaccctgtctcaaaaatatacatatttttttatttttaaaaaaggtaaaagtgtatcaaagcagtctgccttcactctgatactgagattatcaaccagtgctctgcagaccttccatgaaaactactgttaaagatgcagattgttaggcctcatctcaaacctactgaatcatggtctctagggggacagcctgggactgtgcatctttcatgggtacacccagcaattctgatacactcgaaagcaagtttgtctaacctgtgacccgcaggctgcatatagccaaggacagctttgaatgcagcccaacgcaaatttgtgaactttcttaaaacattatgagtttttttgtggtatttctttaagctcatcagctatcgttagtgttagtatatttcatgtgtggcccttcttccaatgtggcccagggaagccaaaagattggacacttgggctctaaagattgaggatcactgctctagtgttggccaactactctagtgttggcctgcagactcaatacagcctttgagctaaaaacggtttttacatttttaaagggttgtaaaaaaagacaaaaagaaagacagacaaggaaagacacagaagaatatacaacatagcctacaaagcatttactatctggtcttttacaaaagagttttctgacccctttctagtgcactgcaaatgaaaggctgtacccaaatttagctccagtgcagccctgccacagctgaaataactgatgtagcaagcagatcttaaaaaaaaaagtgatgaaatgtgtaaagttgtcatctaaaaatacttttgtaataattataaatggagagagaaaatgtataaatacaaacattctgtaatgagtttaaaaatatagtttcatccatacaagaattttgataactccatttgattctgtttttccataagcttatcagatagcaatatatccaacattagcctaataaaattactgcatgtgaattctttattggactatgcatattcccaaacatattattgtcatacaactgagggaaaaatgtaaaactatatctgggaaatgaaaaattataaattctcaaaatgatacataggaaaatgatttacaaagaaaaaaaggaaaactgaacttagtatctttctactttaaaggggttcaagaacttaggagtagttacacacctcctaaaatcttgaaaaagaggctatgaactcacttcacaaagggttcagatactcacattgtgtccaagagactcagcaattgggaatcttgccagttagattcataaagcaatccgaaagccagaatgcaatttctttaggggtggtttctagatgtttattctagatatttttaaaagattttgtttatttttgatgtgaagaaagaaaattattatagaatctagaaataaatattggctttaaaagtattaatttgccttgtcctttgtaattgtgatccgaaatatctcacaataattttgtttcagtgttattttcttctcaggaggaaaggaatgttaaaaccttactagcaactaacacttgataaagatttaaactatataacaattttaaagaaagtctaaaacaccagatagtcttgaaacctcgcatgcttcaccgtttaataaaattatgactcattttagtaagaacatgcttttttagtaagaaaaaatgctttctgagctaagtttgaactgctggggcacatgggacacccacaaacccagtcagcagaagtctcaaactcctaaaagattaaaggaaaaatacattagtgtgtacagagaatgaaaaaaaaatccccaatggttctaatctataaacggaagtaaaactaaaactcccctaaaatccccccagtcatcaatccttataaattcagcacttatcttcttcctttacttctggagaccctcattaaacaacacgaaagcctttgctgacttttatctcgtaaaatagagccctcaaatgacactaagcagggataccgacctccaaaatcacaaactgttttacttctaaaaccatgcatgcaaacgtggggtttcctgagttctgctaggggcgggctgtctggacccccgtgtatttttttttttttttttttttttttttttttttgcaggtgtgcaatccagggtgcgcgctctgtgcagggaggggagcagaggtgtgcggtgggcaccgcctgggccgggcggggcggggtgggtggggcccgggtgtgtgctggggtgagagtgaaggacatgtgacaatacgacggtggcggctgcaggatccgggaggggagtgaaagctccgctggggcgctccattagtgagcggtgatggttgccgcccacttgtattgaagcgtcctttgtcactaacaagttaaattagagatgttatttatttaagaagaaggaaaaaaaaccctagccaaacagcctatgaatacatatgctcacatcccctactcctccaactcctaatttccccgtctccagagggcacagttgtaaaccttgacgaaaatccaatcttctgtgcgggaatttccccccaccgcttgccgcccccgcgacagtgagtgggagctggaggagctctggtcccgctgcccgggagcacgcggagccgggcgaccgcggtgcggcagccagggaggaggggaggcggcgggactgggcgcgggcgggccgccgccgcgacccgggagcggggtttgctcaggaaaaggcgccgtcgcggcccccggccacccctccctggccccgggctccctgcccgcgcgcctcccgggcctcgcggcgcgctaggcgcaccgcggcggcgcgagcgccgaatgggagcggcgacccggccagcccggcagccccgcgggcggcagccagggcgaccgcggaggcggcgggcagggcgcgtgcgcactgcaggggcgccagatttggcgggagggggagtgtccaaagctctttgtttgatggcatctctgtttacagagtttacactttaatatcaacctgtttcctcctcctccttctcctcctcctccgtgacctcctcctcctctttctcctgagaaacttcgccccagcggtgcggagcgccctgcgcagccggggagggacgcaggcaggcggcgggcagcgggaggcggcagcccggtcggtccccgcggctctcggcggagccccgccgcccgccgcgccatggcccgaagaccccggcacaggtaacggggagccgggcgggcggccgagggcgggggcgggggcgcgcggggcgccaggctcccgggagcaggtgggaattcgttccgggatcatctgaggggctgtcagaccctccgaggacctggagcccctgcctcggcagcagaagccgctccagagactgatgaatggaagagtctttgcgggaaatgtatccggacgttgggaagcacgccctgcggctcattttgcaagttgcatggggatacatttttctttagggggaaaaagaaagcacgttccagccgagggcagagcggtgcccaccagccccggggagcccaccaggtgcctggcttgatgccgcgggtgtcggcgagggatccgcagcgtaattgctggatgcattgagatatgtttggacttggaagtgcagagcatatggcagatacagggaaaatgctggattgtttagtagctgcaggtagttcatttaaatttcattcattctttatggaggcgaggaccagtgtcagctgacaggcggctgaaaagcagattttagggggataaaggggtctctacttttgcaaattgtcttaagacctggttttggaggttcgaatcatttttctctgaaaggcttttacttccactgcaaacattgcacgcgcacccacacgcgccgccgtcgcacatgtcactgcacttagggaggctcgccgggaagatgggtgcagtcccttcacatttttggccggacagatgggaagagggagaggaggaggaggagggaaatcctcgtccgaactgtcagttgctcgttccccagtctccaccggcctctggactttcccagcagcacacgccggggctccctgcgagcggcgggtgccagggctagctcggcagccgtcgcagtcgccactcggctcaaggggacagaggccggcagcacccaaggccgctgccgcgcaaccgggacgcgatccccgcgggctctgcccccaggcgaaaggtccctgcgcggcgcgcacacgtggatgcggctgaggtcgccgcgccttctcgcaccctccttcagccgccttaggtcgccccggccgaggcgcggtgaccggacagatcctcgcgaaggagttctaaggcgaagtccatggaggcaaagcaaatccattcgcctttccttagattgtttgattttctcctactggtttgttgttgagcctgcgggcgctggtccccgcgcggcgctgggaagttgcaaagagcgtgggtggagaccctgcagcagcacccgcgggctgggctgggcggggagcagcgccggggcttggttgggctctggggacgagagggcgacttgggggagctccgggctccctatgcctactccggagcctggccgcgcaggacggtgtgctgcccctcgagggctccacttttcgcctttaggacttcacaggacagctaccggggtcatctgttttttttttttttttttttttcgagagctgaaactggcagcaggaggagggagtcgggcaggggtgctgggaggaggcgcggcagcggctccgcgccccgaggtctcggccgcccccgcggggcggggccgcgcaggttccctgaggctccaggtagcccagaggggaggcggctgggaggggcgggagccttgaacctgcctcaggggaagagaaacccgactgcgggctcggagccgtttcttgcaagggcgagcgtcaactcggcagggattatattaaccaggtcagcgaaatgagtttgaacccctccgaatcacagtagcggccacaaggcacttcctcccgctcccctccctcttcctaacccccagcacctcttttctttttcgtttctttgcacggtttgtttccttgacagaatgtaacattcatagttgtactcttgtaaccacaccgggtctagcaggtggggagtcgagtgcatcaaccctgaaatcagcctttgaaaatcctctgactgttgggtctgagatcttgtcagagcagataaaggaaaagttatttcaggttccttagtagaaattaatcatgcttctaggacgacttagagcaagcaaatcgcatgcaaagttcaaaggcgagcctgggtggccagcctggcagggaaactcaggagctgggcgcgtgagcagccccggactcgccctgctgcgtcctggccccttcaggtcctgcagaagtcactctccaccttgcccccaagaccttagttttgcacatctttgcctctgtgcttagcttttaagaggcacggaaggacatggcatggtcatgtattagcgctggaaagtaccttagaaataggatccaagcaagcccttattgtaaaggcgaggaactgaagtcttgagagagaggaagtgatttgtccaagtcatacagctaggtggaggctagactagaacctttgcctccagaaccctagtcctgttgattcccgtgctctcacctgacgttggctgccccctgcgggcggctgaataggttgcttgttcctgggttgttaaaccgctgcggagagagaggtgctcaatgactactctgaaaaatgtgctcagttctgaaaatgtgacctctagatccagccaaacctgaaaagttaattcgacttgaatctatgactgcagtttcagattcctctggttttcttggtgtctctcacatttcacaagggactgcatttggggtctttccaaggagttccctatgaatctttcaaaagatgcagacttacacctctgggctttatagctttttttttttttttttttttttgctttatcatatcgtgttttacatttttgtagttcttgttcagaagttgtttagtgcctcctgttgacagtggaaacagaactaggctattgtttcaaaacacagacactaaatgaaaggaattattacagattataaatatatatttcctgggattttatttggtggtggtggtattttaaatttggattacatcatgtcgccattcaacctggactatcagattgttgcttaaaataatagctttaaattatgagaacccccaattcaggatttttggtaagcacttcagcttcacttgtagggggctggtaatatgcataccagtgagttagtttgggaagacaaaacctgtaatgaatataacttttctttttaaaaacaatgatttacattatgatatggctttatatcattgtttttattggtcttagtttaatgggtttcccaacattgcaatgacaaattttagtgaagtttctaagatagtatttttcctattttaagttttataagaaaaactataaaataaaccgtgtctgtaaaattattgtcatctgatcagttgattagattaacaaacattatgattatgattaacaaacagtaagcatatagttacttcttcaaaagtcataaaatttcctaggttaggttaactaaataaaagaaaaagctttcgaaaatagtaatgggttcttttaaatccatggcttttttctggggaaatcccttctggattaggttacattttataatatttcaaacaccattccatcagagacagaaaaaacaagagtaagtaagactctgactaacaagtggcctaattattcacttagttactctagaaactaagtattgtaaacatgggcacaagttggatcaaccaggcctggagttgtgagcaatttggtattaattttatttacaaaacattaaagcttgatcactcaatgttcttatctttgctttggttttaaaatcctttcctcttagattctcctaatcctctagactttatgggatcactataattctgttttgcgctgtactacttcttgatttttttcttcttttaataaaacaaaaaccccattggaatagcatagttgaattgtttattatgtttgagaaatattatttaaacgatgtgacagatgccaaagattttgagtgtgcacttatataaaggacatgggttcttgttccttttcttatccttaaccttaagttttcaacttaaaccttcactggttggaaggtggccaaatgtgtaacttgtccctggtctaatagtaacagcaggttcagacatgcaggggaataggaaggtgccaggtccttggccgtgtctgtggatacccataacagcagaaccagtttacaatactagagcaacagaatgcagcaaacaatcttgttgtgcaagttttcaaagttttgtcttcataacctttgaaaagattgttgaggagttttgtgtaagttttgtaatccagtagtagtctaaatcctcttgtttcagcccacgtctacccattcttatttctgcagcatatatagcagtgacgaggatgatgaggactttgagatgtgtgaccatgactatgatgggctgcttcccaagtctggaaagcgtcacttggggaaaacaaggtggacccgggaagaggtaactaatcattttatcaagacgcagaaaatagatagagtgtataatttataaaaaacaaaatttcaactaaactacaggtgctcaagctcattagcaggctccttgagatcttatcctagcccgcatgtgcagcgtgccctatgccccccacttcattatattatccatttccacactatttgcagttctttgaatgtcctcttctcattttaggcttcatctgtgtttccttttgcctgttgagttctcatccttttgtcccacctcttcttcctacttttacattacccatgaaggcatcacctcttctgtgaagccatccctggcttcgccggacaggattggatgcatcctcctgtgatcccatgcatgggtgcatgttctactttattgttgctgggacatatatacctcctccagctgactgcaagtctgttgagggcagggctcttgtctattcatctttgtgtttcctgaattcacaaatgcttggacccaaaataggatattaataaatgttctctcaataagtgaatgacttgctactcccaaaaacaaaacaaacaaaagaataaaacaaaacactcagagaactcatctttttacagtgtattgatttaatatccttgatatacttaacagagccatctatatgaaggtatgttttaaaatcatccgataatggatggagacacatctgcttctcctgtttctttttcggctggcttatcaaaagtttgattttgtaggaatggaaaaatattttagaagcaaaattattaatatgtggagaaaagtttctctaatgttcttaaaatttttgcaactaattttagatgattcatgttacaataaatggtattggctcttcttcagtttcactgttctctgcttcatttaaaccagagctccttttaacaggcaggtaggattcccagagaggcccataggaaattcatattttacctattaagattatccacttggataatccttatgatacggaaattctgttgtcaacattggtttcctaattcttgtgtctgtattgtaccagggacctccactgtgtgtgaatgttacctttgcagaaacataagaaggaatgcatttatatacttatgaactggtaggattgtgaacagcatataaactaaaagaactgattagctggaaatgtttaatgtcttttatgttctaacacatctggcctatctaaatctaactgattttcttatatagctttcaaatttaattttaaaaatggtctttatttctttataaaaagttaaactaactggaaatattctatttcttgctcaagatcctatttattaccataggtaaatgtgtactgaatctagcactggaatgcattttttcctaacagagtaaagcagttatttataataaacactcaatatatgccaggcattatgataaatgttttgcaaaattgcctcatgtaatccccaaataaccctgttaatatcagcctcatgttaataaattgccccatgtaatccccaaataaccctgttaatttccattttatagatggcaatactaaggcccagaaaggtaaaatggtatacccgctttacacaattaatagttgagtcaagatgccaactctggtctgattctaaataaatctatactcccaagtccgtatattacattaatatctcctgtattcggatactttagagagactttttattctagattcgttccctcattcactttaacttgaacagagttatatagtaaataactgatatcctaggattacctttaaatgtcttaggatgaaaaactgaagaagctggtggaacagaatggaacagatgactggaaagttattgccaattatctcccggtaagttagtaagtttttcttataacgaaaggaaagcttctcccaaagatttctataaaatattctaggaggagttattaagatagtgtataatttactcacatttaagaagtgggagaaatgccctacccataacttatattttatattataatgcatataattaaattattagaatttagattattagaatcgattattataatttagattatcaaattttaaaaacagttgcttcttgttttatcttttcatttataggataattagtattttgatgatttgttacatggtagttgattaaacttgatatttcctccaagtcagtttttcctgaattccctatttttgtcaatagcaatacttttggcaccaaggtttaaaattctgaagacctttcttgacttatcacattcccccaacccctacatctaagcagttactaaggaccctggaattcctttatagtcagtcccgtccttttcattctcatggctgtgctgaaggttgggctcctgccctctcatttggactatcatataacttcctaactggcttccccacttgtagttttccatttttctttcttttttttttttttgttttttgttttttgttttttgagatggaatctagctttgttgcccaggctggagtgcagtggcacgatctcagctcactgcaacctccgcctcccaggttcaagcgattctcgtgcctcagcccccttagtagatgggatcacaggtgcccgccaccatgcctggctaatttttgtatttttagtagagacaaggtttcaccatattgatcaggctggtcccaaactcctgacctcaagtgatctgcccacctcagcctcccgaagtgctaggattgcaggcatgagccaccgtgcccagccagtcttctacttttccattcatcccaaacaccattggcaggtggaacttcctaaaatgcagctgtaccttatcttttcaaaaccaaccacagtgacagaatctcacaaattaagtaaactgccttgacttggcacacagaggccctcctctattgccccaacttacagctccagttctgtttcctgcttcctctctctaagcaggtttgcttgaatttatttctgctttacctcctctgggcttttgctcctggtcttcccacctcctagaatattctccctttatgtcaccaattaaagttctgtccatccttcaaagtccttatgaagagctcttcaagactcctcccaaggaaaccatttctcctcctaagaagatgcttctctcctcacttcagtatcattttgctttggtcttttcttccaagtgaatcaaattcagcatctgtgatagtcagtcatctacttgtcttttccttcttataagtttacaaactcctgtaacataggacctatcttttatgcatcttttttctttctgcaatataaatactttggtcctggattgaagcacatctcttgtctgaatgggaagcaaactttagtcttttagggtggtttccatgaaagcctgacaacatagaatctctatcaagcctcaggctatgtagatactctgcaaaagtatctgaggttaaggttaacttggcaggcacatgtgtagtatgatggtcctttagatcatgtggcaggaatgtttccctcaggaggcagagtgtctaattttagatgcaactttgatatattacttgcatgttctgtagcctgtaagtaatgagggatagatgggctctaaacatgctctaaaatgttcttaaatattttcactgcatatggtctatgtgtgattcctattacaacaaaaaattcacgtgcttatcacatcatatctttatggtggtgcatactttatttgtctagaatcgaacagatgtgcagtgccagcaccgatggcagaaagtactaaaccctgagctcatcaagggtccttggaccaaagaagaagatcagagagtaagttctttcttcattggtgtgtgactcataattaagaatattcccaaaatgctaatattttcctatttgaggaagcaggtaaaatgggcaaacaggaagtagaggactctattcccatatttccagtgaatgaaagcaaattttggaaattttctaaagatcttgtaacactgaagaatgattatactgactcattacataactttaaaacataggttatttttgtgtgtttatctgaaggtgatagagcttgtacagaaatacggtccgaaacgttggtctgttattgccaagcacttaaaggggagaattggaaaacaatgtagggagaggtggcataaccacttgaatccagaagttaagaaaacctcctggacagaagaggaagacagaattatttaccaggcacacaagagactggggaacagatgggcagaaatcgcaaagctactgcctggacggtaataatatgtcaaaaaatatattgatcgggaagaatgagggagtgggtattgaacattctgctttaaatgtatggtgagtaaattatatttcatcagtcgtaagtgttttattagataaaccagctacatagcttttagagattgaagacatcttagagtttatttggttgagaacttccaggatccacctgacagtgagccctgggtgaagacatttagctttccccagcctcaatttccccatttccaaaatgaatcatacagggccagtgttaggatcaagtaaaatgaatgtcaaaggacttggtaaactataaaactctaaatgcatagaaagaaactgaagacagtttgtctctggcagttcacgtagctggttaagttactcaaaggaactcagctaccattttcctgataaccatcattcatttcttttattttttttaattattattttttagagacagaggcttgttctgtcacacatgagtgacagagtgcagtggcatgatcatagctcaatacatccttgaactcctgggctcaagggatcctcccacctcagcttcttgagtagctaggactacaggtgcaccccactacacccagctgattttaaaatattttttgtagagatggaatcctgctatgttacccaggctggtatcaaactcctggcctcaaacaatcctttcacctcccaaagtgctgggattataggcatgggccaccatacctggccaccagtattcatttcattataccactttgcttaattttttacttcattgattaaagaaataatgtatttcttgaattctcatactacttccaggtttttaaataatgtcagggtaataatgctttctttttaatgaacaaggcaagaaaatgacctcattatgagggataactatggaagctcattttgtcccatttttcccacttaagtagtatataacagattttgttcctttggaaagcaatacttttaatgataaatcttgcattaaaatgatgtagatcaaaaatattaaaaatagttttattcttgagcttcataatccaggagaaagtttatatagtattctctagtgatgctccaaagcatttgcacccttgtggttcagtataaacttagaaattttaagaggttggtaaaaaaaggcctttcctcccatatggcctgagaggatacactgctgattcttctcaaaattaacagggctattgaacttcctctttctttagcatacattcccccacccccattgaaatagaaaaagggagacttaaacggtttttttgaattgagaaactgttttcctgagaatggaaagactttagtaaaaatgcgttgccttttgaaaatatactgggggttaggatctttccctttgggatcccattttccactctcgtctctgtctgattcagaaaacaattggggtggctttcaaagagtaggaggttttttggtctcagaagttctcactagtgctttgagagataaagagtgaagtattcttcatcagcagcatcttatcatccaccagacttcaccatgtccctctcgtggtgtgtaggccctgctgtgccacattcaaaggagtaatttccccaaggcagctggaactttacattgtgttggagtcttgtaccgcgaccggtcagaataaacatgaagcgttatcgtattgaaaatactcctttaccaaggaaatggaatggttaaaagatactgatatttctagaaaacgacatgcattccagattgtgtaactaagagaaatctaactaggcaatagagaaagcctgatctcagagggtggagaagaaggaaacaattaaaaagagaaaacaactaataggcccaagggaaaggtctctgttagaaacagttttctgtcaattcactttaatctgaattgaaatttttgtttgtgaaatttgtgtgatatatttctgtgcagaactgataatgctatcaagaaccactggaattctacaatgcgtcggaaggtcgaacaggaaggttatctgcaggagtcttcaaaagccagccagccagcagtggccacaagcttccagaagaacagtcatttgatgggttttgctcaggctccgcctacagctcaactccctgccactggccagcccactgttaacaacgactattcctattaccacatttctgaagcacaaaatgtaagccattcctgtgaatctagtttaatgagagagacggttagtttagctccaggtaataatcatactttgcagttgtatacttttcagagaactttcctgagcatgatcatggccagtcttcacctatgccctttgaagtagatagggtgtaggtatggtgtgttacccctggtttatgtctccagaaacgaggatggtaagcgctttgcccagggtgacacagctcatagagatagtgctgactagaaaacgagctgtccgattctaaattgctgcttcaaatctaatttgaaggcaacctttgaatgtaaatttacttaaggtactattgaagaataggggaatggagtcgcatttgtagatgtaatgtttttctcttccaaaacgaaaagggaaggtagtattatgtttaaagaggagagagtttgacactgaaattcagtggttatggtatgtttcattctggcagtgatcaggcagacatgtcttaatttattcactcagtaagtgtttaccttcttactctgagtcaggagcagaactttgtgacattcattttctgatgtctccttttagtctccgttggatcagtgtgatcccttccttatttctagatatttatatttagggaaagtgataatccataataggtggaaaaagaagaagaaagaggaaaaaaatcgagaaactttaatcttaagaataacaatattaaatgataaaacttacccaagaatagagagctcatatgcaaattatatgcaaaacatgttcataaatagtttttattcttctctgtccatggatttgactacaaactttacagaaaggtctcagatgaataaattatcataagaattcctgtgctttttattaaaactcaaaattattccaagaaaaatatttttatttacaaacagctggtgccatcaatttttcccatagaaacaattttgaaacattcattaatgtattttataatatattttttattgtttttttcattgtgtttttctctaattaaggaacacttcccaaaatttaaagtgctcatcaacacctcccaaggatttttcaccatgttcctttagctgtttagccattttaaaggcctggctaaatttcacattaaaaggttttaaaaatttgtttagtgtattttatcagtaaagtgttttttttctctcagtcccagaacgaaacctcaggaagccaagtcccctgaagcatatgtagccctgaatgacgtggcctttgttttgtcttttgcatctaggtctccagtcatgttccataccctgtagcgttacatgtaaatatagtcaatgtccctcagccagctgccgcagccattcaggtaagatcattgatcattcactgttcaaagcaccacttttaagaaatgcttatttctttcatctaaacacatatttttacctgagcaactaaagtaaaaaggaaagggaacatggagaggagagcagagtcttggccagcaatctattaatcttgtcttctagaatgagtttgctctggaattttctgattctttgatgttgcaaggtgaaataactcatcagtcagcatccactctagcctgagatttcacatcactcccttaagtctgaaataacattcacaaagatttctgcaggagccaaatttggttggtggtgttgtcacagtgaggctctttgggctgtgcggcacctcatgaccatattggctacacccattgtatttgcagcttccaatcagacctttgtctttatttcccttactttgtaatttcagagacactataatgatgaagaccctgagaaggaaaagcgaataaaggaattagaattgctcctaatgtcaaccgagaatgagctaaaaggacagcaggtgctaccagtaagactgtcatcatgtgcttgaatgaggggatagcagctttgcctcagtttacctaagcgctcttctcttctaaatattacacttagcaaggctccatatatccattcagaatgtctcaacacaagaagttgcttgtagtaaaatgtagttggtatcagattatatgctgattaaattggaagcagtctttttgtaattgcaataaaaatgcaatatccacttatgattgttatcatcaatttttttcttcagaaggactataatcagtttaaagactagcaaagataaaatgaatgaaaatctgcattttctacagagctatgtatctatatggtaccattttggtttttttctattattttgttaacctatattttcatattttataatttcagacatgatttgatgcatgttcagtatatacatgtaaaaggttatatataaaacctcttcataaataacattagctgctctcttttatttgcatgtgtgaaagttatgtgggccattactgaattctgacatctttagcgactgggcagccaactgggatggctccttgtgctttgcaacatacatagttaaccaacaaagacaataaaagagaagtgatgcccagtaggtattcctaggggtaaatttattttttgttaaataataagatgtttatgtgcacatgctagttcgaccactttttaactttagttaatgttttgcaatttctcctgttgtgtggtcatactgtaaggagacttctgttaatttgctcttctgctttcctaaccacgttgatttggcagtgcttcactgcatcagtgcaatctgtagcattagaaagggatagaagcaacaagaatatgtgtagatcaaagcaactctaactcctgagtcctctagcttttttgtggttagaatgcaaataggacagttcttcagttcttcactcacagcaagcatttatggacctttggcaaattatattaaagtggaattttaagacaatatgataattatacttcgaaatatagacctatgatttgacatttttacaaaatgataacaaggtaatcatataggtacaacctctagcactattaaaaacagggtcttgcattgataaaaggaaacatcttgacaactgtttcataggcgtaagtttgggatgatgcaactactcttatctttcctccaacagcatctgataccttgtgcaacttcattgctaagttccttctccctttcttctgtcctctctttatttctacacccttcccccttccttagacacagaaccacacatgcagctaccccgggtggcacagcaccaccattgccgaccacaccagacctcatggagacagtgcacctgtttcctgtttgggagaacaccactccactccatctctgccagcggatcctggctccctacctgaagaaagcgcctcgccagcaaggtgcatgatcgtccaccagggcaccattctggataatgttaagaacctcttagaatttgcagaaacactccaatttatagattctgtaagtagaattgtgaagggaagttaacgattctggaagataaattagaaaacccatttcttaaatcattgccattttctatagccaagctgttattagcatatattaatgtaaaggtagaagtatgattttcatcttcatgaatatgttttttcaaagatctgatttcatagcctaccgagagagacaaaagtatttataaatacttacaaaataggacttttgaaggaagagttttttttcacattttcacacttttccttcaaaagtcatatttttaaaaatagtcagattgatgacttataaagcagagcttggattatgggaacggaatggtgtttgagttacttttaacttttttttttctttgcttacttcatggtgcttctctagaattttgtcttgcttttgaacagcacattaatgatttggcttactcagagctgaaagcaatcttttagtgtatttgaagtaataatcagctccttggtcatacctggctctttccacaaaatggtgattattgattactggtcccattgcttcactgagatgaatcatctttcgtgaaacaaatttgtattcagcacctcctcagcgaacacttggttcctttcccagttgattaaaaatcatttattgcacactcattggttaggagatgaccattgccgtaatatgccatctagaaaaggtcttcattttgctttccattgcatgcagatgtagagtgtcgggaggtccctgcagcacatcagagggccagccttgaggcagcccactagaccctgctctactgcagtataatagagcaactgctcatcttgaagctgttgctcaagaagccaaaccaacgggcctagtgtttgctttgcgttgagcatctctctctcagtgctgtttcaggtgatgatggcacacactatctcaaagttctgtgcctcccacattgtttcaggattcttcatcatggtgtgatctcagcagttttgaattctttgaagaagcagatttttcacctagccaacatcacacaggcaaagccctacagcttcagcaaagagagggcaatgggactaaacctgcaggagaacctagcccaagggtgaacaaacgtatgttgagtgagagttcacttgacccacccaaggtcttacctcctgcaaggcacagcacaattccactggtcatccttcgaaaaaaacggggccaggccagccccttagccactggagactgtagctccttcatatttgctgacgtcagcagttcaactcccaagcgttcccctgtcaaaagcctacccttctctccctcgcaggtagaacacaatttctgcacagctgttactcattttcaacagacacctgagccttaataatctagaaactaatacttcggaacaaatgactaattactgctgcctttgctgatttcattctgtcgttgaatctagctgttgctaagttatactgcctcccaaagtttaggctgtctgcaggctaactgttgattttggcatcattctctctcttttacttttgggtggttttgaaagatagttgcatgaaacgtacttttatttccttcaacactagagtttaacatttctgtccctttctttttctcccatctgatccctccctttaaaattgttaacatcatttcttcctcgttgttcatttattcttatgcgattcactgacccaggggaggagggaaccaaattgtgtttatataacatttgggttgcaactagaaaatttaaagctagaaaatttaaaggttccaattcatctttaaatggaagagtttgggaagaggatgagaaacaaatgcttaaggaaaagaacatatttttaatttcagtttctcaacattggctcttttgagttgtgccatactattttactagtgcagtttttgccaaggaatatttttatttcatacagcttttttaaggcatgaaaatcacaattcttatcagagatttgtgttcctaaattatttaaataattaaattaatagataatttggcactttaaaacatttttccaattgtatctgttgaatttgttttaagaacagatttaggtatgatataggtatatacatttgggaaacactgaatcaaacaaagttacaagtaggtttcttagctgggcatagtggcatgggcctgtagtcctagctactggggaagctaaggcaagaggattgcttaagcacaggagttcaagttcagcctggtgaacatagcgagatcccatttctttaaaaactttcttttttttaactgcaggccttctcagagttattaatatgccgttgtgccttgtgaatttccaggaggagattatgatatgttgtgtttcccaaatttattttaccttggaattgtttaaggaacacctagttttttcccagaactttagtgttctgagagacacagtttattattcaagaattttccatataatgtaaaccttctgtaatactaattttggttcatagattattaaagagaaaaaacaaagtatgaaaggaaactattaattattaactattattttccccaaaatcactaaagccttttaaatgttaataaagaacacatctcattctctttaatgacaagtgtcatttattgagagtattttctcacagttttgcaagtttttcagcaatgaccctaaattttatttcttggaaaccacacccaaatcctgggtgctcaattgaaataaaacaataccctagtcaatataacatgcttgttagcatctttattatttaatatagtgggtcaggaaaacattcttgttatctaggtgtgatttttaaattggggagaataaagaattaccatctaatctaagtattttttctttctctccatatttagttcttaaacacttccagtaaccatgaaaactcagacttggaaatgccttctttaacttccacccccctcattggtcacaaattgactgttacaacaccatttcatagagaccagactgtgaaaactcaaaaggaaaatactgtgtaagtctttggttcaggaataaaatgatttatcttatttacttatatttaattaatggaatatagttcccagatgtctgatccacttgtatgtgcataattttactgaccatttatatataatcatgtctattcccacattgaatatatctgtcctgggcatattacaactacctacaggtagaagatgggaagataaactagattccttttgtaacttactccaaaatttcctatatatgcacaagtagttttcataaaacttttccattcggtttgtttgttccctccataaggccttcttatgaaagccagattttcaacctcctttcctctctaattgtaagcttcagaataagaacgagtatggtttcttacctagtttgtatttttatttaattttatttgtttattatttatttatttttagtttgtattttttaatcttattttttctttttgaatttatgtgtagataggacctcttctgacatccccaggaatattatatgattagaagccaagggatgagtaagcagtcatttttattcaataaagccttaatcaattcagagaaatggtagagaaagtgtgaattatcagaaaccttgaaaagaaatgcactgttatttcgaagtacaaaaagtaaattttaaaagtttaacatgttttgtagtatgggctctgttttcatgaatagggaaacctgatttgtaaatgacatcaggtcttcttgatgctcatagtcttatacagatcataggcactacatgtgtcttcagagccattaaggaaagatgttaaatcatttaatgcttttagtcttcgaggtataatattttgaaatatttgaaaatatgtgatatgcatattctctttttcttaacgaataacgtgattaatcagcacaccccaattccatatccggaacagagtttattgtattcagtggaaaaatgttaaatgtaacaggtaaagccatgtagggacatttattcttttgtattgagccactgcttgttttctttttaaagttttagaaccccagctatcaaaaggtcaatcttagaaagctctccaagaactcctacaccattcaaacatgcacttgcagctcaagaaattaaatacggtcccctgaagatgctagtaagttctagaaaagtttttggatttcattggtttattagtcccattaggagttctctctgatgcaaaaatacccactcttccgtttagcctcagacaccctctcatctagtagaagatctgcaggatgtgatcaaacaggaatctgatgaatctggaattgttgctgagtttcaagaaaatggaccacccttactgaagaaaatcaaacaagaggtaaacacgcaaccctttggaagcaacaagctgagaatcctgccccctttattccttgtgtgcagcttgatgtgtctgccattggcactgtgcaacaccacgacttttcgtgcaagattttcatacaaggtgcagcgaaaaggtactgccagactgtaggcatcatcaacctttcctttgggaagccaagccatctctatctacttcatgtttggacagaaaacatactagagagtatcaagaaaagggagggaaagaggtttttaatgtacttttaaacattactgattatataaagttgatatttcatttttagatgtgaagaattggaatttaaattaaaataatagtatctttaattaattgtattaaaaaaagggaggctgggcgcggtggctcatacctgtaatcccagcactttgggaggctgaggtgggcagatcacaaggtcaggagttcgagatcatcctggctaacatggtgaaaccccgtatccactaaaaatacaaaaaaattagctgggtttggtggcgggcgcctgtagtcccagctactcaggagtctgaagcaggattatggtgtgaacccgggaggcagatcttgcagtgagccaagatcgtaccactgcactccagcctgggagacagcaagactccgtctcaaaaaaaataaaaattaaaattaaaaaagagaatctaacctgcaaggatcaaagttttagcttgttggcaacagctgttttccaccaggttagatacagtgcttcttgaatttattttcatgtaaagataagtatttttttttatagctaaaaatctgatttgattatttagtaatggagaattttaccagaatgtgattaaaaaccagtcttttgtcaccaaaagatcttttatgtcaccaaaataaaatccttgacggatacaacactactaggtgtatcattaaaatatattcttaatagaataaacacctagaatcagaacattggttgaaaacgtaggagctttacaggggcagtaaatttggagctagtcacatttcaaatttgccatcagtgtttctttgttgaatccagaagatagagcaaattgagctgatagtgtaagttagcaacatagttttataaaagtatttgagggactggccagaaatatactcctgactgtacatgtttcataggaagttctagaaacaacaaagcactttctatatgcttttaggtggaatctccaactgataaatcaggaaacttcttctgctcacaccactgggaaggggacagtctgaatacccaactgttcacgcagacctcgcctgtggcagatgcaccggtaagtacgtgtgcaccagcccccaagttgttatgtgacactggtgcctcatgaaatcctgtgtgtggcatagggctgctgcggtttcagcactccctctttaacacatcttatttctaaatgttctcctgcacatgatttttaaaaaatgattattaatgtagagtataaagttgagattttttcatgtattagaaacattgcagactttttcattatttgttttctcattatttgagtgccttggccatttaaaaaaatctacatggatataaaaactatgttcatttatatattttcctttatttgtcttctaaataatattgtcttcttgttaagttgtctcttgtttggtttgtgtagcatctcatatggtatcaaccacgttgtctatagtagatgcccagtattgtacccaattgctttgggttactaccaccatttttaaagtttataatttgtgaagggttgtccttatgtcttaaggaaaatcagagctaataacagctgctaagatttatttagtaggtactaagtggtaagtactgctctaggggctttcgatgaattgattcagttaattctcacaattatcctgtaaggttggtattatttttattaatttttattttttttgagacggagtttcgctcttgttgcccagactggagtgcaatggcacgatttcggctcactgcaacctctgcctcccgggttcaagcgattctcctgcctcagtctcccgagaagctgggattacaggcacccgccaccacgcccagctaattttgaatttttagtagagacggggtttctccatgttggtcaggctggtcttgaactcctgacctcaggtgatctacccgcctcggcctcccaaagtgctaggattacaggcgtgagccaccgcgcccggccaggtgggtattattatcatttctattatgtcaactggaaaacagaggcacaaagaggcttagtcatttgctcaagattgtatacctaataagggatggtgctgggttggaactcagaaggtcttgttctaaattccctacttttcaccattttttgccaataatttatagctctaaaatattgatagttctgtaccaatatatgaaataaagtgttctctccccagaacttagtaaatcttctattttgaaaggcatgtatttattaattcatttagcagatgttttttgagtgcctaacacatgcctagaactctgggatcccaaaggagctttgtgttgtggtgatgtttgccacaatgggattaaggttcagacatagttgatttctccttttagctcatagtggggagaatttctggcagatgactgcatttttttatgctaatgtgtatcatctcatagtaatctactctccacagtgttagaaaaatgtggctctcatattatccaacctcatttaaatttcaaattattctcttccctttagaatattcttacaagctccgttttaatggcaccagcatcagaagatgaagacaatgttctcaaagcatttacagtacctaaaaacaggtccctggcgagccccttgcaggtaattactattccaacattggtattttaaaattcattcactgaaaaactgtcatctttggtggtggtggtggtggtggtgatggtagtgctggtggtctgtttttcgttttcaacattttagacataggggagtaatgcttttatacaattcttgatgtctagaaaaatccaataattcctttttgctactcatatgagacatgctagaaatttttatcagtgcagattccccaaagcatgatgaaatgaaacatttcttactgtgactgagactaagatgtattacacgtgtgtcactatcttcttctgccctcaaatgttttataaaaatatatcaatatagtttactttatgttccaaattttttattttttatgctgtatccctaggcaaccaaagctcagagactgttccaattttaaatgaagtctgaaattagtcagacagaaaataattgcaatgtatttgactgtcagaataagaaagtcaactgtcaatgttgtgaggccgatctgaagttgaccatctgctgtcaggttttaatatcaaaagagatttcccttgtaaccctaaagtgggtgtgtgttgatgaaatataaccaattccaaattaatcctgagccaaatgtaaataagaatgcaaattttgcttccctaaattatttaaagcagtttctgacattaaatagcccaatacccagccacctgcagagccctctcctccatccccctgtgccatgcagagggaaacttcataaccctagaggaagtgaagagcctggattcagaagctgaaggtcatatttcttgctgtaagttaaatggcacgatcataggacagcagcctttgagtctgcccattaccttaaagggatttcccattcttgtgatagtttctccttccaaattgtgagaatctgaaaacttgcccggtaagtatttgtgatgcttagtttttcagggttttttgttgatgttgctttgttttttgaaacagggtcttacccggtggcccaggctggagtgtagtggggtgatctcggctcactgcaacctccgcctcccagattcaagtgattcttatgcctcagcctcccaattagctggaattacaggtgtgagccaccggcaacccagccgtttttttgtatttttggatagagacaaggttttgccatgttggccaggcaggtctcgaattcctggtttcaagtgatctgcccacctcggcctcctacagtgctgggattacaggtgtgagctaccgcacctagccagtgcgtagtattattgtaaaataaggattgcaagcacattttgtttaattaaatcagattgcttccttcctggcctctctctgacagcaattgttttggtaaaatggctgtggactggaatgtgagacagggagtcagtatttatggggaatctggacaagttcctgcgtcagtgaggctggagttggccccgtgtggagaagactcagaataccacaaagaggccagacgcagtggctcatgcctgtaatcccagcactttgggaggccaaggcgggtggataacttgaggtcaggagtttgagaccagcctggccaacacggtgaaaccccatctctactaatcccagctactcgggaggctgagacaggaggatcgcttgaacccaggaggcagaggctgcagtgagccgagatcatgacactgcactccagcctgggtgacagaatgagactccatctcaaaaaaaagaatatcacaaataattgggagatgaggaagagaatgaactccacccagacataagaggaacccagaaagggagttacaaagatttcaaggcaaagggcagccatttcaaaattttcctgaaagctgttcttaggtccagaagaaaagcttttgcttttttttttttttttaattattcccacctaagttacttggctcttggtttctagagaacagaattcaactactgctattcgtgttttaattaagttagattaagttttgcatatattttctaacctagtctggggccaacttgtatttgtagtagtacagaaaaagtctgttctaaatttcaaaaagccaacacatcaatatacttggggacaattaccattacataagttgaaacccatagttcagtattgagctttatcagtatatttgtattttatttaatggaaatattggttatctttgaaactcaaaattaagttatagctctattttattaatctgtattctcctgtctatcagtgagtcatattggcactttatgaattctaacatctgtacactgagattaagttgtgtatggtgaaggtaatatttgtcaattctatcaaactgaataattgagacttgaaagttaattttagagtcaatactcctgtctaaaccatatagtttactggtttacactgaccagatatattttaataatctgctataaagccaggctcagtggctcatgcctgtaatcacaatactttgggaagccaagactggaggatagcttgagaccaggaatttgagaccagcctgggcaacatagtgagactcagtctctattaaaaaataattagctgggctgggcgtggtggctcacgcctgtaatcccagcacttttggaggccgaggtgggcggatcacgaggtcaggagatcgagaccatcctggctaacacggtgaaaccccgtctctactaaaaatacaaaaaaattagccgggcgtagtggcgggcacctgtagtcccagctacttgggaggctgaggcaggagaatggcatgaacccaggaggcggagcttgcagtgagctgagatagcgccactacactccggcctgggtgactgagcgagactccatctcaaaaaaaaaaaaaaaaaaaaaaataataataataataataataattagctgggtgtagtggtacatacctgtaatcctagctacttgggaggctagggcaggaggatcccttaagcccaggagttcaaggttacagtgagctatgattatacccctgcactctagcctgggagacaagaccaagaccttgtctctaaaaaaaattttttaaggccagccgtggtggctcacacctgtaatcccagcactttgggaggcagaggcgggtggatcacaaggtcaggagtttgagaccaacctggccaacatggtgaaactctgtctttactaaaaatacaaaaaatagccaggcgtggtggtgcgcacatgtaatcccagctacttgggaggctgcggcaggagaattgcttgaacccaggaggtgaaagttgcagtgagcccagatcgtgccattgaactccagcctaggcaatagagtgagactctatctcaaacaaacaaacaaaaatttaatctgctataatagatactaatttattttaagaaatacttagtgaatgttgttctacatacttgccaattgggaggaaaaaagaaatattcactaaatgaatgaatgttatacaccaagtatctccttcattttatgtcatggagttctagcttctgatatcacagaaatatgtgatttctaaaatgtttcagactattgtgataagtattggaaaatgcatcaagtgactctaaatatttaaacatacatcacctatatttcatataatcctgattcaataatatttctatagattttttatgcaatttggtaattttgtttgtttgaaacacagtgctatttcatatatttctattgataatccaatttgacctaattaggcatatttctcacacatggtattattgaacatattgcacatttattaaatgatatgtattttacttaagagtactttatataatctataatttttgtaatttgtacttataataaatcaaatattaagtgggattttagccaaaccatctagacatttttgtcataatgtttttattaaaacagcaaaataggagtttcaaaatattttaaaatttgaatacttctaaaatgtaaaatgtttgcaactggtgtaatgcagttgattgtctatccctctaaactgtctaaataacttaggttcaagaacagtttattgaagaacataggaactgcgcaattctgtgttttatcatttcagttttaatcaccccggcttgattatggcaacaacattttagacaagcaattattactatttttgaggcccatatactgggccattatggttttgcttctaacgtacatataaatgcacatgcaatatatataaattatgtttgctgttttaaaattagaaatgccgagaagctatgtgtttgacattttattataaattttgtacacacatagatgtatggaaaatatactatgttctagagtcaacaattgttatcattttgccatatttacctcatctctttttttttttttttgagatgaaatctcattctgttgcccaggctggggtgcagtgacgcaatctcagctcactgtaacctctgcctcccaggttcaagcaattctcctgcctcagtcccctgagtagctgggactacagatatctgcctggctaatttttgtatttttagtagagatagggtttctccatgttggctaggctggtctcgaactgctgacctcaagtgatccacctgcctcggcctcccaaagtgctgggattatagatgtgagccaccacgcctgggctacctcatctcttttttatgaagtttttatttttattttttaattttttttttaatttttttttttttttgagacagcgtcttgttctgtcacccaggctggagtgcagtggcatgatctcggctcactgcaacctccacctcttgggttcaagtgattcttctgccttagcctctcgagtagctgggactacaggcgcttgtcaccatgctagctaatttttggtatttttagtagggacggggtttcaccgtgttagccaggatggtctcaatctcctgacctcatgatcggcccgccttggcctaccaaagtgctgggattacagacatgagccactgcacccggccagttttttattttttatttttttgagacaaggccttgctctgtcacccaggctggagtgcagtggcaagatcatggctcactgcagcctacctcctggactcaagcaatcctcctccctcagcctcctgagtagctgggactataggcacatgccaccatgcccagctagtttttttttttttttttagagatggggtctccctgtgttgcccagcctggcctcaaactcctgggctcaagcaatccttctgccttgacctcccaaagtgctgggattacaggcaggagccaccctgcccagcctgaagtattttaaagtaaattccaactaatataacattttattctcatgtacttccagatgtgtctctaaaaatagacatttttatatataacctaataccatcattacatatttaacaataattctttaatcttctcattctcaggtatatttaaattttcccattaatccaaaaaagaatcaaaattgaaacaatttcacacattgcatttggttaagcctcttaaatctcttttactctctagtccagtgctgtctaatagaacttctacagtgatgtgaaggaaatatctaatatgctgctatccactatgatagccagtggcttttgagcacttgaaatatggcaagtgctgctgaggagcagaattttcaatttgaattaatttaagttgctttaatttaatagccacatttccttactctcttactggaatcagccatttccccatggtgctctgaatcctcttagtgagaaatggtacatagacaccaaaatcagggtgctaagtctgtccattgttatgtggtttgtcattgagatacaaataattttttttgttttgttttgagacagagtctcactctgtcacccaggctgcagtgcagtggtacaatcttggcttactgcaacctccacctccttggtccaagctattctcctgcctcagtttcccaagtagttgggattacaggcacccaccaccacactcagctaattttcgtatttttagtagagacatggtttcaccatgttggccaggccaggctcaaactcccaacctcaggtgatctgcctgtctcagcctcccaaagtgctaggattacaggcgtgagctgccacacctagccaagactcagtgaattttaataatccagagctctccatgtatcccctaatctataatctacagtgcttaaatagaggcttttataagccattatgtacactcatgttatgtttgtttttttaattacttagtctttttccaaaaggaatttgcaacagctacataatcttataattgttatgtttcttttatattttcacagttgttttaattttaaattgtaaaagcaaacaggatattcttataataaaaatgttctgagatgtttttcatatttgtgtctttcatgtggctcagaatatatgagattttcatgtcatatcattgtcagtattcagccttttctccacattgtgtggggtagaggatagagtctagaagcttataaaatggtcacaaatgaggaagtagagaaaacattcagcctagaaagcgtgcatttgtggtatgaaaggcactgtggaatgctgctggattctgcccttcagtagttacccgagagagaccgaggcagacgcatagctccctcctcagcaaggagaaaagagttgcctgctttcctcagcgtgctttccatttcctttgttttgaaaaaagcacattatgctaatcaactttccttaaggtagacatttttattggtagatcaaaaaccgtgctttaagttataagccttctgaacttctgtatttttctcttaaattataatttccttttattcctatttaaaacccaagtgtaaaagatgtgttcataggctttctactcactcacttgcctctttttcgtaaccacagaatgacagccttaaattttaatttcctgacttggcttgcccatggcctgacttttttaaaacaaggagtttaagttaaagaaatttctccagccattattatttaaacacatttacacagtatcaaagaatttaaaaatgttgctagcagttgatactcccctcagctttcggttcagcgtgttttagattgctcctattttgttatttgtctatgaacttttatatttttcaaaaaaataaggcaagccctttttgcctgataggcactgctgagcagtataataaacaagcatgggggcaacagaacctgggttccaggctagactccactgttttcaaacggcatgactttaattcatcaagtgaacacaattaagcaaagtataagtttgggaccatggaatatccttcactcatcacacaggttactgtgaagatcaaatggatataatattgctttcaagatggcggcacacttgccactatacacaggtgatattattaggcagagtcgccacatagtccctgtccttgaaatgcaggcaaggagccctcaccaaaggccagggtggttttttgtttttcgggtttttgtttgtttttttcattgtggtatattatttcctctggcatgctattccctgtcccactcttacagaactgtgtcagtgggtcaccaaaagagagagctgattcaactgattccttgaaataaaggtagtcagacctcgcggtatgatggagatgaagcaactgatttactggttttctctatttttctgctgttcgtgttgtcatttaaacagacatggaaaccgtctgcacacgacagagatctttccgagcctttttcatctagtgtgctgtgctgacccgctcccctggatgcctgcacactcatttggttctcccttttggtcacttttttccacttaccctggcagaaattcacgtggctgtcagtagtaattcagtgacctgctttcaaaaaatgttataaattaagcagcttttctgtgtatagcttttgggttgaactgagaagggctaagtgaagggagaagctatgttgagctcagagtcagaatgccctgccccagacattttgagatgtgaatttttcatttgttttgtttggtgacacttagagagaataaacattctgagataaaaatcttccttgggcaggccagcaaagatagaattgctttagagcaatttggcacttggtcttaatcttaatagtttggaactcatatgtgactaaggaaaaggatattgcaaaaagttgtgccaccctaggctatatgatataaacttagaaagtctatcaacgtgaaaggtgaagagacctctagagacatcggggacaaactccaaatttgggaaaggtccatccacatttgcaattgttagttaggcttgggaagtggagtcattggtggatgaggcaacttccaatcaccatctcgatttttatttccctaacttttaagattattttctatagaaaatcagtagtgctgaagttggagtcatttaattgatttgtgccaacctagggaagcatttactctcgagaaaagtttggtaaccattaatcttaccttagcaacatttcagtttaagcttatctctgactttccaaagacaactaaagatttctacagtctctcttataactgatccattttttcaaaagatgtccctttgggaaggaattctcatttttagaattttagtccagaggaagtatttttttttcagataggtgaaatagaataagcagaaaattcttattttttactgttttatataccattgatgcctgcttattttaaaacaaaacacaataaaaacatgataccatctgatgagttgctttggttttactttttttttttttttttttttttttttttttttagtttatacaagtttcttattaggtcagcaaattgtaaaacacataatttgccaaggcttttgaagccagcagatactgggtgaagttgctgtatgaatataataataagaaccgtttttgttcagcttgatgaaaaaactattcatgttctaaatgaaaatgtgaagatcatctaattctgacagaaaaccacctgtggacatggtcttgtttctttttatttcttctgttttctacaaaagatggcaatatttatttaaagtgctttaacaggatatcccagttaaagctttgacagactgtttatagttcacttctgcccaggggcaattaaaggcacattacaggataagcgagatgactccccggccacaggaggaggatgtgtgggtaggattattaatgttgaaatgaattatgatagagtgacatgtctgcaagagcaccatgggttagtaacttaacaagaattcatatgcagaaacccataattctcagcagttctttagggtaaatgaaactaaagtttagggagagagaacaaggagaatttgcaaagatatgtatgacagtatttaaaaatgttcttccagcacaaagacattaatcttcctttgtcaaaataattctttctgcatgaaaagttggcatggggctcccaggcttcaggtaagatgggagaaagggagcgtttctttttttttgtaccaaagtactcaatcttctgatcttccttgactttcacgacataggcatatgtctactctgaccagtttgtttcatttattgtggtaagatgtgcttgtcttgtgctttcctggtgcagaaaaggagctgcctcgctcatgcttggtggcctttttgttcctacacacagtggttctcgtacatggtggctaccacatcctggtgtttgtctatactgggagaatcaggcgttccaagtcatcttggctgccctagctctgagcttcaggggatatatgactcagaaatgctatgctttctggaatttggatatttcatttttatttgtttcttggtaaattctcttttgacttaggagaagctaactatttggaaaggtctctcagaactctaattacaaatatatggtaccttctttatattgatctcatttttaaatacctagtcctggaggaagagctaaatatgaatacagtgatgagctgtgtaggggatctcacaggaacacagtcagatttcaagttgaaaatagattcagttgataatacttagtactagattctcctgaatcgactttgggaattctgagtcaacctaaggactatattacaaaggatcagaccttgacttttaggccaggtgtagtggctcatgcctgtaatcccagcactttaggaagccaaggcaagtggatcacttcagtccaggaggttgagaccagcctgtgcaacacagcgagaccctgtctctaccaaaaatacaaaaattagccaggtgtagtgtagcacctgcctgtagtctgagctactgaggaggctgaggttggagaatcaactttaaccccggatatggaggctgcagtgagctgtgatcatgccagcctgggcaaggagcaagaccctctctcaaaaacgaaaacaaaaaagacacagaacttgacttttaacaggaggcatagtaatagcaagcataagattgttttaacatagcatttaagataatttacgcatttagaaaattaattctggctggttgtagtagcttatccttaatcctaaccctatgagaggccaaggcaggaagatcacctgaggccaggagtttgagaccagcctaggcaacatagcgagacccccgctctctacaaaaaattttttttaaaaaacatagctgggcatggtgacacactcctgtagtcccagctactcaggaggctgaggcgggaggcttgcttgaggccaggagtttgagggagctgtgatcacgcccctgcactccagcctgggcaacagaatgaggccctatatctaaaaaaaagaaaaatggacaagaaaattctatattgattgaagcccagctaaatagaaaaaaaaaaattctaataggccattttaaagactttggaaaaattcttagctagagtaaaacagaagcaatcctttctttcctggttctcacatctccattctcaccttcattccccttcccctccatttgtttcaagtatttttcttttctatgtgtgtctttatgtaaatttaaatttacctacaagatattatgatattaagatatttcattctgcttcctgttttgtcacttgttctttaagatccaagtccttggctccatgtgcatctaatccttgccataagccctgcatcgtacttcatattcaccatattgaactattcaccctcaagtagtcactattaaatgtcacactgttgtagcgactacaaatgcaagctcagtaactgaaaagataacattaaattttgttttttaattggtttcctgtgtcaatttcatgtttcgggaatttgtatggacagatagacaccagagagatatgcgtatttcacctgcatgcttgaggctagagaaacatgatttattcagaactatttcaaatactgtaactaacctggtaattttgtttaggaaaacattaaattcggaatagaaggcaattcagaatacctgtctgttatctttgtcttgtcatttttgagatactcagttcctggaaaatattatgataatccatcttgctatgtagtatttcaagttatatgttgagcctctgagcttgcagagtgaacatttctattcatagacagtgctgttgacatcagtggggagatggcacaagctttgtgccctaggaaagtttaaaagctagaacattacactgcaaaccctatgtcaggaaactttgttgcagcaactaggcaaggaaaccctaccactgtacccataccttgttttagtagaattatgtttctttgctaagaagtctggtgactctcacaccccatctcagcactttcctggattccaaggccctggtgccctgagcacacaacttcccaggttccttttattgtttctgataagaactcgaattagaggcagcgtctggtactcaccaggggtgtggtcccatgggtgacattcttgctccatcatttcttacccaggtaaccttgagtatggcgcctaaatcctctcttcctttcaaattgcctggtctgtaaaatggatgcagtgaatggtagctatgccacaggtgttttgtgtgagaattaaatgagaggagttatatcaataacacttagaggcatgcggtgcctatagtgagggcttgttttatgttgtcgtttaaccctttctttctcagccctcccccactccacatcccctcccactggcaatgtacaaattgcagcttcctgcctctttcctgctatctcgctccctggatgacatccctgcgtttccacctctctctcccctaatcttagctgttttcaccctttccccacagcattgccttgacagttcctcagtgtcccatcccctcttcccatggacaacaccacaaacctgcgcacacggcctgttattattcctcctgtttcacctgtgtccattctgtctcataaaggacactgtaggctctgaacagctaaggcctttcttattcttttgtcccatggaaaataatccctccagatagcaataccaggaatagtgccttttctaacccactggtttccttttgagcttacagccaccaaatcttatatctgtttgtttctgttcccctctctgcattgactgctagagagatcagagtcaagcaggaggttacatctagctggggcactgtgctttatgctggtgtttcgtgtgcaaatctcataccatcttcatgttacagttgttccttagtgtccatgggggatttgtttcagaacccgcaaggacaccaaagtccagggatgctcaagtccctgatataaaatagcattgtgtttgcatataatctacacacatcttaccatataattttttttattatttgtatacattcgtggggtacaagtgtaattttgttacatggatgtattgcatagtggtcaaagtcgaggctgtgagtgtatttatcgttggaataatgtacattgtacccgttcattcctgtatactttaagtcatctctagattacttataatagctaatacaatgtaaatgctatggaaatagttgttatattgttaggggataatgacaaggaaaacacctatacatgttcaatacacagcaattatttttttctgaatatttttgatctgccattgattgaatctatggatgtggaacccacagatatgggacccacagatgcagagggccaactgtgtttattttttccaaatttgtttccctgttatgactcttctttatacacatttttaaactctgttgtcttgtatttcttttctaatcatcttacgtccttttggaaaccaagtggggcataaatagtacatgtttgcatttgaggcaacacagaggcatcgcaggagctggagacagcaaagttcaaagccagtccaccacttacctacagagtggccttgggcaagttacctccattttctgtctccattctcgagcctgtctagagagagaatgaacctgcctcccgaggtgatggtgctgttttaatgaaataatgcatgtgaaatgtgaagtgccactgtccctggcatggagatgctgtccttagatattaggtccatcttgtatcttctagtgtatctttaaaaattaaactatactggcttcatgcctgtaatctcagcactttgggaggccaagaccggcagatcacttgagtccaggagttcaagaccaacctgggcaacatggtgaaaccctgtctctacagaaaatacaaaaattagtggggcttggtggcacgtgcctgtagtcccagctgcttgggtagctgaggtaggaggatcacttgagcccaggaggctgaggctacagtgagctgtgattgcaccaataccgatcagcctggtatgacagagcatgactctgtctcaaaaaaaaaaggaaaaaaattaaactatactgataaatatttctaaagtaattgatgaaaacatatatatgacacttagcaggtattgatcaattccagtgcgtgcatgagctgctttgcactgtggctacggcactcagcagtttgcttagtgagtagatggccatagctcactttaggtatctggagaataatgctcattcctgtctccagctttgtaaaattgcctaatagacggaaggcattaaaatatgaagatgggattatatcttatgaagctgcttggaatgggttttccctcttaacaaataatttctgatcatccatatcccttaagaacaccggatttctgggggccagggaggtaagattctatctgacaaagccttcctggtgtcaaccacttgccatctgttggtcagtgctggccctgctgggtctatagaatgagcttctttgtctgacgctcctgttgccatccctttctccatcagccttgtagcagtacctgggaacctgcatcctgtggaaagatggaggagcagatgacatcttccagtcaagctcgtaaatacgtgaatgcattctcagcccggacgctggtcatgtgagacatttccagaaaagcattatggttttcagaacacttcaagttgacttgggatatatcattcctcaacatgaaacttttcatgaatgggagaagaacctatttttgttgtggtacaacagttgagagcagcaccaagtgcatttagttgaatgaagtcttcttggatttcacccaactaaaaggatttttaaaaataaataacagtcttacctaaattattaggtaatgaattgtagccagttgttaatatcttaatgcagatttttttaaaaaaaaacataaaatgatttatctgtattttaaaggatccaacagatcagtattttttcctgtgatgggttttttgaaatttgacacattaaaaggtactccagtatttcacttttctcgatcactaaacatatgcatatatttttaaaaatcagtaaaagcattactctaagtgtagacttaataccatgtgacatttaatccagattgtaaatgctcatttatggttaatgacattgaaggtacatttattgtaccaaaccattttatgagttttctgttagcttgctttaaaaattattactgtaagaaatagttttataaaaaattatatttttattcagtaatttaattttgtaaatgccaaatgaaaaacgttttttgctgctatggtcttagcctgtagacatgctgctagtatcagaggggcagtagagcttggacagaaagaaaagaaacttggtgttaggtaattgactatgcactagtatttcagactttttaattttatatatatatacattttttttccttctgcaatacatttgaaaacttgtttgggagactctgcattttttattgtggtttttttgttattgttggtttatacaagcatgcgttgcacttcttttttgggagatgtgtgttgttgatgttctatgttttgttttgagtgtagcctgactgttttataatttgggagttctgcatttgatccgcatcccctgtggtttctaagtgtatggtctcagaactgttgcatggatcctgtgtttgcaactggggagacagaaactgtggttgatagccagtcactgccttaagaacatttgatgcaagatggccagcactgaacttttgagatatgacggtgtacttactgccttgtagcaaaataaagatgtgcccttattttacctacttttgttttctctcttatttgtcactatggacaacagttacactttaaagaaaatggagcagactcaaagcactttcctctaataattgcacaccatatgcacttcgtgtgaagaagccaggaatcattacaatggagaagaaagaacaagcaaactgagttaaatagttcacaaacaatcacatggacaatggggaggaatcttccagaatgcatcagtcagggtctagcggcatttgagtgcggatgctgtaaggggaattcgttcacaaatgtactgataccacagatgtgggcaggggctaggagagcaacagggtgcaggcctgaaggcacctggaaggccgcctggagggggacagtcaggaaagcaggagcccttgagaggagcactagcctttgatgagaccactgccatcgaaggagacctcacagggagggagccaagggtaaaccctaactttgtttccccatttctcctatctctgcctaggggtcctcactggcagaaccaaccagaagctggaggacaagggagctcccatatgggagccggcctgtgagccttcaagggtatgcggagtcgtttgttcaaaatagccccatttcacagatgaatctctactggctccatcttcagcttagtgttctcttcactatgctgtaatatcccttttaacataaattcctttaaatttcctttactcactctgttccaattctgaattctcatgggcatgatacacttggtgttcatagagccaaggatttgttacgcctaattactagtttttgagtcaatttggtggacttttactgtcctgctgatagatgacgtgacacgtcttcccagtgttgggaagctctttatattcatgccctctccgagtatttttccaagcgctgactctgccacttactagcagtttgaacttagacaagtcactcacatctctgagccttttttccttatctgggcaatgagttctttcccacagtgaaacttttattaagtaatgcactatacaaatgtttgttattatgtacactttccacagtccagtgatgcttgctgtgtagtgtgttgaatgcccatcttgctgataatgtgcactgccaattacacagttatattgagaggtcacttaattattaatgacaagagtgaactcaacatcttacagaactgaaatagatatttatatttccaacacgcttgtaacccaataactagagactaaaaacctaacttcatgaaaaggagtgtaaatttagctgttatggtcaaatactcacacagcacacccagttcacaagcatctccaaaacgttgattgttctgatcaattttgaaaatcatcctgctctctacagcaggaattcaggtagtacaagtgaaaacagtattatatactacttaaatgaaaggctgcccttgtgagttactgtgtgtgaagttgcttctgcgtatgtccatccagagaacaggagagacactgagaagactgatgtgtccccgacctctagatgggactgaaaattcaagataagagagatgcccagggataaacttccttctttctttagaaattatacaatattagaactgaaagggacattagatatcatcagggcttcccataaggggctcactgtcttgctttattgaaagaaaatcagttttgaagccagaccaatctttttttttctttttaaatataggtggtgtcttgccatcttgcccagactggtctcaaattcctgggttcaaccagtcctcccacctcagcctcccaaagtgctgggattacaggtgtgagccaccgcacctggccaccaatcttgatttgaattcagaccctaccctttaccagctgtgtgactttgtatgttttacttaatctctcaaagctttattttacttatattttaattatactggagataaaaatgcatttcaagtcaaggttgttattgtgaagattctgcaagtaaatacattcttgcatctctgtaaaatgttgccgtgcctgttgattagataagtcaccatgatgacttatgatcaattagagaaaaatgtctgttacccagcgatgggaaagtgaatacctccgagacccatgtccccaattgtgtgttaaaactattctatgttaaaaacttactttaaaactcaattatatcttctcaaaatattactaatcattctaacatattttagttaatatgtttctccttgtacaaatatatatgtgggaagtagagggcatatttttccttaagcttgctgctttctaatccaaaaaaaatgtgatgtgcaggtctattacactccacttaaaatacttacaactttggggcttatttttctcctttgaaccattactattataaaaatcaattcttccttagtcaccaagtcctcatccttgaggaaaggaagtcagctaaaatacaaatctctttgtaaaagtaaagtttagcgacttgggaggctgaggtgggaggatcccttgagcccaggagtttgagaccagcctggacaacacagagagaccccatctctgaaaataaataaatttcaaaagtaaagtttacttatatacaattatacctagtaactttgctccctatagcaaaaggaagctaaactataaatcttatggaacttgttagtgttctggtaataaacagttaataattttttaaaattaatattcagtgaaaataatcttggccaggtgcggtggctcatgcctgtaatctcagcactttgggaggctgaggcaggtggatcacctgaggtcgggagttcgagaccagcctggctggccaacatggcaaaaccccatctccattaaaagtacaaaaattagtggggtgtgatggtgcgtgcctgtaatcccagctacttgggaggatgaggaacaagaatcacttgaacctgtgaggcggaggttgcagtgagctaagattgcaccactgcactccagcatgggcgacagaggaatgctccatctcaaaaaaaagaaagaaaagaaagtaatcttgatgctaatatggaaatgaaagaggtggtttgatatttgtctttacactatatttctttaattcaactagtacatgtcgaggctctattttgtgccaggtgctgtgtcagaagttggggttagagctcagaacaacatagatcaaagtccctgccctctgtgagcttatgttcagatgggagatacagatgagtaaaggttactacaatataatcagaatagggataacggagaccacgtagagcaccagatcaagacgtggaggaagaagacaggtttcctacagaactgacacctaggcaggactgacagataaagtcaggcaaaagttggaaaggacagtagagtaagatgtgacatcttaaacttgctgaataaaaacacccaaatataacaagttatctttaaattcatgatgatatattgtatttggacattcaggcagttctactacctgagtatatctagttagtaaattttttccccatgctccaaacaacagtttcacacccctttctctcaaactctccatcccgtttctacccagtccccgcagataactttgactcatacacgaatgagaaaagagaagccgtcaagagccacacctgcatgcctactctgtctcttgttagcatgggtgagcatgcccagctgcagtcatggactggcccatccatctggcctctgcaagccattcctctgtatcctcaggggtttcatcttgtgaatactctctctctccccgacatcatcattgtcttcctctctcccaattattccctcacattaacatggtctacaacttccagcaggaaagacaatgttccctcatcagtatagtttaattttttttcttttcttttttctttttttttgggggagtggggacagagtcatgctctgtcataccaggctaatcagtattggcacaatcagggttcactgcagcctcagcctcctgggctcatgtgatcctcctacctcagcttcccaagtagctgggactacaggcacgtgcccccaagccccactaattttcgtactttctgtagagacaaggtttcaccatgttgcccaggctggtctcaaactcttggactcaagtggacaatatccccttatataccccatcataccaccccatttatctgctcctcagcaaaactgcttaagggaattctgtatggcaggtccccacttccccaggttgcctcccctctgcccactccacatgaactttcattgcccccactcctccatgcctgcctcttcaatgtcaccagtgacctccacttcgccaaatgctgtagtcacttcttgggcctcattttactttacttattggcagcagtcaacagagttgacaccccctctttctctaaccatttttctctcttggcttcaggcatgactctcttggttttcctgcttctcactggttccctctgtttgctgctcctcctcactttgggcctcaagtggccctttcctccttctctctccatcattcttcctaaaggatttcatcagtgctgtggctttaaataccatctcttcacccctgagcccactctgaaattctagactcctgcagcctattccatgttaacatcttccccatataagcatcttagattaagtatgaacaaaacagaactcataatcatttaaatgcttttttctcattagcagtaattggcccttgtatcttaatttcttcatttctcaagccaaaaatttgtcatccttggtttctctctttaccttattaccctccttacactcaaatgctcagaaagacctgaatattctatctgcaaaatgtatcttaaatgtgtctgctttttctattacctgtaataatcttgttagtaatgacacaatatttatgaagtgctctcaatatgctagggaagaagaaagagggagagagaaaagaagaagaaaggtgatgtctgagaggtgagttttgagaaactgaaagagaaacctggaggaaaaaaaaagatacgaggccggagagaaaagcggtgtaaatagagcttgaactttgtccgtagagatatggggagttatggaatggtttctgcagtgatataaaattacttatttatagctgattcatataaataattttgttcaaatccctttttcatagacagtataaaattaaaccttaggttagcagggccaaatgctggcagggcctgaatcttatactcagttaattggattgtacatagtgcacttcctactgcttcttaatttcaaaagaatgtgctttaatcccagaaaaatcttattgaaaacatatcttttgatccgaagttcataagggctgttttcacgttttatagtccataaagtaattagttcaggaagaactgattacttaaaactcttttcttttttaagagcagaatattatcaacaaataatttctctaaaagtttcctcatcattttcaaaagccaaatcttctactgaatttttcgtatggaataatctgattatattttgatattttggtcattaagaaattctgccaatatttgttcttgaaggtgttcttagcttaattttatattttcttttactctttaatctagaatgcatttgtagagtcaatgatcctcagaaacacattggaaatttgtttaaaatggagattcttgacgtcaccctcggattctgatttatgagtcaggtgtagacctgggaaggtttaacaagcttgcagctgattctaatgcaggtggtctgagaggaccacaccaaaacaccctgccttactcccccaaccctgtgttttctgtctaaacactccccaatagctttcaattcctttggggcccataatttttaattaaaatgcccatttgtctatagagtattagaaaaatattaagaccctaactataagtagattttcttaaatccagggaattattatgttccagatgttggtactaataatggctaacctcggccgctgatccatcttttgtttgatttttataatatatggggaagcataattttgtatatatctaaacctctttagaaatatggttcaattgcatatgatctgtcataagggaatttatatctcacgaagttaagcgcataaacaaaacaagaccaaacacacacacacacacacacacacacacacacacacacattttcattcagaaatccttggttctaaaccagtctctaatcaacatgccaaaaacccttgtttcaaatcactttactcctctgtgctttgggatttctatttaaatggggtaagtatttaatcctgtatatagttacaaagcccagggagaacctcagatcaaagacaaaattgaaagaaagctttagtaggccagagacattggagtaccaaggatataattgtgaggttttcctgctagaaaacatcctctgaaatgaacttataagttaacaaatcacccttcgcctgtgtttgggggcagatgttaggcagagtcaggatttgtttccattcggtcacttttctaaagaatacaaatccatccacctattctttaatggtcctaaatagctaacaatggacagacaactcccttcccttccttgcccagtttccgagtcaaggcgcgcagtgttcagtgtatgacctgaagccttctggaaagtggtgattggttagggtactcgccagtttggccttactttgaacatcccaaatttatttccttccccatttcaaatattccgaaatgaaagacattaggagcacgtattctggttaaatacggtgattgaaaatacgaatgaatgccactccatcatgaaatttcactaaatgacaatgagtcagcaaataaggggcataaatatacaagttaaagagaacaacaggtaagagattatttgtcaagagcctgtaactcatttatttattcaacaaatatttactgagcacctcctctgcaagcaacacagaattcaaaacaattaaatatgtattacatatacagcatatatgtttacatataaacaatatataacatatataaagttactggcagagtaatattttcttggatagtcacagatgtattaagaaacaggcttgtttcaaatttgcttttttaataaccatatttctttaacatattctttttcatcttttaccatttctgacatcagattgtgtctttaacatggtctgatttttcttttgttgtaaacttattaaacccatagagtcttataattgatgataccataaaataaaggaaaagcttggaaattaaccagcagaaatttcagaaaggaccccttaggtttctttttttttttttttttcttctgagacaaagtctcactctgtcacccaggctggagtgtgcagtggtgagatctcagctaactttcatcagtaatgaaaccagcaggtgttctgctccccaaaaactttgtccactgtctccagacactcagagccacatgcttaactgtggctcatgggttaatgcatgtctgaactttttcagggtggaaactcccttttttctttagtgtctaacccaatgcccaacatgacataagtgctcagtaaatattcagacaatccacgtatgaatgtggttgagcatctgtgagtggtctcacctccaccctacatgtgttactatggtcaaccacttcatctctgtgggtctctgcttgctcagctataaattatttgggatcagctcagccatagattccctccaactctaattatctctgagtaaatgaagtcatgaaaatatgggaaactgaggcaggagaatagggtctagaggcagggaacctagggctgattcacaattaattcctagaactaaatcaaaaggaaaacccccaacttgccatgcccaactatcaaaaggaccagaggctactccctttacaaccccccaactttttccgcatggcagatgaaatattgaaagtacctctgattggtccccttctgcaaccaatcaggttggtcatgggtcaagtcttcatttgcataggagtataactttgtatatactctattttatcccctcccacaagcaatcagactgatcatgggccaccacttcatttacatagggtgtacaccaagtaagcaatgggaaacctctagagggtatttaagtcccagaaaattgtgtaactgggctcctgagccacttgctcaggtctgctcccaccctgtggagtatgctttcattttcaataaatctctgcctgtgttgcttcattctttccttgctttatttgcacattttgtccaattctttgtccaagacaccaagaacctggacaccctctaccggtaacaaaactacagtgattttagagggtttgtttgaagtgtgtattgctcatgaaggtaatgcctttgatgataacatttgctaaacaccacgtaaaggaagggaggcatttccacactttgggtctcctcccatctctatccccaagccttaaaatttctgcttaaatgggagtcgaaggaacccaacaatactcagttgtgtcacttaaaggctgtgcaacatcgggaagctttctgtatgtcttacagctagttcatatcacaagccagccgtttcatcatgcaaaagtctaaaacaacttacacctactttctaacattcttacggaaaaaccaatactgttgaacagaggtggacaaattatagctcctggccaaatctggcccacttcctgttttaataaatgcagttttattggaacacagccacacccttttatttcccatattatctatggttagttttctgctgcaatggtggagtgaaatagttgcaacagagaccatgtgacctccaaaacctgaaatatttactatctggccctttacagaaaaaaagtttgtgaccccagccctagaagaaaagtaatcaaaaatcacaatggcagtattagtggtgaagataatggattctgcttcagttaaacagtgtaactgagcttatgatttttcttttccttcttttttttttttttttttgagatggagttttgctcttgttgcccaggctggagtgcaatggcgcgatcttggcttaccgcaacctccacctcctgggttcaagcgattcctgcctcagccccctgagtagctgggattacaggcatgctccaccatgcccagctaattttggatgtttgtagagatggggtttctccatgttggtcaggctggtcttgaactcctgatctcaggtaatccacctgcctcggcctcccaaagtgctggtattacaggcgtgagccaccgcacccagccgtgatttttctattacctaggtccttttgttggctacacaccatgactgcttctgtttgggagttgagaacatctggtaggttaaattggcaatatttgactgatttgacctacaatatgtggtcaacttcatgtgactcaacctaatactttggcttccttcagtgtgttcagtttcaattccccgctccctttgtagtcttccagctacctcagtgattcttaatcttagctgtgtattagaatcatctgaagaacttaaaaaaaaaaaaatcaatgcccaggtcacacccaggaccaagtgaagccgaatctcaagggggagaaaccaagcccttggtaattttggaaagcaccccaggtgattctgaagtgcagtaaggcttgagaactatggaactaccaagagcttttggcaatacgcatgtgctaggtgctatagactccttccaattggagaaaagaatgtggacaattgtaataaataattggggcaagccggcatagtggttctcaaacattagcatgcaaccaatcacctggtgggcttgtgaaaacacagatttttggtgccaacccctcagtttctgattctgtaggtctg

SEQ ID NO: 35 - DNA, 3225 bp, Homo sapiens
ggcggcagcgccctgccgacgccggggagggacgcaggcaggcggcgggcagcgggaggcggcaccccggtgctccccgcggctctcggcggagccccgccgcccgccgcgccatggcccgaagaccccggcacagcatatatagcagtgacgaggatgatgaggactttgagatgtgtgaccatgactatgatgggctgcttcccaagtctggaaagcgtcacttggggaaaacaaggtggacccgggaagaggatgaaaaactgaagaagctggtggaacagaatggaacagatgactggaaagttattgccaattatctcccgaatcgaacagatgtgcagtgccagcaccgatggcagaaagtactaaaccctgagctcatcaagggtccttggaccaaagaagaagatcagagagtgatagagcttgtacagaaatacggtccgaaacgttggtctgttattgccaagcacttaaaggggagaattggaaaacaatgtagggagaggtggcataaccacttgaatccagaagttaagaaaacctcctggacagaagaggaagacagaattatttaccaggcacacaagagactggggaacagatgggcagaaatcgcaaagctactgcctggacgaactgataatgctatcaagaaccactggaattctacaatgcgtcggaaggtcgaacaggaaggttatctgcaggagtcttcaaaagccagccagccagcagtggccacaagcttccagaagaacagtcatttgatgggttttgctcaggctccgcctacagctcaactccctgccactggccagcccactgttaacaacgactattcctattaccacatttctgaagcacaaaatgtctccagtcatgttccataccctgtagcgttacatgtaaatatagtcaatgtccctcagccagctgccgcagccattcagagacactataatgatgaagaccctgagaaggaaaagcgaataaaggaattagaattgctcctaatgtcaaccgagaatgagctaaaaggacagcaggtgctaccaacacagaaccacacatgcagctaccccgggtggcacagcaccaccattgccgaccacaccagacctcatggagacagtgcacctgtttcctgtttgggagaacaccactccactccatctctgccagcggatcctggctccctacctgaagaaagcgcctcgccagcaaggtgcatgatcgtccaccagggcaccattctggataatgttaagaacctcttagaatttgcagaaacactccaatttatagattctttcttaaacacttccagtaaccatgaaaactcagacttggaaatgccttctttaacttccacccccctcattggtcacaaattgactgttacaacaccatttcatagagaccagactgtgaaaactcaaaaggaaaatactgtttttagaaccccagctatcaaaaggtcaatcttagaaagctctccaagaactcctacaccattcaaacatgcacttgcagctcaagaaattaaatacggtcccctgaagatgctacctcagacaccctctcatctagtagaagatctgcaggatgtgatcaaacaggaatctgatgaatctggatttgttgctgagtttcaagaaaatggaccacccttactgaagaaaatcaaacaagaggtggaatctccaactgataaatcaggaaacttcttctgctcacaccactgggaaggggacagtctgaatacccaactgttcacgcagacctcgcctgtgcgagatgcaccgaatattcttacaagctccgttttaatggcaccagcatcagaagatgaagacaatgttctcaaagcatttacagtacctaaaaacaggtccctggcgagccccttgcagccttgtagcagtacctgggaacctgcatcctgtggaaagatggaggagcagatgacatcttccagtcaagctcgtaaatacgtgaatgcattctcagcccggacgctggtcatgtgagacatttccagaaaagcattatggttttcagaacagttcaagttgacttgggatatatcattcctcaacatgaaacttttcatgaatgggagaagaacctatttttgttgtggtacaacagttgagagcacgaccaagtgcatttagttgaatgaagtcttcttggatttcacccaactaaaaggatttttaaaaataaataacagtcttacctaaattattaggtaatgaattgtagccagttgttaatatcttaatgcagatttttttaaaaaaaaacataaaatgatttatctggtattttaaaggatccaacagatcagtattttttcctgtgatgggttttttgaaatttgacacattaaaaggtactccagtatttcacttttctcgatcactaaacatatgcatatatttttaaaaatcagtaaaagcattactctaagtgtagacttaataccatgtgacatttaatccagattgtaaatgctcatttatggttaatgacattgaaggtacatttattgtaccaaaccattttatgagttttctgttagcttgctttaaaaattattactgtaagaaatagttttataaaaaattatatttttattcagtaatttaattttgtaaatgccaaatgaaaaacgttttttgctgctatggtcttagcctgtagacatgctgctagtatcagaggggcagtagagcttggacagaaagaaaagaaacttggtgttaggtaattgactatgcactagtatttcagactttttaattttatatatatatacattttttttccttctgcaatacatttgaaaacttgtttgggagactctgcattttttattgtggtttttttgttattgttggtttatacaagcatgcgttgcacttcttttttgggagatgtgtgttgttcatgttctatgttttgttttgtgtgtagcctgactgttttataatttgggagttctcgatttgatccgcatcccctgtggtttctaagtgtatggtctcagaactgttgcatggatcctgtgtttgcaactggggagacagaaactgtggttgatagccagtcactgccttaagaacatttgatgcaagatggccagcactgaacttttgagatatgacggtgtacttactgccttgtagcaaaataaagatgtgcccttatttt

SEQ ID NO: 36 - DNA, 1923 bp, Homo sapiens
atggcccgaagaccccggcacagcatatatagcagtgacgaggatgatgaggactttgagatgtgtgaccatgactatgatgggctgcttcccaagtctggaaagcgtcacttggggaaaacaaggtggacccgggaagaggatgaaaaactgaagaagctggtggaacagaatggaacagatgactggaaagttattgccaattatctcccgaatcgaacagatgtgcagtgccagcaccgatggcagaaagtactaaaccctgagctcatcaagggtccttggaccaaagaagaagatcagagagtgatagagcttgtacagaaatacggtccgaaacgttggtctgttattgccaagcacttaaaggggagaattggaaaacaatgtagggagaggtggcataaccacttgaatccagaagttaagaaaacctcctggacagaagaggaagacagaattatttaccaggcacacaagagactggggaacagatgggcagaaatcgcaaagctactgcctggacgaactgataatgctatcaagaaccactggaattctacaatgcgtcggaaggtcgaacaggaaggttatctgcaggagtcttcaaaagccagccagccagcagtggccacaagcttccagaagaacagtcatttgatgggttttgctcaggctccgcctacagctcaactccctgccactggccagcccactgttaacaacgactattcctattaccacatttctgaagcacaaaatgtctccagtcatgttccataccctgtagcgttacatgtaaatatagtcaatgtccctcagccagctgccgcagccattcagagacactataatgatgaagaccctgagaaggaaaagcgaataaaggaattagaattgctcctaatgtcaaccgagaatgagctaaaaggacagcaggtgctaccaacacagaaccacacatgcagctaccccgggtggcacagcaccaccattgccgaccacaccagacctcatggagacagtgcacctgtttcctgtttgggagaacaccactccactccatctctgccagcggatcctggctccctacctgaagaaagcgcctcgccagcaaggtgcatgatcgtccaccagggcaccattctggataatgttaagaacctcttagaatttgcagaaacactccaatttatagattctttcttaaacacttccagtaaccatgaaaactcagacttggaaatgccttctttaacttccacccccctcattggtcacaaattgactgttacaacaccatttcatagagaccagactgtgaaaactcaaaaggaaaatactgtttttagaaccccagctatcaaaaggtcaatcttagaaagctctccaagaactcctacaccattcaaacatgcacttgcagctcaagaaattaaatacggtcccctgaagatgctacctcagacaccctctcatctagtagaagatctgcaggatgtgatcaaacaggaatctgatgaatctggatttgttgctgagtttcaagaaaatggaccacccttactgaagaaaatcaaacaagaggtggaatctccaactgataaatcaggaaacttcttctgctcacaccactgggaaggggacagtctgaatacccaactgttcacgcagacctcgcctgtgcgagatgcaccgaatattcttacaagctccgttttaatggcaccagcatcagaagatgaagacaatgttctcaaagcatttacagtacctaaaaacaggtccctggcgagccccttgcagccttgtagcagtacctgggaacctgcatcctgtggaaagatggaggagcagatgacatcttccagtcaagctcgtaaatacgtgaatgcattctcagcccggacgctggtcatgtga

SEQ ID NO: 37 - DNA, 21981 bp, Mus musculus
  misc_feature (1845)..(2002): "n" at positions 1845 to 2002 can be any base
  misc_feature (4602)..(4936): "n" at positions 4602 to 4936 can be any base
  misc_feature (9884)..(10000): "n" at positions 9884 to 10000 can be any base
actattggtaactgtgatggttaactttgccagtttcactgggccattaggtacccaaatatttgttggaacattctagaagtatctatgagcatattttgggttgagtttaatatttcagtctataggttgagtaaaacagactgccctctgttgggaacaaaaaaaggggtccaacatccagccagagttcctgtgctctgagcaggcagacgcaggcagaactgccagacactttccactcagccccaggtggacatctaagcctctgaccccactcggcggggggtggacaaggggcagcccccaactggggaccctgaggtgacaccctgtcgtcccggggttataggagagagggaatagggaagaggttcccaacactgaccagagtcttaatggagcagagactctctatggtttaagagctttattatagaaatgcagggagaaagagagaaggtagaaaaggagagagagagagagagagagagagagagagagagagagagagggaggaagaggaagaggaagaggaagaagaagaagaagaagaagaagaagaagaagaagaagaagaagaagaagaggaggaggaggaggagggagaggaggagggagaggaggagggagaggaggagagaagaagacaaggaaaagaaagagaagagagaagacaaagagaggggagaggggggagagagtgaagggtaagaagtaagagcataagagtaagagagagaggtgggggctgaacagccctttttatggtctttactgctgctaggtaactggggaggagtttaacctgaaggtcagaatcttgggacattgcttatgtgactactgaccatgcttctcttgtggaggctgtgggaggtggtaacttaggcaggggccagagctccaggagcatgagggaacgcctactgtgtcatgaaggtaaattatgaccatcagggttcagacctcagctcgaccggagaccagcctgcaattccccacagccctccctaaagtgggttaaaagacagaaaagaattaaatatctgatcctctcccatatctacaagacgtaacttcccttgtccaaccatcttgtagattggatgttgtttttcccttgctttttaattagaactatgtcattggtcctcctgtgtcataagtctacaaagtgcatgtgtgctggctaatcttgtgtcaacctgacagacaactagaattatctgaaaggagggaaccttaattgagaaaatgcctccataagatccggctgcaaagcattttcttaaattgtgattgatgtggccgggcccagcccattgtgggtggtgccatccctggattctgggctctataaagaaagcaggctgagcaatcattgaggagcaagccagtaagcagcacccctccacggcctctgcatcagctcctgcctccaggttcctgccctgctttgagttccttcctgtcctgactttctttgatgatgaacagcaatgtggaagtataagctgaataaaccctgtcctcctccccaacttgttttttggtcatggtgtttcatcacagcaagagaccctaactatgacagtatgtcttaggaattatcagcctccataatcaggagcaaaattccttatagcaactcactaatatgccaatggtcaaaggaagttagtgaccaaatccagagagtaaggggtagaaaagtcttacacgggaggtaccattgccaggaaggttggattatcaagactcccaacacactggctgccaacaaggaaaccccaaatatcggcagaattctcactgattggcacttgcctggtaactatagtnnnnnnnnnnnnnnnnnnnnnnnnnnnnnnnnnnnnnnnnnnnnnnnnnnnnnnnnnnnnnnnnnnnnnnnnnnnnnnnnnnnnnnnnnnnnnnnnnnnnnnnnnnnnnnnnnnnnnnnnnnnnnnnnnnnnnnnnnnnnnnnnnnnnnnnnnnnnnntgtgtgtgtgtgtgtgtgtgtgtgcgcgcgcgcgcgcgcaacatgtgttggcatgtgtgccactggtgtaggcatgacagtcagaagaaaacattagggagacagctctcacaaagggtctctgttagttttcctgctgtgcttactatcacaggttagatagctcacaaccactcaggagtctcctgtctctaccaccagctcacagccactaggagtctctgccaccagctcacagcctttcaggagttgcctgtccctgcctcctgtctaactttcgagtgctgagatgacaggtacctacatctagctctcttatgtaggtcctggggagtaaactcaagtcattaaccttgttgtagcaaatgattttacccactcaactgatggcccagttgccttgatggtctgtgtggttggttggctggactttttgtttcgagataggatctaagctagataacttaggctggccttgaactcattatatagcccaggctggcctccaactcagtgcttgccatacttcaacctcccagatgctaggactatatgcatgagccatcaagcctagcaccgtgcatatttaaattgtatggtttgtattatacactatatagattttaacacatggtacattgggaatgatgtcgatttttaaaatacatatatagtaggtaatgtcacacacaaattttctttcatttaaggttacattacacaatgcatggtggcacaagcaagtctttaatgccagctcttagaagcaggaggtaaaagaatccagagttctaagtcattctaactgctcagatagttcaaagccagcctgggttgcattcaaacttgtctttaaaaaaacaagtgactcgacatttgtacaacacagtgatatttcagatgatgtttgtgaaattgagttaaatttgagtgttgtaaggatgagccttcatttatttgtcccgacaagccaaatcaacttacttatggaactaacttaaagcagtctgcttctgtaagtccaggctgtccttcaacttgtgtttccacaagctcttgcctcaaccaagtgctgagatttaggtgtgtaaaccatttgaaattatttttcacttgggctgtgtgggacaaacagcccacagagtcttgtgcttcaaggacttcttttaaaaaaaaaaatcataagctactagtctccagttactcggccagacacctccctcctcttgccttcaaatttgcctctttacaaaagctgctttgctggcagttcagtatgaatttattttacagcatatacaaggttttctggtagcttgcagttcctgagaactgcaaccgaaggctcttaagctgagcgggggacacacagtagggcactcactacgttgattggcagttgaagtggcagttggtgtggagtcgtcgctgccacgggtactcttatctttcctggccacacccctgggcccaggaggcagctctgaacagatggtgagtctccggtgccaggtgtgcagcgcgccctgcgctgtgtgaggcacagggctctttggtccttgccgcaccccacccatcctatgcccgcgagcgcccccagcgcaatgtgtgtctcggtgctgtccgcacgcgcggttagccgaaggtgaaaggctgggaaaaaaggaaccctagtgccaggcagaacccgccaccgggccagctgctcgtggcgagcacgttcctcccctcctctgactcccatcacttggcagccaccccaatcgcctgctcgcccctctgcagcagcacacacgccttcgcacttgctcccctccctattctcttttctgacacttcgtggcttacatggaccactctccagcgggatgcccttggtccccgcccgtctcttagccttcaaggtggctctcctcgttccctaatatttggggaactctaggcggctttttttttttccataatcgtaatcatttgcttgcctcctgggactccaaactgtaattgcttttacgtgtctgtggtctcgaggacaaggaatccactgagagatggtttgggggtgctgggctgggaagaggatgctctattccgattccgagtaccgtttgcggggtgggggctgcaaggaggaaagtgcgctcagcctttcctttatccaccctccccccgtcgccctcggcaagggctttggggcgccttcgaggtcctctgtggacacacaaacacctcaatcttcctgatcaggctagagcctggaggtggggaactatctggttccttcgttctgcccctgggaagaagccctggccgctgtgcgtgcactgcccctcccgcagtcacagtgagagctgaagcgtgagtcccagaccgatgcagatggcacgctatttagtccaggagaggctcacagagggtaaggggctgctgggcacccgagtgcacccagggaaccaaatggctgtcggttccggtcagtggcggaactgggccccagcggctaggtccaggctggaatcggggggaggggtgcgtagggggagggactgggcgagatcccccctcctggagtggctgctccagctgccacttgcaaggannnnnnnnnnnnnnnnnnnnnnnnnnnnnnnnnnnnnnnnnnnnnnnnnnnnnnnnnnnnnnnnnnnnnnnnnnnnnnnnnnnnnnnnnnnnnnnnnnnnnnnnnnnnnnnnnnnnnnnnnnnnnnnnnnnnnnnnnnnnnnnnnnnnnnnnnnnnnnnnnnnnnnnnnnnnnnnnnnnnnnnnnnnnnnnnnnnnnnnnnnnnnnnnnnnnnnnnnnnnnnnnnnnnnnnnnnnnnnnnnnnnnnnnnnnnnnnnnnnnnnnnnnnnnnnnnnnnnnnnnnnnnnnnnnnnnnnnnnnnnnnnnnnnnnnnnnnnnnnnnnnnnnnnnnnnnnnggcggggggcgtcaccagcccattcctgaccgtaaacctcctcagaaggcagtggtgaaacgccgctgcgagcgtcgcccgagccacgtttacagtaggaaagactttcctccgaaaagcaccaccggagtcgattgcaatttagctcctcccagtaagagtcacagagaggcaaggcgaggccggtgcaccgggagtcctaggcgagcttgggcaggacccctgttgctgagctccacggggcgggcgtgccgggctacggaaaccatttcttttcaggagcagggttggcctttgggactcctgtggtcatgcaccgtgtgtttctgccgccgccgaagcagagcgcgcagctggcggagaaaccgcattctcgctcctacccgcccgagggagatgacccgtgacctcccgagtgaggttaccagatccgaaaggggcgtctcggcttccccagccatgggggttgagggggtggggggtggaaggtggccctgaaaaaagtggacgagcaaacagggagcagcaatcggttaccctaaactttgtcttacggggaatggggggatgcccagaattcaccagcacacccaccggtccttgaaacccggagaagtgttgggggttcactggttcaggagaccaggaagggacggttggatcttcccccacgttttcccacgtcgctgcatgctcaggcaggctcagcgctgccacctggcggctgcctctcccggactgggaggagctgtctgcacgcaccagttccacagatcttgaagggtgtgccaggcctctatctggggaaagggcagaagctccagttaatgcttcctatctatgtggcccgtgcagacacacttgttttctgcttgttctcaagagtaagagggaaatgcgttggcgttgaacggcatgggtataaagagctgacttgagcctgctggttatgaggggtgagaaagtggtgaaattattagaaatatatgtttcttatctctgtgtagtctaacagtgaatatgaacgacagctttcatttatcctgcttaatatttttcgaataagaattcaacacactggtctggagagataactcagcccttgataaaggctaaggctcacaaccaaaacctaaaaaatactgtttcaatacagcccccctttcctagtccagtttcaatacaacttcctcagcaccaagaatggagtagtgcaaggggttggggggtggggagcaaaatcagccccagtgaagggttgacctgaaaacagggctgatggcattcagtttcccagagcacttccagtcaacgaaattaacaagaaggcgtcctccacctctgtttatttgaactgaatgttcaaagccagaggggctcacacactcagtttctacagccaaagcaaagcacgattcttggaaaatagtgccaagccagactcgtgaaactaatttccatgcaggttttcctccctctatgctatcgggacacattaagaagtcgaggtaaaccttcatccataccccatccataccattctgtagatgtgaggttttatgttgtgcaggtgtgtaggggcaggagaagcacattagcagttattaccctctcatgtcgaatggattgcatttaatggaataaaataaatatctgccttaattcaagacgtgaaagatctaatatcatttccaataaagaccattagttgatgattctaaggcaggacttgtttgcaaaacaatcctggctctctgttcatagaactacaaggggagcggagggaaagagcactgagcactgacttactaggggccaccaaatagctagtatctggggggaacggggaggtctctgatggagaactgattacaaagcttagggcattaggtaatgagacccagaaatcttaatatcatgatttggtattaagtccagtgcattctggtgtatatgtactttaatcaaaagctatttgtcacatcttttgtcacatgtttccatgctctaagaacaaaaacagtcacacttcaataactccaaactgtcaggtatatactctacaggattacattgtacaatggtgtaactaggtcaacggatgctaccaacacatattttaccaggtctaagagaaacatagacacagggggtgcatctcatagtcagggggacaaggaggacctttagcagctcgtgagttggctcagccggtacaggcctctctaggccaaacctggcaatgtgagttcaatccccagtacctggatagtggaaagagagcactggccgcacaagatgtcctctgacctccatctatgcacagtgccaagcagtggactcgcatacaaaaattaacttaaaatggtttatccccttttccttaaaggccttttgtcctttgatggcatatactattacagtacaccttaaaagtctgttgggttttctgacatgcatctaacaagaaaaatcagggcaggaattacttttttgatatgctctttaaattaaatatgtgcattaagcatgagtgtaactatgaggggtgatttacaccactggaaataccaccaattacaccaacactcatctttgccaaattatccaacattgttgaatacagattgtacaaggaatacatctccttatttttgtcataataaaaatactgattttgtagacaatagaccttttaggataacccagatgccattttgatggcatcttaagaaggtacatctgtgggtatcagaaaaaaaaacaaaaaaaaacaaaaaaaaaaacacatatgccttgcaaaacacttttcttggtggaggtttttttcttgaaggagtgcatactattttaggatttcctcctctgggaattaaaaaagggctgtgatgggtagcaaatagtcaaaaaaaaaaaaaattacttgctttttacccacaaaacattcttgcctgcagttgatcttagagacccagtcagctgtctccatagggtactctttccagtaaatgtctaattcttgacaccctcggcctccttccagcctaaatactctgaatgtgtgacaaggtaaatggaaatataccacccagcactactgtgctctcaatcaagagctggctctaagttggcctcctctgttactagcctgagggaaatcagtttatcatcgtattaaaggtgagttttcactagagtcccaatgctcagatcttgggaaaagggtggtttgtgtaactaagttgttctatattctaagtattatctgcatgtgttcgctctttgagacaaggacttgggtagctggagctgtcctggaattctttttttttttttttttcccttggtttttcgagacagggtttctctgtgtagccctggctgtcctggaactcactttgtagaccaggctggcctcgaactcagaaatccgcctgcctctgcctcccaagtgctgggactacaggcgtgcgccaccaccgcccagcttgtcctggaattcttaagcatcagcggatgatcttgaactcctgatcttccctgaaggcacctcccaagtactgagataacaaacggggaccaccaaaggggctttcgattacgtttcaccaccggtgaccaccttcccaccttagtctctcgaacatcgtgctgctcttactagaagtggcatttgcattagggagaactcggaatgtgtgttagaatccagagggctcaggacacacatccgtggtttataatcacacactcaccgggcactaacacaagccctctataaagctcacaaggttcccaaagcacagcaagaggaggacaatgagacccagaaagaaagatcaggagagggacttgagataggtccagcagcccactcccctgtgccacccctttctcttcttggtcttttaggcccaattgcttcaagtagcacagacacacgggagacaatgggtaagaaagagagggggaaggagagcacatagcgaacccatctatcctttggatattgtggaaaacaaacatttagaaagtgaagtcaatcccatcctgtattcaccatgatcgccctatacagaaatcacacaaagtctcttattgaggtaattatgggccactgccttagcgttccacagaaaatacttgtttggcctacccaggatttataggggaagtgaaatcattaaataactagttaacctctgtttggcaaaaagagtaagtaattactgaaaaggggagaaagaaaaaaaaaaaaaaaccctgcctttcacaaacagcacagatagcatcctgaagggatttacacaatacaccaacgtttgttctgtacccagagttgttaaaataattgtgatgacaggtgtctaggtaccactttcttaatggttttcaatatccattgatttattattgtggctccccccacttacatctctagctctaagaaggggctaagaaaagagattttgcaccaaaggctgattctttattcctgggctgaaaagaactaataaaaataatcactcggcttttaagcagaaagcttccatttacagtatttcacccttaccccccctccaagccccttgttatctaacataatggctagaatacatttccgtctctccccttaataacttcatgcattaacatcctcttcacacatgcgcgtgcgtgcgcgcgcgcgcgcgcgcacacacacacacacacacacacagaggcaaacgcgcgcgcacccagcaaaaggcggaggtgggggggaaagaggcagcagaaatctcagctgtacttctagcccttttaaaaagtttgctctgtaaattggaatgaggtcagatttggagcttctcattgcacgcggagattattattgcatcgggttccaagccaatgggaaggacgggggaggggcttggcacgaggaagcgttagttacagcggctgnnnnnnnnnnnnnnnnnnnnnnnnnnnnnnnnnnnnnnnnnnnnnnnnnnnnnnnnnnnnnnnnnnnnnnnnnnnnnnnnnnnnnnnnnnnnnnnnnnnnnnnnnnnnnnnnnnnnncagtgggggaactctgccggtaaccagctccccttcttgcaggagggagggagaaacatacatttattcatgccggtctgttgcatgcaagcttcttggcttcctaccttgcaacaaaataattgcaccaactcctcagcgccgattccgcccacagagagtcccggagccagagtcgctttggctttgcactgcaggaaagggacttaggcgctagagacgatgtcgctttcctgagctaccgcgagctctcgtgaactgcaatcgactgcttcagggaaaggggtgggggaaagacttgccccggaggcggcgagaaacttgcgtttggaagatactccggctaccaacgtttggagaaactcctcgccgcggccgactccagcctcggtgcccgcagggagcacttcagcggtgagggaggacggagggcctcggggactctaggttggcggcgggaggcggccgcccctggcccgcgcgccgctcaggggaccctggtctccgccccggggagcccgcagggcccggcgaccgcgccgcgagcgtgtgagcgcgcgtgggcgcccggcaagccggggccatggtacaacagaccaacaacgcggagaacactgaggctctgctggccggggagagctcggactcgggcgccggcctggagctgggcatcgcgtcctccccgacgcctggctccaccgcgtcgacgggcggcaaggcggacgaccccagctggtgcaagacgcccagtggccacatcaagcggcccatgaacgcctttatggtgtggtcgcagatcgagcggcgcaagatcatggagcagtcgcccgacatgcacaacgccgagatctccaagcggctaggcaaacgctggaagctgctcaaggacagcgacaagattccgttcatccaggaggcggagcggctgcgcctcaagcacatggctgactaccctgactacaagtaccggccgcgaaagaaggtgaagtcgggcaacgcgggcgcgggatcggcggccacagccaagccaggggagaagggcgacaaggtcgcgggcagcagcggccacgcgggaagcagccacgcggggggtggcgcgggcggcagctccaagcccgcgcccaagaagagctgtggccccaaggtggcgggcagctcggtcggcaagccccacgctaagctggtcccggcgggcggcagcaaggcggctgcatcgttctctccagagcaagctgccctgctgcccctgggggagcccacggccgtctacaaggtgcggactcccagtgcggccactccggccgcctcctcctcgccgtccagtgcgctggccaccccagccaaacaccctgccgacaagaaagtgaagcgcgtctacctgtttggaagcctgggcgcttcggcgtctcccgtcgggggcctgggagcgagcgccgaccccagtgatccactggggttgtacgaagatggaggcccgggatgctcgcccgatggccggagtctgagcggccgcagcagcgcagcatcatcgccagccgccagccgatcgcccgctgaccaccgcggctacgccagcctacgcgcagcctcgcccgccccgtccagcgcgccctcgcacgcgtcctcctcgctctcctcgtcctcttcctcctcctcgggctcttcgtcgtccgacgacgagttcgaagacgacctgctcgacctgaaccccagctcaaactttgagagcatgtccctgggcagtttcagctcctcatcggcgctcgatcgggacctggattttaacttcgaacccggctcaggctcccacttcgaattcccggactattgcacgcccgaggtgagcgagatgatctcgggagattggctggagtccagcatctctaacctggtcttcacctactgaagggagcgcgggccggggagaaggtgggccaagaggcaggagaggagagagggaaaaaagaaaacaaaaaacaaacaaacaaaaaaacaaacaaaaaaatgttaaaaagaagaagaaagaaagaaacagaaaaaaaatgagttaaaaagaatagatggagagtagaaggagaaaggggaaaagaaaaggaagaaaaagtgcatagagctggcctggaacacgtcccgccgttggagaaggagcgcgggggcgttagtggacccgcgctcccatcccccactctcagggctggggactcgaaggaggcggagagtagacgggggcgacctttttttgttgttgttattgatgttggtggtggctaaaaaagctacttcgagtttcctccccaattttgcttgaagagactcccccccaccccacccttccaacgagcttccggacttggttgcacccccagcaagaaaagaagccaagcaaagcttctaaagaccgaaggaatctttccctcacccccaccccctcgccttggtgatttcttgtttgattttgcctcatggtcaagaaaggagggggaaaatccagcgtgccccatctcctacccaccccctctttgtattctctttgtatttttccccttcttaaaatttctttttctgcaatgaagacagaaagaaggctctggggtgatgcgtttggcatttgtgttgagcttaggggagcattggcatggagaaactccacgctggcgaagtcccgggctgggctttctcctcctccccccaccttttttccccttgtccttgcagctggagatgtgctgggagtagcaggccagcctcggaaatggacatggggacctcgtggaagccacagcaacctggttggggatgcagaaggacccggagcacagagggcgttggggttcccgggcctccgcctggggtctgtgcaaaaataaagaattaaaaaaaaaaaaaaaatcagagaggtgaggctacccagagccggcgggaggacaggagactgtgggatgtggtccaggggccgcggagtggtttgggggggaaaagagatttttttcttctcttaatgggaatcgtgatggtgttgagttatttcactggtggggttaatatagcatgttatcctgtctatcttttgaagatttctgtataagactgttgagcagtttttaaaatagtgtaggataatataaaaagcggatagatggcgctatgtttgattcctacaacgaaccgatcaccagctccttttcatttttaactctttaaaaggattcaaacgcaactcaaatctgtgctggacttttgaaaaaccacaattcaggaccaaattttttctccgtgtgtgtttattccttataggtgtaattgagaagacccgtttatttttaccccctcacggactctccatctttgtatttttttttcccttgtaaatgtaatcagatgccattttatatgtggacgtatttatactggccaaacagttttcttattttgtcccccctttttttcccttttcatttgctttcttgtcttttaacctcgtttctttatcttcttttttattttctttctttttcttcgtttttttttttttctagtgttgttacccacgccattttacgtctcccttcactgaagggctagagttttaacttttaattttttatatttaaatgtagacttttgacacttttaaaaaacaaaaaatgacaagagagatgaaaacgtttgattattttctcagtgtatttttgtaaaaaatatataaagggggtgttaatcggtgtaaatcgctgtttggatttcctgattttataatagggtggctggttaatatctcacacagtttgaaaaatcagcccctggtttctccatgtttacacttcaatctgcaggcttcttaaagtgacagtatcccttaacctgccaccggtttccacctttcaaccccctggtcttataaggggaggagagttcagcccagcaccataatgctttaaaaaaaaaaattttttttttttaacgaattgctgttctgtccagaggtttttaaaactggtgcattcacagcaaaaagggattctgtagctttaacttgtaaaccacatcttttttgcacttttttttataaagcaaaaacgtgccgtttaaaccactggatctatctaaatgccgatttgagttcgcgacacaatgtactgcgttttcattcttgtatttgactatttaatcctttctacttgtcgctaaatataattgtttcagtcctatggcatggtgatagcatatgtgttcaggtttatagctgttgtgtttaaagattgaaaaaagtggaaaacatctttgtacatttaagtctgtattataataagcaaaaagattgtgtgtatgtatgtttaatataacatgacaggcacgaggacgcctgccttttaagaggcagttccgttaagggtttttgttttaaaactcttttttttcctttctttttttatttctttttttttaaccatccatcctgtgcaatatgccgtgtagaatatttgtcttaaaattcaaggccacaaaaaaaagcaaaaaaaaaaaaacaaaaaaaaaaacaaaaaacaatatttgggggaagagaaaaagaaaaaaaatcatgccagctaatcctgtccgtcactgcctgtcaggttgttcctatataccttctgtaaataactttttttgagaaggaaataaaatcagctggaactgaaccctaaatcttgacttttgtcatccttattcctgggatctctcctttcactgcaggctgctgctttgctgctttgcagcttcgcggtggcatggaagctggtgctgattcagttaagccatcttaatggcaaaccctaagttcctcttggccagatttcgcaggcctgaccccgagtgatggcattggccacgtgtgtgtcaaccctccctccgcacgccagccttcgaggaattctctgcgtctactgtacatcagcaggcaccctttgtctggaaattgcaaagaggggggaggggcaggcttctctgctctcaatccagccggcaggctgaacttttttaaatgtattttttgcttttgtgtctctaagccaccatcccctttacacaccaagatttgttttgcacagaccaagaagaacaaatgagcctgttaaattattaggtcttctaggagaaaagccttccatagttacaagatgggaaaaccaaaatcaacttaggcttgctttgttggggtggggtggaggagtccccttaaatgcaaaggtcagtagggtgtggtgtaatccaagtacttgagaggcaggccaggctcaaggatcctgagtttaaggcctgagtggactacttgattgaaactctgtttccagaactaccaaagttactatggccctaagctgttcatcttatgccccgcccaacatgggcgtcactgtgagtaaaatatagcctacctgctcaccactggaatgacaggccaagtaggagagtgtagatttttataggcaccagacacagcattagtgaagcctgcatgcagctggacagtagtcggtgtttattttagagatcaacggtctccatgggcaaatagaagtatcttcccttcccaaggctcatcttcacaaatgtgtgctttccatgtttcctagtctttccgccctggagagaaagggttaacatgcagcacttggaaacaatcctttctgaggatcggaggcaaggtgcttgcatcctgggatcacaacagaaagaagacttaagggccagtaccgcaagcatttttgcacagtaaaaaagccatttgctaggggttggctgtgatcaacttacactacatacttggatgaagtattcaagggggggaaaaactgaaaaagcaattccctctctaaatactgttctaatatcatttttccctgagaccttgaaacagtatggtgtaaatttttcttttttaaaagagctttgggaaagagttgatatgcttgtttaatggttgattattatggtgaggataatagagcatcttagggtcttggagaagaaagcctttgatagttacaagacggggtgggggtggggatgacttaggcttgctttgttagatttggggtgggggtttcccctcaaatgcaaaggtcagtagggtgtggtgtaatcgaaacacttagagacatgccaggctaaaggattctgactttaaggccatagtggactacttgagaccctgtttccagaacaacaaaagaccttgttccttcccccttctcccccgaccagacaaaaacatcgaaatcctactgtaaatgaatcctgtatgaatcatttttaagtgatgcatattttcaaataagtttgtatttttgtaggctcttctgctacagccttgtttattttcccctgactttgcatgggaggagcaagcagatgctttcaaatattttctttaagaatcctaaggctcagggtgaaagtggagcagtgcacttagctagcgtgctagaggccctgggttctgttcccaggcccctgaaaaaaacaaggaattctggcacatcacccttttctctttaaagtgttgataccgcgtgcttcctagcaggggcgtggcagatgtgaaccactggaaccctgtattcaggaaggagacttacatgccagactgtgcaagggaaaatagatattagaaaaccacttcacggtgactttcagatggtgtggctcagcagaaaagagtgagctccagctagcttttcgctcttgttcttaagacccggcttcaggccctgtgctcagtcagcaatgtggattagtgacacttgtcaccattgtcagttcttagctgaatcccctgaagagccatgaaaataaataaataaataaataggcagcctccaggctcctctggtggggtgagtgcctgcaggggcctcaggttactgctgactctagtctgagtaggtgtcctaaggaaagaacagagttggaaggccagcaaccactcggtttatctgctgtatagatgggatcagagtgcttcatcataaatcaatcgtttggttggttggttttgggttttccgaggcagggtttctctgtaaggccctggcctagaactctctcagtagagggggagcgccttgaacgcaaggatcttcccgtctctggaagtgagtgctgagcctgaagatgcgcacccaacaccacaccctctcacctcggatcttaacccactgacctagaaggttttggatagcagggcatggcggtgctgtccatttaaaaaagaaaacttccagaaaaatctaagaccccccaaatctgttagatttctcaaggtggaagttttctgtcatttttttttttaatggatactttgagttgtttttttttttgttttttttgtttttttttgttttttttttttttaaagatttatttatttattatatgtaagtacactgtagctgtcttcagacacaccagaagagggagtcagatcttgttagggatggttgtgagccaccatgtggttgctgggatttgaactctggaccttcggaagagcagtcgggtgctcttacctgctgagccatctcaccagcccttgagttgtttttaagattgattttatggaagtgtttgcgagtggtgtgcacatgtgcatacaaggagcctcacaacagcaaggtgtcctgttgcctggagctgcagtcacaggcaggtgagccacctaactccataccaggaactaagttcaggttctctggaagaacgggaagtagtatcaactgccagagcctctccagctttcctgttgattgtggttcacagccctggccccaggactataaatacacctctggcttctgatctcttgtgtttcccccacacacacacacacacaccccacccccggcctctctgattcatcctagaaaacaacctgaaaatccatgtcggtttttttttttcaccctgcccaccatttgaaagctggggtgggcagcttgtctgcattttcaccccacccaccatttggaagctgagttgggcagatgggggctaggggtgtgtgtgagcatcttttgatatctgcatggtgtttcagaccacactaaccatcattattatcctttgtccagggtgaggtactcggttctcgtgcagcttgtcaagactctgcacaaaatggtggtggctctcctcctccaatctccaccacccaccactgcagcacgaagcctttcctggggaagctctccggatggtggagcccaggaggcagaggcaggagggtctctgtgagttcacaaccagtctgcataatgagttccagaacagctcagactacatagaacaggattaaccctttaatgcctgtttctccacacttactttgtagtgagttcttgcataaaacctgttcttcaagcttccaaaatatattcatttcccaaaatatttgcattttgtgctatctttggcaagcagcgttgaatttagtcaaaataatccatgtgtgaatactggctctgagctaggctggctggagcacggtggtcaagtttcttagtcccttggagcctccgttctaaatcgttccatagaaggccacctgactgagaaagctgttgtgagaattgagtgtgaccccatatgtggaacacatgcagcaatgcctggcagcaatctgtgctcattaggtaccagcccttcaccttgtgcggctgattataaaaaggtaaaggttgtgcaagccaaccacagtgccagccactcagaaatcagacagcactaaataacaataaatatgctgtctgcttctcaaatccttaatattagtatgaattgaggacaaggctagagctggagcccagtggctaagtgctcgtgaagcacacatgaggccatgaggccctggattggcctcccagtatcaatcacaataagacagacctggtgaagccatgccagtactggggaagatagctcaaggctatctttggttaaatagtaggtctgggggcagcctggactttgtgagctcttgtctgaaaacaaaaagaatggtttgggagcgtgtgtgtgtgtgtgtgtgtgtgtgtgtgtgtgtgtgtgtgtattattgggaattgaaccttgagtctgggacatgctaggttctcttccatggatctaagtcccagccagaattctttttatttttttaatatatttttaaattattgctagtgaatttcatgcaagtatacaatgcaggttttgatcaaatccatcctctacactccccccgccccccgccccctagccaggactctttaaaagagcagaaccagaccacagtcttaagttctccatatattctcagtgcaaaccaaagtgaaaatgactaccctcacagtgtgttagcatgatctcaataagtatacaggcaaaagattgataccaccctttttacaaggagatgtggcgatgattcagtagtaaacctgagatcatagaatcagaaggggaagaagggtggggctgtggctcagtggtaggattcttgccctaacatgtatgagaccctgggttggagccccagcactcaactgcattaattaggaaagaagaggaagggggccctggaatcttatttcctgagcccaagaatgaacttagatccagtgtctctccaagtgtggtggcacatcattcagaagacaaaaacaggaggattgcttggcgaccaagtttaaggccaggctggcctacaaagtgtattccgggatagttagaactgttacataatgagactctctgtctctagaaaacaaaagcaagccaggagctggtgggccgtgcatgcctttcatccctgcacttaggaagcagagacaggtaaatctctgagttccaagccagcctggtttccagagtgagtgctagaccagccaaggctacacagagaaacgctgtcttgaaaaacaaaacaaaacaaaacaaaaaagaaagaaaaaaaaagagagagagaaaaaggaaggaaaggaaatgaaacaaaaatgaaaattaattaaaacaacaacaacaacaaaaacaatcagaataggtgtccccgtttgagaactagagaagcataggtgggaggccttgagtctttggtaaggattggccatcacctcaaccctccacatccttccttcagctctgatccatttctccaaggctgtcttgtacatctcagtttgaagtgcaagcttaagtaatttgtgtgtgtgtgtgtgtgtgtgtgtgtgtgtgtgtgtgtgtgaatacatattagttgaacaaatgtgtgttaaaatatgaatgcacggtcttcatttcaggagtcagcaaggcagaagaaatgatctagctatcagtagtggatcttctgctctgtcattcaaaaggtggggtgggtgaccacgctgctggttattcagaatgccttcacacagaggctctaggctacccatcctatcctaatgagattggccgttgctacagttaacttgaagggttttatggtttcctgcatgtgttgttttcctgcttaatgttaaaaagaagaagaagaaaaagctcacgtcactaaactgaatttcccagggggcttttgtatcttctgcagtctggcttatgccttggttatgatgagatacctctatgtgtggatatctgtagatacaggtgataacaaagttagcccattttctttgcttctgacagtttccattcaagacagttggtttaaatggagtcctgccaacatgccaggcacaagtcaagtcgtggcatgagctttgcagccagagcctttccttcaacctgcagactttgtggtaaaggccaaagttacaactgatttatacaccaccttgctttgaaccgcccctaagacactccagtgacaagacatcgacatctgattggaaggttttggattttatttttaatgacttggagagaaggaacaaatgaagtataatttactcagccctcttgcttctttagttattttcaatacaattatttctctatttcctgctccagggtggagtttggagggagggaggaagggaaggagagagggaggaagagagggaaatggaagccctgtctgtcaactttagcaggctcattctgtagtgaatgcacagtatgtggtggtggcatccaagttaaggagcaggcaattgcttttctaagagccaagcagcctgtgccggcttaaaggatcaattaagtcctgttgtctgtgtggttaattgtcaccttcttaccagtggctgtcctaactccctcagctctggcacctaaaacctgtgaaaatagtttcctgcaactcttcgtcctccctcccacgcctctcactttctcacccccctttcccacactccctatgtgggccttttatctctcctgtttgccattccccggagaaggcagactttgaataatttatctaaagttcctgggaagttgtggggctgtagtctcaaaacacacagcactttgttcctcccccagatagaaaggccagaagtctgtctttgacctagcccctcctcagtgaatccaggaaatgaagtaggttactaaagccatggaaagtcctctgtgtttctcaaatagtttagccagagtattcccaaatcgtttcttttaaggtattggggggggggggggtcaaggtacaatccgaacactcaggatatggaggtagaagggttgagttcagggccagcctttgctatgtagggaatttgaggcttagctgggctacaagaagacactttgtcttttttttttttttttttttttttttttttttttttttggtttttcgagacagggtttctctgtatagctctggctgtcctggacctcacttttgtagaccaggctggcctcgaactcagaaatccgcctgcctctgcctcccgagtgctgggattaaaggcgtgcgccaccacgcccggcaacactttgtcttaaaatgatga

SEQ ID NO: 38 - DNA, 2069 bp, Mus musculus
agagcagcagagtgaggggaagagggccgtctccctcccggtttccagttcttgcacgctgtttcttagagagtctgcagtgggggaactctgccggtaaccagctccccttcttgcaggagggagggagaaacatacatttattcatgccggtctgttgcatgcaagcttcttggcttcctaccttgcaacaaaataattgcaccaactcctcagcgccgattccgcccacagagagtcccggagccagagtcgctttggctttgcactgcaggaaagggacttaggcgctagagacgatgtcgctttcctgagctaccgcgagctctcgtgaactgcaatcgactgcttcagggaaaggggtgggggaaagacttgccccggaggcggcgagaaacttgcgtttggaagatactccggctaccaacgtttggagaaactcctcgccgcggccgactccagcctcggtgcccgcaggagcacttcagcggtgagggaggacggagggcctcggggactctaggttggcggcgggaggcggccgccctggcccgcgcgccgctcaggggaccctggtctccgccccggggagcccgcaggcccggcgaccgcgccgcgagcgtgtgagcgcgcgtgggcgccggcaagccggggccatggtacaacagaccaacaacgcggagaacactgaggctctgctggccggggagagctcggactcgggcgccggcctggagctgggcatcgcgtcctccccgacgcctggctccaccgcgtcgacgggcggcaaggcggacgaccccagctggtgcaagacgcccagtggccacatcaagcggcccatgaacgcctttatggtgtggtcgcagatcgagcggcgcaagatcatggagcagtcgcccgacatgcacaacgccgagatctccaagcggctaggcaaacgctggaagctgctcaaggacagcgacaagattccgttcatccaggaggcggagcgcctgcgcctcaagcacatggctgactaccctgactacaagtaccggccgcgaaagaaggtgaagtcgggcaacgcgggcgcgggatcggcggccacagccaagccaggggagaagggcgacaaggtcgcgggcagcagcggccacgcgggaagcagccacgcggggggtggcgcgggcggcacgtccaagcccactcccaagaagagctgtggccccaaggtggcgggcagctcggtcggcaagccccacgctaagctggtcccggcgggcggcagcaaggcggctgcatcgttctctccagagcaagctgccctgctgcccctgggggagcccacggccgtctacaaggtgcggactccccagctggccactccggccgcctcctcctcgccgtccagtgcgctggccaccccagccaaacaccctgccgacaagaaagtgaagcacgtctacctgtttggaagcctgggcgcttcggcgtctcccgtcgggggcctgggtgcgtgcgccgaccccagtgatccactggggttgtacgaagatggaggcccgggatgctcgcccgatggccggagtctgagcggccgcagcagcgcagcatcatcgccagccgccagccgatcgcccgctgaccaccgcggctacgccagcctacgcgcagcctcgcccgccccgtccagcgcgccctcgcacgcgtcctcctcgctctcctcgtcctcttcctcctcctcgggctcttcgtcgtccgacgacgagttcgaagacgacctgctcgacctgaaccccagctcaaactttgagagcatgtccctgggcagtttcagctcctcatcggcgctcgatcgggacctggattttaacttcgaacccggctcaggctcccacttcgaattcccggactattgcacgcccgaggtgagcgagatgatctcgggagattggctggagtccagcatctctaacctggtcttcacctactgaagggagcgcgggccggggagaaggtgggccaagaggcaggagaggagagagggaaaaaagaaacaaaaaacaaacaaaaaaaaaaaaaga

SEQ ID NO: 39 - DNA, 1323 bp, Mus musculus
atggtacaacagaccaacaacgcggagaacactgaggctctgctggccggggagagctcggactcgggcgccggcctggagctgggcatcgcgtcctccccgacgcctggctccaccgcgtcgacgggcggcaaggcggacgaccccagctggtgcaagacgcccagtggccacatcaagcggcccatgaacgcctttatggtgtggtcgcagatcgagcggcgcaagatcatggagcagtcgcccgacatgcacaacgccgagatctccaagcggctaggcaaacgctggaagctgctcaaggacagcgacaagattccgttcatccaggaggcggagcgcctgcgcctcaagcacatggctgactaccctgactacaagtaccggccgcgaaagaaggtgaagtcgggcaacgcgggcgcgggatcggcggccacagccaagccaggggagaagggcgacaaggtcgcgggcagcagcggccacgcgggaagcagccacgcggggggtggcgcgggcggcacgtccaagcccactcccaagaagagctgtggccccaaggtggcgggcagctcggtcggcaagccccacgctaagctggtcccggcgggcggcagcaaggcggctgcatcgttctctccagagcaagctgccctgctgcccctgggggagcccacggccgtctacaaggtgcggactccccagctggccactccggccgcctcctcctcgccgtccagtgcgctggccaccccagccaaacaccctgccgacaagaaagtgaagcacgtctacctgtttggaagcctgggcgcttcggcgtctcccgtcgggggcctgggtgcgtgcgccgaccccagtgatccactggggttgtacgaagatggaggcccgggatgctcgcccgatggccggagtctgagcggccgcagcagcgcagcatcatcgccagccgccagccgatcgcccgctgaccaccgcggctacgccagcctacgcgcagcctcgcccgccccgtccagcgcgccctcgcacgcgtcctcctcgctctcctcgtcctcttcctcctcctcgggctcttcgtcgtccgacgacgagttcgaagacgacctgctcgacctgaaccccagctcaaactttgagagcatgtccctgggcagtttcagctcctcatcggcgctcgatcgggacctggattttaacttcgaacccggctcaggctcccacttcgaattcccggactattgcacgcccgaggtgagcgagatgatctcgggagattggctggagtccagcatctctaacctggtcttcacctactga

SEQ ID NO: 40 - DNA, 22801 bp, Homo sapiens
tatgaagtttcctcttagcactgcttttgctgttatctcagaggttttaatagattgtattactattgtcattcagttagaagaattttttaatttccatcttgattttatttttgacccagtgatcattcagcagcaggttacttaatttccatgtatttgcatggctttgaaggttcctttcggagttgatttctagttttattccactgtggtctgagagagtgcttgatataatttcaattttcttaaatttattgaggcttgttttgtggcctatcatatgatctatcttagagaaagttccatgcactgatgaatagaatgaatattctgctgttgttgggtagaatgttctgtaaatatctgttaagtccgtttgtttcagggtatagtttaaatccagtgtttccttgttgactttctgtcttgatgacctgtctagtgctgtcagtggagtactgaagttccccagtattctcgtgttactttctatctcatttcttaggcctactagtaattattttataatttgggagttcaagttaggtgcatatatatatagaattgtgatattttcttgttggacaaggtcttttatcattatataatgtccctcattgtctttttaaactgctgttgttttaaaatttgttttggccgggcacagtggctcatgcctgtaatcccagcactttgggaggccaacacaggtaaatcacctgaggtcaggagttcaagaccagcctggccaacatggggaaaccccgtctctactaaaaatacaaaaattagctaggtgtggtggcagatgtctgtaatgccagctactggggaggctaaagcaggagaatcacttgaacttgggaggcggaggttgcagtgagctgagttcacaccattgtactccagcctgggcgataggagtgaaagtctgtctcgaaaaataataataaacaaaaaaataaactttgttttacctgatataagaatagatactccgccgctgggcgcagtggcttacgcctgtaatcccagcactttgggaggtcaaggcaggtgaatcacctgaggtcagaagttcaagagccagcctggccaacatggtgaagccccgtctctactaaaaatacaaaaattagtcgggcgtggtggtgggtgcctgtaacccccgctactcgggaggctaaggcaggagaatcgcttgaacccgcgaggtggaggttgcagtgagccaagatcatgccactgcactccagcctggacgacagagtgagactccatctcaaaaaaaataaaataaaaaaaaaaagaataggtactcctgctcgcttttggtgtctatttgcatagaatgtctttttccatggggttattcaattttagctaactcccatatacactatgggcattggtgaaaatactgactgaatttttaataaagatctagagtcattaagaaaaagttaccttcctgcatgaacttatattttggcatctatcaaatggcattgtaattaatacaactctgacctctattactgcataacaaactacccaaagcatagtgatttaacgcaacttattagttctcataattctgtggggtgtcaatctgagtgattcttctgttgtacccatctggaatcgctcctgtggctgcagtcatctgacaaaccaaccaaaactggagagtccaagatggcctcagtcacatgcctgggatgctggccttggaggggcaccttggttttccctatggggccttcaatcctcgagtaagatcagctgctgaaggtagttcacaacatgatgttttcatggtctcactggagtaggttcacaacacgacggtttcaatggacaaaccccagtacatgggcacttgtgaagtctgtttgtctcatgcttgctaatgccccatttcccaaagcaactcagtgaccaaatccagaatcagagagaaaaaggtccacataaaagcacacgtactaggaggacgatttattacaagaatctaccacatccactgtaaatttaagaactcagaatacaagtagcatcctcattatttagcgtttgcctgccacccatagtgcataattcacacctaggcagtagtactcctagggagaatttttaaatttttggacaacattttgggtgttctagtgaaatacagccctaccatgcatatttgaaatgtatattatcttattataaattacctactgtgtatttctcctttaacattgtagtttgaacattatggtttcttttttaattttgtgcatagtaagttacgtaatccacagattttatttcaggagagtaaagttatattacaaaatatttgttacaataaggcagcggtttgggtctgatatttttgaaattaatgagttaagtttgagtgttttaagtactagccttcagttatttttgaatcgtgatagccagataaagtgtcactaaattatttttttaacttggaatgtgggacaggaaggatggagtttcatgcttcaggaagcagtgaaaaatcacaaaacctctgtactgctagacccaacacttttccagatccccaaactatctctatcaccctcctttcatggcaaatttgcatatgcattattgtcagaattttgaacttattttacaaccatatacacagaattcttttctagcttgctgcttaactgaacagatggtgcagtttcccagcccagcagctggaggggaccgaggatgcgctcggcacacagtaggagcaccataaacgttgattgactgagttcattgaggcggttgacgccaggccatccactcccacgcggtactcttatctttctccaggcccacacccctggcccgagaggcggtagctgggagcagatggcgagtcccgggtgccaggtgtactgcactccaggcgcggtctggggcactgggttctacggtccctgccccacccctcccatccctatgagttcccccaaagctgtctgcgccaagtgtgacgtctgactacggcgggaacatgggaggggaagggctggaagaaaggagatcggttgcctggcgagggggcccgtgcgtcctacagtcgctacccgccacgcacgcgtccctctcctcctgacccgcgtcacttagcagccaatgcggtctccgtgccttcccacttccccgcaatcaagcgcctttcttcctccgcctcccctctttctgttatctgacattttgctctgcttccctctgcccactccccagcgggattccctccctggcagacgcgcgcgccccagcccgccctcgcacaacctccaatagcaggtcaactggcttgtaacgctggcttagggttgctcttgaagtgtttttccaaaagcgaaatcacccgctttcccccacggggctaaaactgtaattgcaacaacgggctgttgcgttgggggtgggaagcccgtcgggcgtgccccacctagaccgcctgctggggccactggggtggttttgccgccccctcaacccctgccaccccgggtcgagtaggcagctccacccggacgcttgcgccagggcctgactgccgcggctgccagcggaaaggcagagaccagctgatccaaggaggacaaagcgagccgagaccttccgcagagcttggcttcctcgtaactgcgcccagggcgcagcctctccctgttaactacctgccatatgttcccttctctcagacccgaaaccgcctcctacaggtgctggggactgaatctggagcttcgggcgcggcccttgacaagggcgcctggcaccctggggcgcctccgtggccctcgcaaactcagagagcccccaccgtccagtctttcctgcacgagcgagggatcgagggaaggcgccaatgcacgtctgtccctccgtgatccgcgcagaagggacgcttgaagactggggtgcaatgaattgtcgacttccctcagctctcagcccttttcctccccccgcgcgccgtgcacgcgcagcctgctctgcccttctgaaagagacgctgcagctgcgctctcaatggggcctcagcctgcggggtccggggaggggatgaagtgggtggttgcccagccggtgtacgaaggtcgtgtgcctgccgaagagtgggtcccacacgcacagcgcgcgccgtaccaaccaagcaaggctcacagagagcatttagtcgtccagagcaaaggatgctgggcactcaagagagcagggggccaagtggctgtcagttctggtcagtgacggaactggacagcatctccaagggccaggggatggggtaggaggacggaggagccaagctcctgggaaacgacccccccaacctatccgcgaccggttgcaaattcaaaggagggctgggagcccgcgagggtgcgggaggtgtcctcgcttgggctgcgtctgcgcccgcgtttgtgtgtgtgtgcgcgcgcgtgtcttcagctccttccccggtcgtaaaacctaaacggaagacgggtgttaaaatgctgctgacaggatcgcctgaaacatgtttacagtaggaaggactttcctccagaaagcacagtctgagtcgattccaatttatttcctccctgtaactgtaagcgaaaggagaggttcggctgccgcggcggagcgaggctgagcaccattaatccttggcgagcttaagccagggagagcgccgtgcctgcgagaccgagtcgctgcgctccggaaggcgttctgcctgaaggaaacctcttttttttttttttttttttttttttttttgagtagggagtggcctttgcactggagtccttaagtaaggcgcgtcgtttctctgcagccgctctcggaagccggagaaactgcattcactttagcaagaagacagggaaactgaaattgataatcccccgagttgggttacctgatccagacaggaagctggtctaggcttcccccgtcacccggagctcctgacaagtgagcaggaggcggcgggtggttgccctaaactttgatttatgaaaaaaaatcagaattcatcgacataccctgttactcgttgagcgtttaagcctctaactaaagaaggtacagtggtagggagtggtaggggggtcgggagaggaggaagggggagaagaaagaagactgactatccccacgatttcctacctcgcctcgcgggcgcagggaggctcagcgatgccacctggcggctgcttctccccagattgggagccggctggctgcagacaaacccaggctctccccgggtgccgtgcctctgcctctagaatagaagcagaagcctgtattcatgcttgcaatccaagtggccctgcaaacattcgtcttctgcttgttttcttgagaaaatcgaaggaaaggaataatgagttggcattggcatgaacagcttaagcctactgtgtgctagtcactggttatgagaggaaaatggtacaattgttagaaatgcaggtttcttaactcttagcttattctagtgataaaaataaatgctaggtttcatttaccccagaatcctattttgatattttgcaaatatgagttatttccatatattatttttcaatgcacgcacccccacccccattacgcgctgagcccagttacaatgcaatgtcatcagcccaaaaggatgaagtgcaagttatgtttgtctacttgactgagaagtaaatcagcctcacatggaggcttcttttccataaagtgtggaaccaaaaaaactggcgcctttcagttgacaaaggccaatgacatcagatttcccagggcttcttccttgtcaggtaaagtaacaactacacagtttttcctcctctttattttatttgaactgaatacttgtcaggtctgactagcgcctacaatcatagtttctataaccaaggcaaggcaaaatcttgcaaatcagtgcaaatccagatttgttaaactaatttccattcaggtccctccctccatgccaaaggaatatattaagcagtggaatagaatcttatttcatctatgccccataccattgtatggatgtgagattttatgttgtgtagatgtgtgagagcagaagaaatgcattagcagatattacacttacatctcaaatggaattccatcatttaagggaataaaataaaatacctaattcaaaattggaaatgtctaacatcattgctaacaaagacagtttattattctaaaccaggattttttttttctgcaaaattatcttggctttctcttaatacagctaaaagactagcattaagaattacttcatgtactgcaaagccagcagagggaacactgcgtactgatttagtaggggccaccaaatatctggtatttggggaaaaaaatgtcagtaatggagaactgattacagagcatatgaagttagggaatgagaagggagaaatcttttctcattatttggtattgagaggtccaacacattccagtgtgcacacacttagttggtcacaaagatgactttaataaaagggcattcgtcatatgttttcttacattctaagagaactaacccattagaacagatctatttcagaagtctaggcacttgtgtaatatataaatatatatgcagtaattataaagtcaatggaagttactgataccatatttcatcaagtctaagaggaaatttttcttttcatttcaactcttcctgaaataaggaggcatcctacatctagggggatatcacagtttcattggcagctttcttccttggtggaatgtaatataatggtgtgtcttaaaatttgttggatttgttgaaatacagaaaatacatgtaacaaaagaatgaggccagtggctgtgttttagtacaccctttaaaaaatccatgtgttttaagcagaaacatatatgactgctttaacttccactcttccctatcatattcgatgatggaagcataaatgactgagaaatataatcaataatgttgatactcaacttgactgaattatcaaactagctacaccctcaaatcattagttagtacaaattcaaaaataaatattcttttttattctagtgaaaatattgatcttatagataatagccctcttaaaataatttttttttgtcagattggtaacatttaaggatgtgtttctatgcacaccagagaaaatgtagtatataacacagcaacactgttatgcaaaaaaggtgcctgtgtgtttttggtttgggtttttctttttttaaggatttgtttctccttttttaaaaaaattatgtaatacaagtagctaatcgtcaaaaattatttgcttttacccacaaaaacagttttgcttgtggttgatccttacagatccagtcagatggctacatagggtgttctttccagtaaaattctaagtctgacaacctgggcctattgccagcctacatactttaaaagtttgacaagatacatagaaatttactacccagcactagtttaatctgaatcaaaagccgacttaattattttggattgactttacctaaccacttatggttagcctgaagaatattagtttcctattatagtgttaaggaaagctgatttttactacaattctaattttcagacactggaaaacaagtaatttctgtagccaacgtttattttgaataccttggcatcctttctttgccacattcttcttagtattcttcatggagttcctttcttttaaaatcaatggaatggcagggttgccactattgtccttctatggttcacatcaatgatctgtgattactttttttttttttttgagatagtcacacgctatcacccacactggagtgcagtggctcaatcttagctcactgcaacctcctgggttcaagcaattctcccgccttagcttctcgagtagctggaattacaggcgcatgcatccctgcccagctaattttttaattttttaatttttagtagagacagggtttcaccatgttgaccaggctggtctcgaactcctgacctgaagtgatccacccaccttagcctcccaaagtgctgggattacaggcgtgagccaccgcgtcctgcctgttattacttttttacataagtggctattctgttttagcctcttgaacaacatgcagcttttactaggagtgtgtctggcatttgaattagaaaggaagatattagtattcattgagggcttacaatacatcaggtgcttcatagtcacaaattcattgaaccctcacaacaaccctctataaagtagctcctagtgttcccatataatagatgaggaaaactgagacttggccacatccccatagttacaaaccattaagaaggattagcagccaggtctactatgaatccggaggccccattctcttctgctaccagttatcacctccttctacagtttctctttgccttggtttttcagttcccttcgattcaagtaacaagaggaaatatataagaaggaaaggaggaagatggctttgggaggaggagagggaagagagtgaagcaatctttaattttgaaaacagggaaaacaaatatttagaaagtaaaaccgatttccatcctttacatgccattatacatcctatacaaaactctggaaatctgcctattgaggtaattacggagcactacctaatgtgtttcaagggaaagctcccctgtttgggctatgcaggatttacagggagtttaaatcattaaataaccatagttgacccttgcttggttaagagagtaagcaattattgcaaagtcctcttccctgccttccacaaacagcacaaaaacggttctgaagggatttacacaatacatcaacatctgtgctgtacctagagttgttaaaataattgtgatgacaggtgtctaggtaccactttcttaatggttttcaatatccattgatttattgttttgtggctttctcttcccctttacagctttggctttaagaaagagctggggaacagattttgcaccagaggctgattctttattccaatgctgaaaagaactaataaaaataatcacttggcttttaagcagaaagcttccatttacagtatttcacccttaccccgccccgttccaagccccttgttatctaacataatggttagaatacatttccgtctctccccttaataatttcatgcattaacatcctcttcacacactatacacacacgcacgcgcgcacacacacgcgcgcgcacacacacagcaaaaggaaaaaagaggcagcagaaatctcagctgtacttctagcccttttaaaaagtttgctctgtaaattggaatgaggtcagatttggagcttctcattgcacgcggagattattattgcatcgggttccaagccaatgggaagcccgggggaggggtttggcatgaggaagcgttggttacagcagctgattggctgcagccaagactgtgaaaggataaagaggcgcgaggcggaattggggtctgctctaagctgcagcaagagaaactgtgtgtgaggggaagaggcctgtttcgctgtcgggtctctagttcttgcacgctctttaagagtctgcactggaggaactcctgccattaccagctcccttcttgcagaagggagggggaaacatacatttattcatgccagtctgttgcatgcaggctttttggcttcctaccttgcaacaaaataattgcaccaactccttagtgccgattccgcccacagagagtcctggagccacagtcttttttgctttgcattgtaggagagggactaagtgctagagactatgtcgctttcctgagctaccgagagcgctcgtgaactggaatcaactgcttcagggaaaaagaaaaaaaaaaaaaaaagacttgcctgggaggccgcgagaaacttgcattggaagcttcagcaaccagcattcgagaaactcctctctactttagcacggtctccagactcagccgagagacagcaaactgcagcgcggtgagagagcgagagagagggagagagagactctccagcctgggaactataactcctctgcgagaggcggagaactccttccccaaatcttttggggacttttctctctttacccacctccgcccctgcgaggagttgaggggccagttcggccgccgcgcgcgtcttcccgttcggcgtgtgcttggcccggggaaccgggagggcccggcgatcgcgcggcggccgccgcgagggtgtgagcgcgcgtgggcgcccgccgagccgaggccatggtgcagcaaaccaacaatgccgagaacacggaagcgctgctggccggcgagagctcggactcgggcgccggcctcgagctgggaatcgcctcctcccccacgcccggctccaccgcctccacgggcggcaaggccgacgacccgagctggtgcaagaccccgagtgggcacatcaagcgacccatgaacgccttcatggtgtggtcgcagatcgagcggcgcaagatcatggagcagtcgcccgacatgcacaacgccgagatctccaagcggctgggcaaacgctggaagctgctcaaagacagcgacaagatccctttcattcgagaggcggagcggctgcgcctcaagcacatggctgactaccccgactacaagtaccggcccaggaagaaggtgaagtccggcaacgccaactccagctcctcggccgccgcctcctccaagccgggggagaagggagacaaggtcggtggcagtggcgggggcggccatgggggcggcggcggcggcgggagcagcaacgcggggggaggaggcggcggtgcgagtggcggcggcgccaactccaaaccggcgcagaaaaagagctgcggctccaaagtggcgggcggcgcgggcggtggggttagcaaaccgcacgccaagctcatcctggcaggcggcggcggcggcgggaaagcagcggctgccgccgccgcctccttcgccgccgaacaggcgggggccgccgccctgctgcccctgggcgccgccgccgaccaccactcgctgtacaaggcgcggactcccagcgcctcggcctccgcctcctcggcagcctcggcctccgcagcgctcgcggccccgggcaagcacctggcggagaagaaggtgaagcgcgtctacctgttcggcggcctgggcacgtcgtcgtcgcccgtgggcggcgtgggcgcgggagccgaccccagcgaccccctgggcctgtacgaggaggagggcgcgggctgctcgcccgacgcgcccagcctgagcggccgcagcagcgccgcctcgtcccccgccgccggccgctcgcccgccgaccaccgcggctacgccagcctgcgcgccgcctcgcccgccccgtccagcgcgccctcgcacgcgtcctcctcggcctcgtcccactcctcctcttcctcctcctcgggctcctcgtcctccgacgacgagttcgaagacgacctgctcgacctgaaccccagctcaaactttgagagcatgtccctgggcagcttcagttcgtcgtcggcgctcgaccgggacctggattttaacttcgagcccggctccggctcgcacttcgagttcccggactactgcacgcccgaggtgagcgagatgatctcgggagactggctcgagtccagcatctccaacctggttttcacctactgaagggcgcgcaggcagggagaagggccggggggggtaggagaggagaaaaaaaaagtgaaaaaaagaaacgaaaaggacagacgaagagtttaaagagaaaagggaaaaaagaaagaaaaagtaagcagggctggcttcgcccgcgttctcgtcgtcggatcaaggagcgcggcggcgttttggacccgcgctcccatcccccaccttcccgggccggggacccactctgcccagccggagggacgcggaggaggaagagggtagacaggggcgacctgtgattgttgttattgatgttgttgttgatggcaaaaaaaaaaaagcgacttcgagtttgctcccctttgcttgaagagaccccctcccccttccaacgagcttccggacttgtctgcacccccagcaagaaggcgagttagttttctagagacttgaaggagtctcccccttcctgcatcaccaccttggttttgttttattttgcttcttggtcaagaaaggaggggagaacccagcgcacccctccccccctttttttaaacgcgtgatgaagacagaaggctccggggtgacgaatttggccgatggcagatgttttgggggaacgccgggactgagagactccacgcaggcgaattcccgtttggggcttttttttcctccctcttttccccttgccccctctgcagccggaggaggagatgttgaggggaggaggccagccagtgtgaccggcgctaggaaatgacccgagaaccccgttggaagcgcagcagcgggagctaggggcgggggcggaggaggacacgaactggaagggggttcacggtcaaactgaaatggatttgcacgttggggagctggcggcggcggctgctgggcctccgccttcttttctacgtgaaatcagtgaggtgagacttcccagaccccggaggcgtggaggagaggagactgtttgatgtggtacaggggcagtcagtggagggcgagtggtttcggaaaaaaaaaaagaaaaaaagaaaaaaaaagaaaaaaaaaagatttttttcttctcttaatcggaatcgtgatggtgttggattatttcaatggtggggttaatatagcatgttatcctgtctatcttttaaagatttctgtataagactgttgagcagtttttaaaatagtgtaggataatataaaaagcagatagatggcgctatgtttgattcctacaacgaaattatcaccagctttttttcattcttaactctttaaaggattcaaacgcaactcaaatctgtgctggactttaaaaaaacaattcaggaccaaattttttctcagtgtgtgtgtttattccttataggtgtaaatgagaagacgtgtttttttccttcaccgatgctccatcctcgtatttctttttccttgtaaatgtaatcagatgccattttatatgtggacgtatttatactggccaaacatattttttcttttgtccctttttttctttcctttctttttacttcctttatttctttattccttccttttcctttttttcttttttttttctttttttttttttttttttggtagttgttgttacccacgccattttacgtctccttcactgaagggctagagttttaacttttaattttttatatttaaatgtagacttttgacacttttaaaaaacaaaaaaagacaagagagatgaaaacgtttgattattttctcagtgtatttttgtaaaaaatatataaagggggtgttaatcggtgtaaatcgctgtttggatttcctgattttataacagggcggctggttaatatctcacacagtttaaaaaatcagcccctaatttctccatgtttacacttcaatctgcaggcttcttaaagtgacagtatcccttaacctgccaccagtgtccaccctccggcccccgtcttgtaaaaaggggaggagaattagccaaacactgtaagcttttaagaaaaacaaagttttaaacgaaatactgctctgtccagaggctttaaaactggtgcaattacagcaaaaagggattctgtagctttaacttgtaaaccacatcttttttgcactttttttataagcaaaaacgtgccgtttaaaccactggatctatctaaatgccgatttgagttcgcgacactatgtactgcgtttttcattcttgtatttgactatttaatcctttctacttgtcgctaaatataattgttttagtcttatggcatgatgatagcatatgtgttcaggtttatagctgttgtgtttaaaaattgaaaaaagtggaaaacatctttgtacatttaagtctgtattataataagcaaaaagattgtgtgtatgtatgtttaatataacatgacaggcactaggacgtctgcctttttaaggcagttccgttaagggtttttgtttttaaacttttttttgccatccatcctgtgcaatatgccgtgtagaatatttgtcttaaaattcaaggccacaaaaacaatgtttgggggaaaaaaaagaaaaaatcatgccagctaatcatgtcaagttcactgcctgtcagattgttgatatataccttctgtaaataactttttttgagaaggaaataaaatcagctggaactgaaccctaaatcttgacttttgtcgttattatgcccaatgcctaagattggaaaggccctacagtatctggacactacacaatctgccttagctttaaaaaaataagttctcagaggagtcttgtcaaatgctaccttatcgaggaacattaaatgtctcttggccagatttcctctgaccctgaaaatgatggcatcagctgaatatgtgtcaactcaacacatgctttctaggaattttctgagtttaccatatttaaaaacgccctttgtcttggaatctgaaagagggggaggggcaacgtggacagaattcttcacagatgaaactggctagatgatctttttttcaagttggtgctcctggagctgctttctccttgatttgcccatgcttacctccagcagtggctgtaattggttttcgtgggttaaggacaaataaactgttattatcagtagattatacaggaggaggcttttaccgattatgaaatgcaaaacgtatgcatttatgcattttttttctcaagcagaaaggttgatgtgctacaatcttcattttttgccatgcccaacatggtgttaatgtaagagaactgcagcaataaggatgacctggagaagctggctgcatgtgggctcagaggaaagccccctctccaaatagcacttactttggctgctggagatttgtgctttttctaagaatcaggaaggattgttgagactgcaaggtgaaaaagtacttggatttcttaaggcccattactcttgggtttggaacatacaacttgctaagtggcactatttcctgtttattttgagagttaacaattgctattaactaacaaaagccatcttccaaatgttaattaaaaatgtgtcttttacttgtcttgagtttttcagcactggagaggaggggttaacaagcagaagtgtttggaaattatcccttagtcatttggattgcttgtagataagggagtagtatcctggaaggtacatctggaaaaagagaccttttgaagactagtctaacaggagggggttttgtggttgtccaacgaaaagcaataatgcacccccaaaaaccagtataacttgtgtttcaatataatttatctcttaaagatagctactagttttcaacatttttttcatgtgtggtgctcatatatttagttttaattgcatttgcgttctgcaattggaattccattttttaaaatgaccttagaacaacatggcatctaagtttcttcaaagatctttgtaaaaggaagaactcttctttagaaaagtgcttttaatttttgttcattgcagtgataatataatggtttagcttttttcagatccaaggtatcaataccatgacataaatgaagccttaaatgatgccttttttaaatgatgcatctcttttaaagcatatttttatttcggagggttctcctgttagaactgtttcttttcccttgactctctatgtaaaagcagatgttttaaatatttcctttaagaattttgataacattggtttaaaaataaaagctgaaatgtgtgtgtccttcctgtcaggtggtaaagtaagaagcatttttgtacaatgtctttttctctgagtctgttttcattcgtaagggatacttacttgttaggtggtacaaggcatcctaaacctgcgaaaccaaacagtttagtgtgatttttttcttacagataatttggatcaatagaaaagagtaagtttcagattttcttttaagaatatccagcaattgcttctggccctgtgttccatcacaaatgtgaatcagtgatacttgcttaagcaagttttgtcaattcctagttgaattcctttaagtgccaagaaaaaaaataaaaagcatgtaagctgagagggtgggcccagctcctgggaaggcttttagggtttgtgtttaccctgcttttgagggtactaggggagctaagggattctgaggaaagcaagaaagcaaagggttaaatggacatcaacatttaccaagggtttcctgtgtttgtagggtacacacaaattagaagacatggtctggggaatactatgggtcagaatgcttaatcatgaatttaaaacaaattcagggatcccaaggaagtatttgaaaagagagaaatgtttaaaaaaaaattttttttttttaagaatacaaacccatctggccgggcgcggtggctcacgcctgtaatcccagcactttgggaggccaaggcgggcggatcacttgaggtcaggagtttgaaaccagcctggccaatatagcgaaacctcctctctactaaaactacaaaaattagttgagcgtagtggtgcacgcctgtaatcccagctactcgggaggcttaggtaggagaatctcttgaagccgggaggctgaggttgcagtgagccaaaatcgcatcagtgcactctagcctgggtgacagagtgagattctgtctcaaaaacaaacaaaaaaatacaaacccatctacccatttggatttctcagagtgtaaggttggtatgctttatttctctttctggtggtttttgttttgtgcctcctcctggcacccctcctattaaggcctacaaaatacctctctaacccatattcactagggtttactcctacccctctgattcttcctgaaaaatgatatctccatacgcatttctcaattttcactatcatttgaaagctaaagtggaggggtgggaagaaagcatctccagacatccgcatggtgtttcaggctctgccaagtgtctaccaccattcccctgtgcccaggataaagtgcagaattcacatgctgctcttcaaggccctgcacaaaagggttttaagcccaactttccagttcttccaaattgcagtataaccaaactgctctttcctgatagactggaattcttgaaggacagaaactaggcattgaatacttcttgcattccccagtttgctttccctgcttcttttcacataataaatgctaaattcttatttcttgactttacatggtttccatgggttcctaagagcttccaacaggcatttgcattttatgctgcttgtggtaagcgccagcgccggattgcatgaaaacctggattagaatgctgcctctgagaccaacaagctggaggaccttggacagatttctcagcctttttaagtttccgtgttttaaatcgtcatatagaaagagagctatctaatgtagacagctgtgttgggaatagagtgcagcggcacgtgtgtgacatgtcgtaatgcctggcctaccccatgggctcggtgaatgctagaacctgacctcatgggtggttctaaaaagctaatgtgtgtaaagcctaacacagtgccagcaacacagaagatgctttaaattctaaaaatggggagcaaagcagcgtggccggggtccgagctggggttctgtccccactgggctgtcgccccagctggactaccaccatggaactcagggccgaatacctcagggagaagctgcagcgggacctggcggcggagcatgtggcggtggaggacaacacgaccctcaaccattgcgcctgtagcttctggcggtgtcggccaagttcgaggggaagccgctgcttcagagacaccgcctggtgaacgcgtgcctagcagaagcgctcctgcgcatccatgcctttgaacagaaaaccctaatcccagagcagtgggcccgtgagcggcagaaatgagggactgggacctgcacagccattaaattacaaatctggaaaaaaaaatttctaaaaataaatctcctgaatcaatgtttctcagtctgctacacgaatccccagcatcagaattacctggagattcttgttaagggtagcgattatacagatcgccagccaccgtcagactgtggggatggggccttaatgagccccccatagatttccagtgctcactgaagtttggaaatcagtaccctcactgtattttagcatattctcacaataagtatgcaggcgagggattatgacgccctcattgttttaacatggagaaattgagttgagaatggcccaatggctgatctgaggtcacaagatcagaagtgccagaaagggtattggaactctatctcctgagccctagaatcagcctagaacttatttctctaaatagatgtcttctccatttctacccaaggcttggtcccttggcaaaaattggcagtccctgcacttccctcagccctctgactcctatccattttctcaaggatgcccttccaccatccttgttaaaagtttaagtttgggccgggcgcccgtcgctggtgcctgtaatcccagcccctagggaggcgaggcagggggatcacctgaggtcaggagtttgagaccagcctgaccaacatggtgaaatcccgtctccattaaaaatacaaaaaaattagctgagtgtagtggcacatgcctttaatcccagctacccaggaggctaaggcaggagaatcgcttgaacctgggagacagaagttgcagtgagccaagactgtgctattgcactccagcctgggcaacaagagtgaaaatccatctcaaaaaaaaaaaaaaaagtgtaagtttaagtaattagccaagttaatgtgtgtgtgtgtgtgtgtgtgtgtgtgtgtattccagttaaacaaatgtgtgctaaaagatgaacccagggactgatttttggtagaagtatccaaggcagagaacagaaataatataaatatagtgcctggaacttctgctttgttgtttaaaaggcagagcttccagcaagtgagaaaattggaaattattcagagcacactcagcctttatagagagggctatcgtctacccattatatcctaatgagattgaccgttggctacagttaacttgaagggttttatggtttcctgcatgtgttgttttccttctctatgttaaaaagaagaaaaaaaaaaactctcacatcactaaacggtatttcccagggggatgtctgactaggctgctgcattttggtttgggccttagttaacaatggacctctatgtgtgtatgtttgtggatacaggtgataataaatttagcccattttattttcttttgacagtttcaattcagggcagttggtttatggggtaccgccaaacaagccaggcctaagtcaagtcatggcaggaagtttcttgtagggccttcctttaccctgcagattttttgttgaaggacaaagttctaagtcatttgtggaccaatatacacagctgctttgcatcatacgtaagacattctaagggtattccatttgagtgttttttttaaagggcaggacattaagaaacaaatgaaatatcatttacttagcccacttacttctttagatatttttccaaatacataattctttggattagtttttaaacacataatgaatgtgctatttcctgacataacatgcagttgaaaggcaagtgaaaacactattatccttagtaggtaggctctctccaggcagtgaatgcccagcagtgtagggcgatggttggctaatacatgtgatgcatgtaactgcttttataagagctaagcagaaggagcctgttgaatgatcagttagctcccgttgtatatgtggttaattgttactttctttcctaccggcccctgccctaacttcctcagatcaacacctaaagcctgtgaaaatagtctcttctggaacccctgaccttcagtctctgcccctgctttctctcttcccattcccacactttctatgtggaccttttatctctcctgtttgccaatccccctcagactttgaataatttatctgaagttcctgggaagttgtggggctgtctgtagtctcaaaatacactgcactttgttccttctctaggccgaggtaggtccaaaagcctgtctttgaaagaggtggtactaagtacattgagggatttactaacagttttaattttttggatgagcacccaatgaatccaaaagctggaggaaagaaaaaataaggggcaaaagatgaaggtgaatactactttgtaattctgatatctcccaaagaatgtcaagtaaattaagggaacactgattaagatttccagttcctattgttataacaatgtattttatacatgtcttttcaaatacatgagagttttccttgagtagttactagaagtggaaagtgctggatcttagtcttatagacataggcttttgacagtttccgtaccctggagctggttaggcgtaaagtggtttgaggagagaaaaactagtgatatgtctaaatgaacacaggttaaaaagtaaaccaaactttgaaacaatcattttaacccccggagaaggtgaatagattattttaatatgtaagcagatacatctgcaaatcatactgagatgatttttctatcccaagtgtctgataacatatatgaatagaaaagcgaacaattacagaaacagccttgacactgacatggtgacaaagtatggggattttagtacttccgaaataaacatcagaacagagatcaactctcttcggtctttttcttcttccattagaactcatcaggctgattcccatttctgcattactagccttacttttttttttgctaggctctgtgatgcaaggaacagaatcactcaagtaacctgaaatcatggggctttattacaaagagacacggggctttattacaaagaaacacaagactacaagggaactgaaaatgtcatggtagttctgggagaaatagtgttcaagatccacggcagctctggagagattaagtggttaccaatttagcattaagattatgcagataattaatattgctcaggtattctcttagtattcctgtgtgtgttgattttctcccaataccaaatcttgcttctgttctccatattttgtccttcatattcccttttaagacagctctgggccgggcacggtggctcaggcctgtaatcccagcactttgggaggccttggtgggcggatcacttgaggtcaggagttcaagatcagcctggtcaacatggtgaaaccccgtctctattaaaaatacaaaaattgttgggaggccgaggcgggtggatcacgaggtaaggagattgacaccatcctggctaacacggtgaaaccccgtctctactaaaaatacaaaaaaattagccgggcgtggtggcggccgcctttagtcccagctactcaggaggctgaggcaggacaatggtggtgaacccaggaggcagagcttgcagtgagctgagatcgcgccactgcactccaggctgggcgacagagcaagactccgtctcaaaaaaaaaaaaaaaaattggccgggcactgtggctcatgcctataatctcagcactttgggaggtcaaggtgggcatatcacgagatcaagagatcgagaccatcctggccaacatggtgaaaccccatctctactaaaaatacaaaaattagctggacgtgctggcacaagcctgtagtcccagctactcgggagactgaggcagaagaatcacttgaacccgggagacggaggttgcagtgagccaagatggtgccactgcactctagcctggcaacagagtgagacttcgtctcaaaaaaaaaaaaaaaaaatttgctgggcatggtggcatgcacttgtaatcccagctactctggaggctgaggtaggagaatcgcttgaacccgggaggtgaagttgcagtgagtcgagactgtaaccactgcactccagcctgggtgacagagcaagactacatcttaaaaaaaaaaaagacagctctgcatggcagttatttcatcaattacttaccaagcaatgaaacggctgctttggggttgtgtgcctacttttggacaaatcacttattaatgtattatattcttcactctcccatccctctttgttttgcttttgttcctagggtctcatggccctcatacgtcctcttatattttttctttgatcttcatatactaagggagggtgaaccccaggcttcatggaacatccacccttcctcctctaccatccacaatatcctcatttcaaacagactggcttggcttttatctatttaaaattctaaccttttccctatagctcgaattttggcactcaggcctagagatataaagagtagagattaaatatgccacattctaaagggaagccaggtgatgcccttaccccagtaatccagagcagaaaggatcctaccatagtcagtattcccctcctcaacacgg

SEQ ID NO: 41 - DNA, 2797 bp, Homo sapiens
ttccccagcattcgagaaactcctctctactttagcacggtctccagactcagccgagagacagcaaactgcagcgcggtgagagagcgagagagagggagagagagactctccagcctgggaactataactcctctgcgagaggcggagaactccttccccaaatcttttggggacttttctctctttacccacctccgcccctgcgaggagttgaggggccagttcggccgccgcgcgcgtcttcccgttcggcgtgtgcttggcccggggaaccgggagggcccggcgatcgcgcggcggccgccgcgagggtgtgagcgcgcgtgggcgcccgccgagccgaggccatggtgcagcaaaccaacaatgccgagaacacggaagcgctgctggccggcgagagctcggactcgggcgccggcctcgagctgggaatcgcctcctcccccacgcccggctccaccgcctccacgggcggcaaggccgacgacccgagctggtgcaagaccccgagtgggcacatcaagcgacccatgaacgccttcatggtgtggtcgcagatcgagcggcgcaagatcatggagcagtcgcccgacatgcacaacgccgagatctccaagcggctgggcaaacgctggaagctgctcaaagacagcgacaagatccctttcattcgagaggcggagcggctgcgcctcaagcacatggctgactaccccgactacaagtaccggcccaggaagaaggtgaagtccggcaacgccaactccagctcctcggccgccgcctcctccaagccgggggagaagggagacaaggtcggtggcagtggcgggggcggccatgggggcggcggcggcggcgggagcagcaacgcggggggaggaggcggcggtgcgagtggcggcggcgccaactccaaaccggcgcagaaaaagagctgcggctccaaagtggcgggcggcgcgggcggtggggttagcaaaccgcacgccaagctcatcctggcaggcggcggcggcggcgggaaagcagcggctgccgccgccgcctccttcgccgccgaacaggcgggggccgccgccctgctgcccctgggcgccgccgccgaccaccactcgctgtacaaggcgcggactcccagcgcctcggcctccgcctcctcggcagcctcggcctccgcagcgctcgcggccccgggcaagcacctggcggagaagaaggtgaagcgcgtctacctgttcggcggcctgggcacgtcgtcgtcgcccgtgggcggcgtgggcgcgggagccgaccccagcgaccccctgggcctgtacgaggaggagggcgcgggctgctcgcccgacgcgcccagcctgagcggccgcagcagcgccgcctcgtcccccgccgccggccgctcgcccgccgaccaccgcggctacgccagcctgcgcgccgcctcgcccgccccgtccagcgcgccctcgcacgcgtcctcctcggcctcgtcccactcctcctcttcctcctcctcgggctcctcgtcctccgacgacgagttcgaagacgacctgctcgacctgaaccccagctcaaactttgagagcatgtccctgggcagcttcagttcgtcgtcggcgctcgaccgggacctggattttaacttcgagcccggctccggctcgcacttcgagttcccggactactgcacgcccgaggtgagcgagatgatctcgggagactggctcgagtccagcatctccaacctggttttcacctactgaagggcgcgcaggcagggagaagggccggggggggtaggagaggagaaaaaaaaagtgaaaaaaagaaacgaaaaggacagacgaagagtttaaagagaaaagggaaaaaagaaagaaaaagtaagcagggctcgttcgcccgcgttctcgtcgtcggatcaaggagcgcggcggcgttttggacccgcgctcccatcccccaccttcccgggccggggacccactctgcccagccggagggacgcggaggaggaagagggtagacaggggcgacctgtgattgttgttattgatgttgttgttgatggcaaaaaaaaaaagcgacttcgagtttgctcccctttgcttgaagagaccccctcccccttccaacgagcttccggacttgtctgcacccccagcaagaaggcgagttagttttctagagacttgaaggagtctcccccttcctgcatcaccaccttggttttgttttattttgcttcttggtcaagaaaggaggggagaacccagcgcacccctccccccctttttttaaacgcgtgatgaagacagaaggctccggggtgacgaatttggccgatggcagatgttttgggggaacgccgggactgagagactccacgcaggcgaattcccgtttggggcctttttttcctccctcttttccccttgccccctctgcagccggaggaggagatgttgaggggaggaggccagccagtgtgaccggcgctaggaaatgacccgagaaccccgttggaagcgcagcagcgggagctaggggcgggggcggaggaggacacgaactggaagggggttcacggtcaaactgaaatggatttgcacgttggggagctggcggcggcggctgctgggcctccgccttcttttctacgtgaaatcagtgaggtgagacttcccagaccccggaggcgtggaggagaggagactgtttgatgtggtacaggggcagtcagtggagggcgagtggtttcggaaaaaaaaaaagaaaaaaaggg

SEQ ID NO: 42 - DNA, 1425 bp, Homo sapiens
atggtgcagcaaaccaacaatgccgagaacacggaagcgctgctggccggcgagagctcggactcgggcgccggcctcgagctgggaatcgcctcctcccccacgcccggctccaccgcctccacgggcggcaaggccgacgacccgagctggtgcaagaccccgagtgggcacatcaagcgacccatgaacgccttcatggtgtggtcgcagatcgagcggcgcaagatcatggagcagtcgcccgacatgcacaacgccgagatctccaagcggctgggcaaacgctggaagctgctcaaagacagcgacaagatccctttcattcgagaggcggagcggctgcgcctcaagcacatggctgactaccccgactacaagtaccggcccaggaagaaggtgaagtccggcaacgccaactccagctcctcggccgccgcctcctccaagccgggggagaagggagacaaggtcggtggcagtggcgggggcggccatgggggcggcggcggcggcgggagcagcaacgcggggggaggaggcggcggtgcgagtggcggcggcgccaactccaaaccggcgcagaaaaagagctgcggctccaaagtggcgggcggcgcgggcggtggggttagcaaaccgcacgccaagctcatcctggcaggcggcggcggcggcgggaaagcagcggctgccgccgccgcctccttcgccgccgaacaggcgggggccgccgccctgctgcccctgggcgccgccgccgaccaccactcgctgtacaaggcgcggactcccagcgcctcggcctccgcctcctcggcagcctcggcctccgcagcgctcgcggccccgggcaagcacctggcggagaagaaggtgaagcgcgtctacctgttcggcggcctgggcacgtcgtcgtcgcccgtgggcggcgtgggcgcgggagccgaccccagcgaccccctgggcctgtacgaggaggagggcgcgggctgctcgcccgacgcgcccagcctgagcggccgcagcagcgccgcctcgtcccccgccgccggccgctcgcccgccgaccaccgcggctacgccagcctgcgcgccgcctcgcccgccccgtccagcgcgccctcgcacgcgtcctcctcggcctcgtcccactcctcctcttcctcctcctcgggctcctcgtcctccgacgacgagttcgaagacgacctgctcgacctgaaccccagctcaaactttgagagcatgtccctgggcagcttcagttcgtcgtcggcgctcgaccgggacctggattttaacttcgagcccggctccggctcgcacttcgagttcccggactactgcacgcccgaggtgagcgagatgatctcgggagactggctcgagtccagcatctccaacctggttttcacctactga

SEQ ID NO: 43 - DNA, 53963 bp, Mus musculus
  misc_feature (205)..(999): "n" at positions 205 to 999 can be any base
  misc_feature (18095)..(18178): "n" at positions 18095 to 18178 can be any base
  misc_feature (44333)..(44457): "n" at positions 44333 to 44457 can be any base
  misc_feature (47101)..(49467): "n" at positions 47101 to 49467 can be any base
  misc_feature (52233)..(52252): "n" at positions 52233 to 52252 can be any base
ttaagaaagctggggccactggacagtggtggcccacgcctttaatcccagcaattgggaggcagaggcaggcagatttctgagtttgaggccagcctggtctacagagtgagttccagggacagctgagactacaccgagaaactctgtcttgaaaaaaaaaaactgaaggagaggaagaagaagaggaggaggaggagaattnnnnnnnnnnnnnnnnnnnnnnnnnnnnnnnnnnnnnnnnnnnnnnnnnnnnnnnnnnnnnnnnnnnnnnnnnnnnnnnnnnnnnnnnnnnnnnnnnnnnnnnnnnnnnnnnnnnnnnnnnnnnnnnnnnnnnnnnnnnnnnnnnnnnnnnnnnnnnnnnnnnnnnnnnnnnnnnnnnnnnnnnnnnnnnnnnnnnnnnnnnnnnnnnnnnnnnnnnnnnnnnnnnnnnnnnnnnnnnnnnnnnnnnnnnnnnnnnnnnnnnnnnnnnnnnnnnnnnnnnnnnnnnnnnnnnnnnnnnnnnnnnnnnnnnnnnnnnnnnnnnnnnnnnnnnnnnnnnnnnnnnnnnnnnnnnnnnnnnnnnnnnnnnnnnnnnnnnnnnnnnnnnnnnnnnnnnnnnnnnnnnnnnnnnnnnnnnnnnnnnnnnnnnnnnnnnnnnnnnnnnnnnnnnnnnnnnnnnnnnnnnnnnnnnnnnnnnnnnnnnnnnnnnnnnnnnnnnnnnnnnnnnnnnnnnnnnnnnnnnnnnnnnnnnnnnnnnnnnnnnnnnnnnnnnnnnnnnnnnnnnnnnnnnnnnnnnnnnnnnnnnnnnnnnnnnnnnnnnnnnnnnnnnnnnnnnnnnnnnnnnnnnnnnnnnnnnnnnnnnnnnnnnnnnnnnnnnnnnnnnnnnnnnnnnnnnnnnnnnnnnnnnnnnnnnnnnnnnnnnnnnnnnnnnnnnnnnnnnnnnnnnnnnnnnnnnnnnnnnnnnnnnnnnnnnnnnnnnnnnnnnnnnnnnnnnnnnnnnnnnnnnnnnnnnnnnnnaattacccttggctgcacagcatgtgtgggcgacacgagaccctgtctctaaaaagaaacagcagctgggacctgaacctgtagtcagtagcttagctagggcggggtgggggaccgggctgataatcagggatgcgctgtgaggctatttgtgtggaagagggaagggaaggaagaacagcagcagagaacaaccaaaagcatcagcctaggagaaagggaccaactggtctacctttactccctacctgtcaatgaccttactcagtcacttcctgtcactaggcctggttctttaaccatgaaaggatggagctggccaggagctctctatgaaccctttctgatgatcttcaaaagaaatgcacccccccacacacacccaaataaataaataaataaataaataaataatgctcaggagaccagtgggcaattaaattggttctacctattatagtgtctctccctgttgcccactgattccaccctacagttttaagacttcagtccatagcccactgtggttttagcttaatcataaggcctatgtcctgcctccctcatctgtgcctgtggtccagcctgggtcatgttaggaggccctgaaagctggcatctgctccagtcctgccttgtaccaccggtggtaactcagtcctcacctctcaaagtctctgtttcctcatctactagcagagctggtaaccagttcagatatgttctacggtgctaaactgatgagtgcttattggcctgaaggctagctccggctcgctgcatatgcttcacaaaatcagcctgctttgaaggatccactctgagcctatgcagacctcagtatcgggagaactggctctaacatgttactgttcagtaaacgagagggtcacagggttttatgtatactgtgaacactctaagaaataaaggaagggagaaagggtgggagaaggggaagtgagaaagaacaggactcaagcccatagggaggttgtgagtacttgcggaaactgggcagggatgtgctggacggaaagggttaaagcctgagccggcctctgagggtgagggtactgaaagagaagtaactccctacaacttggaatgtcttaagctgctactttagtaacaacttaatgaccttcaaaagctttctctggattgaagagaaacagaaattgcaggtcagatctgggaagagcagaaaaagcccaggaaacatcctgccaaaaagacttgagtcagagaccctggaaggcggagagaggggctatctttccgttggagtcataacagaagcaaccttcccaggaccccctagaaagtccggtgctgaatggatggaactagaaaacctcatcctgagtgaagtaactgggaaagataacgacggcctgtactcacaagtggacgttagccataaagtacaggataaccatgctatgatccacagagccaaagaggctaagtatcaaggagggccgaaaggaggatgcttgaatctcactgagaagagggaataaaatagacatctggggtggagggagggagggaagtgggtggaggcgggtggataggaaagcaggagggatctcaagtgtggggaggatggtgggagacagaactgggatagagaactagaatccatgtatacgtgggggagggggaagcatctctgggacaaggtagaaatctaggacaatggaaactcccaggaatctgtgaggatgaccctagctaagactcctagcagtcagggatatggaacctgaaacaggcacttcctgacaccaaacgagacttccaatggagagatgggaataccaacccagccacaaaaatctttggccctcaatttgccctgcctataagaggtggtgggataaggagggagcagaaaatgaggaagtgatcaaccaatgactggcccaaattgagcctcatgccatgggagggagcccacccctgacgacagtattaacaatattctgccgtacttgcagacaggagcctagcatagctgtcacctgagtggctctgcccagcagctgatgaaaacagatgcagagaccccccagtctaacattagacagagctcggagaatctcacggcaaagggggaggaaggattgaaaaaagccatgtcaaagacgccgcaagaaaacctacagaaccaactaacctgggcacaggggggctcacaaagactgaatcaccagagagcatgcatgggacagacctagtccccctacacctttgtaacagatgtacagcttggtcctcgtgtgggactccctaacaacaggagcaggagctatttctgacactgttgcctgcctttggatccccataactggacagccttaacagaagatgtgatatgacatggcatgttgatattcagaggtctcccttcctctggggaaaaaaggaggggcataggaggaggggaggggagaaggagggactggaaggagagggggtagggaaagctctgatcagattgtaaagtaaacgaatcaataaatggatgactagaatagaatagaatagaatagaatagaatatagtgctagaacagaccttgttcacagatccatgtaacacaaggtcgtttcaggggactagagaggacaagagactggcccacgaccacgtagcagaagttggctataaaagctctttactggtccctggttctgctgcttccaacctgtgtgcagaccattgctgctgggaagagcatgtagaaccctacctgctgagtgttttcttcttaaaaataaaaaaacaaaacaaaagaattattatgctacacaccagggtgcatgcttttaattccaactccagccctcgggacacagaggcaggcagatctctgtgaaatatgaatccagcctggtatacatagtgagttccaatatagtcagggacacatagtgagaccttgtctctaaaaacaataaataaataaataaataaataaataaataaatacatacataaataaataaatacataaataaaaagattgttattattttaaattatgtgtatatgcgtatgggtatgtgcccatgtgtagagataatctcttgtacactgtgtaaaaaacagtcacctgtcaatttaaaaaaactgaccaatgagcttaggcagaaaatcaggaggtgggacatccgggagatagaagagggagagggggatgctgggatagagacagacaggagattggccccaccctcaacccccaaatgaagatataggcagcagcaacagagtatcaggtaaccagcgacgtgacagaacttagaataaaataacaggatgattaacttatgagctagttgggggataaccaaagcctatggcatgagtgtttataaatatatttgagtctcaagagtcattattccagaagagggaccaggaggaaaaaacaggagctcacagaaaacacacaactacacccttgagtggaggtccctgaggaggtcagaagagggtattggatcccctggagctgaagttacaggcagttgtgagccatcagatgtaggtgctgtgactcagactctggtcttccacaagagcagcgagcgagtgctcctgactactgagcgatctctccagcccctggtttcctccttttcctgacctgcctgggaacctgaggtgactaaggcaggatgcttttcccaaggacacttaagtcaagtgctctggaagcttccagcttcttccatgaacaaggtcaacttttccaaactggcggagaaaggctccgaggctaatgtttttaatgcacgcctttgtttgcttctgccctgactgtggcctttttatattttatgggcttaatgttctaatttcgtgctagggccctgaggcaattcaccgaaggatgtgattttagaaaatccaggaaataaaggaattgtccgccaaagaggcatctgacaatgaattttattagggacaaagcaaatcaacctgtcgccagactgaggtattagcatgtcctggtttaatgtaggtttgtctttttaatttaatactagctctccgttcctgccggggtcagctggggatacatacccggctccttcttggctcacactactgcttgtagaaagcaccctggcctcttctcaaggcacttgccagtagtgaccagagagcctactgtgcacagcctctgagctgggggcaggtccatgtgctcagacagggaccacgagatcctttttaagggcctgttcattatcgtttggagaatgccccagaggaggaggaacttgtggggagaggctagtgcgaaagagcacgggtctttgaatgcttgcctgctcattccgcacgctcatcagcctaccataccacatcacatcatactacacatgactgtgcaagtgaaaccccaggctcatcattcacccacctgccggcgtctactttccaggtctctagttgcccgaacctatggtggccctactctctgaaggctgtatccctaaaacctgaccctttgcatccctctcctaccaatttaattcctaggggtggggtactgtggttcttttgggaacaccttagaccccacacccttttgtttcctggcggtttgacaaaacccctctgagtgtttttctttgcccgaatctgggcaggtaagccctgccttcagagaacccagcagactggccaccgtagctctagctgcatcatcaaatccatcaggccacccaggatcctgtgggcaagttgcttgactctctgaatgctggctctccctccttccaactcctcaccacctcttcttcactctcagcagaccttgcctcccacttggaagaggaaaatagaagttcaagatgaaatctcccttaacctcccactgcaaacccacatccacatgcgctcccattctctccacgagcctgctttgggcttctattgaagtcctccctcctccgttctcagaccagcccttcacccacaccaatgcctccctcccacgtaccctcagacatcgcttcccagcttcctaaaatgccccccaccaccccatctctctcccctggatctaagttgatttttaaaccaacttcggtctcttccatctcaaaacactcctcccccaataacacacacacacacacacacacacacacacacacacagagtgttagttctttttctcccctccacgcaaacctgcccaacagcccagcatctccccagccctcccacacttgtggtaccattgtccctgccctgttctgcatgcagcactttctgagtcagtcttcagtgatagcaatcagaccaagcatgacccatgtccatctcttctggccttagagcacttcccagcatttcacattactgaaactctgcgctcagctccctcgtgagccccctctggctttgctattctgctgcagcaggcttgtcttttgaacagccctacctgtgggcatgcctcaaaaacacctctggtactaccttctttctctctgtgtgttcttggtgggcatggtgtctacatctagagtcccaaagaacttctttccattgacaaatttctttcttttctctgactcagacctctaatttgtgcccaaaccaggtttcaaagtacctactagggacctgggactctctggacacttgcacaggccatgtataattcatatggtgtcctgtccctctagggctcaaattgcccctgctctccaaccagcctcaagctaaggaaacctctaaaatggagtctgtcttgtgctgtccctttgcgcccttcagtccccacatcggagtcctcctgtgccctgccagcaaggccttcacctggggtatatagctcagtggggagttcttgtttagccttcacaaggctctgttctccaaccccagcaccccatcctgggcagcacacatacacacagaggaaagcaaacatctatttgccttttgccctttctagccacagggtggatgaagtaggacagattctgcttctcctctgccattgcctccctcaacccttccccaagcccacttcctgctacctcatctaaaaggttccgcctacctgtctgcacagacaccccagaagacacacaaacaccccagaagacacaccctgaactgcttcttgcttaccatcccattccagccggagttagtggtggctgggaccagctctggggacctccataggtcattgttctatgccacagatgttgctccaccctctgtttgctaccctgctgcctgcacctctcaccattattgattttacccctcactctactctctggacacttgcacaggccatgtataattcatatggtgtcctgtccctctagggttcaaattgcccctgctctccaaccagcctcaagctaaggaaacctctaaaatggagtctgccttgtgttgtccctttgcgcccttcagtccccgaatcgaagtcctcctgtgccctgccagcaaggccttcactcgcctctccccttagttgtaacctttcccagggcagaacaaggttaagacagagtgtcactgtataggtagccatggttgtcttgaacttattatgtaaaccagattcgcctccaactcagagcaagcctctggtctctgcctctggagtgctaggatttcaggcattggacaccacccccagcttcagccataccatctgcctcaagatcttctaccaggtgcccctctgaccaggtgcctctgaccaggtgcctcttttaccaggtgcccctctgaccaggattctgctgatccagactccctcacacctagctcaggtttcttcataaacaccatttcctctgggaatccttctacttcccctaagaagagagagattccttcttcctgttattttacagtaattgctaaggtactcagttctattgctaaggagctttctaaacatttctgcttagaacgcccttccccttcctgacaactcttggaggtagaaaatggtaattatctccacttctcagataaaccaaggcacagagaatgcctagaattgccaagctcacttaataagaaacaaagccaaaatttaaatccagatcgtgtgacttcagtgtagctttcagacaccataccattccacaggaagaggctatccaccctttggtgtacgctacagctatttgtttaacaggtacctctctcattagccttggaagttctgcagacgtatagaccatgtggtctccagtagtaggtattcaataaatatctgcctggtgtctgaatgtagattagtctcctgtgtcctcacacactacgtaccacccattcctgtcacctggtcctgtgtgcttctccctggaatgtgcatttgtcacttttcttgtccctgtggccaaatatcacaagaacaacttatattagaaaggtttattatgggggctggagggatggctcagcagttaagagcactgactgctcttccagaggtcctgagttcaattcccagcaaccacatggtggctcacaaccatctgtaatgggatcagatgccctcttctggtgtgtctggggagagcaacagtgtactcacatatataaaataaataaataaatctttaaaaaaagaaagaggccaggtggtggtcgcgcacgcctttaatcccagcacttgggaggcagaggcaggtggatttctgagttcaaggccagcctggtctacaaagtgagttccaggacagccagggctacacagagaaaccctgtctcgaaaaaaaaaaaaaaaagaaagaaagaaagaaagaaagaaagaaaagaaagatttactatggctcacagttcacaggccatgaaggaaggaaagatggtggcaggagctttggttacatgtcagctgaccagaaaacagagaaagaaaaatacaagcaggccctacccagacatatccacaggagtatctcttaggtaattctaaagtccagtcaccactaaggattaattatcatatgtgcttatgtgggtcctaaactttcgtagaaatgtatgttgacacatatttctagagtgaaagctatcagcagatttccaaccagtccttgaggaacagccgcctcaaatattcccagggtactcccattctctcctggtcagtgcctcctcaacaaacacagtagcctacatccggagtcttttctgtattttggactttcttcttcccaattctacagcctagcagtacagggttctgtttggggttcccttaccaaataccaaggtggttctcacattctgactcactcagtacctccagcctctctgtggtgcttaaaagttcctgctgtctttggggctaaatttaaatgtctcttgggggttgggtgctcctcctccatgcttccatgagctctgacttctctcgacaaggtgcaccagacatctgaactgtaattactaggttattcactgtgtctcccacatgggtgatttttgagtcaactgtttgctttgtttctctttacgtgctcctagcctagctaggcgcgatccaaacatatagagctcaggtaagggtttgtttagagattcaacacactagtgacatctcatgcctcattcatggatcctaaacactgtgtgaaatgaatactcggaagctggggacagtgatcaggaagttcaaaactgaataaaggcgccgcaggcatcaaaaaacctagacagtaaatcccttcaaagggtaagaattaagatgcaggagactttttttttttttttttttttttaaatcatggcggcccagagggcgggtctagatcgggacacgccttcgagccaatggcagagctagttagccttcgtggctcagccctcttggatgggattgcccactccagctgcaagactacacttcccagcgtgccgcgcggcccggtgacgcggagccggaagtgaggaacatgaggttctagggcgcgagggaagcggctagcgggggcgagggggcgtgcacgtgaatcccctggccagatctctggcatggccgaggccaggaagcggcgggagctgcttcccctcatttaccatcatctgttgcaagcaggctacgtccgcgcggcgcgggaagtaaaggagcagagcggccaggtaagcgtcagatggcccagtacaagatctagagagcagtagcccgctcccctcccgggagacctggccagcgggagtcagagatgcgggctagggtggaggaagaacattaagctctgctctactccctgcgacttatagccacttcccagggctcagtttccccatgggtgcagtgggcgggccggaaactggtccaactagtgcagctttgtaattcccgcccgggttcccggtagcggcaggtttaagtttccctagtatctggccacgtggctctatgcagtttccctgggacaccacatgggagtccagctggagtggattgtcaccactgttgttgggaacacggagacgaaggtcccctaagttgatgatctagaatgcagggcgtgcaggcaggcccttggctgtcttcggttatgacaagacttgaacccgtggtgcggtgatttcaaagttcattcatttggcaacttttgttttgttttgttttttcgagacagggtttctctgtatagccctggctgtcctggaactcactctgtagacaggctggcctcgaactcagaaatccgcctgcctctgcctcccaagtgctgggattaaaggcgtgcgccaccactgcccggctggcaacttttaatttggccctgtcgtgcggatgatgaaatgggacgcgccagtttcagactcctctgcccgtctcacagcctaatagctggtacaaaaaaaaaaaaaaaaaaaaaaaacccaaagtgactgtacagttaacatattaagctatagaacgagaaattggagatgctaaaacatgggtggaagaacctgggtgggaaatatccaggactgcttccctaaggatgtagtagctgatctgagatctcgagggagatgggtattagaagctctgatgcgaggcttctgagtgtcctagccaccagaaagtttgctgagcctgaagtttgaaatacatgacttggaatggagtctcccaaagcagacagacaggaatggctgatgggtagtcttcccagaactgtgtgtgattaagtcactggtgaaatggatattgacctggaggatcccgggtgttgtagtgtctgcctttaatcccagcactctagaggtagaagcaggtagatctattttttttgggggggggggcaggggggtgttttgagacagggtttctctgtatagctggccttgaactcagaaagccacctgcctctgcctcccaagtgctggaattaaaggcatgcgcaaccaccgcccagttggtagatctcttaagttcaaagctagcctggtctacatagtgagttcaagaccagccaaggtttgcataatgagaccctatctcaaaaaaaaaaaaaaaaccttaagctggggttgggtgcaccctgagttggcccataactttaatcccatcactctggggaccaaaaaggatggatttctgtgagttcaaggccggcctgatctacatagtgagttccaggacagccaaggctacacagagaaactctgtcttgaaaaacaaaaaaacagacttaaagcccaaagttgctgggcccttaagatgttatctattgctttcttaatcttcctgtatggttctccatgtccattcatactcaaactataaaacagaggaaatgggttatagtgcccattgttgtggttcctgtgcccaagccagagttccctgctctcacagaaaagatgcaaatacaaacaaacaaacatacatacatacttaaatacatatatgtatgtgtatttaagtatgtatgtatgtggcttagcatattgtggcaggtgctggccataataaggctaacaagtgtcagccctcggttataattaagatggtcagagaagctttaatggggaaggtgacgttggagtagagactagaaggaaatgaggagataggctgtgtggttggcaagagagagaaagtctcagtagcaagaatggcaaagccctgttaggaattggtagcccaatatactttgtcatgacgatacagttggagcaggatggaactgactgactgactgactggactgtgcccttcagacctgacagggtttctctgtatagccctggctctcctggaactcactctatagaccaggctgaccttgaactcagagatctgcctgcctcttatctcctgggagtagagggagatactatccatttccctcttacatttatggtgctgtgaagaaggatcctgaagttggcagaggtagaagatgagctgaacggtccaataggtgctctccctgactccaggccaatctgtttcggtgctagcatgttctttcctttgcacatggctctttggagtccattggagctattcttcagtcttaatggtcacacagagtgtgtcctcaccttaggcctggattctacctgtcaacctctgttttaactccgaccctagcactcagtctctttccagacatccactgggttccgttatgtcacgtggaagctttcagggtttgggctgtcttgtatttgggggaagattgactagccaggaagccctgtcatgtggcttccatccctgtactgtagtaggatgctgggtagtgctagtttggactgttgagtgcctacctctcagaggcgcccctttccgatgtatcctattgaaaggtttgtagctggaactgtttgtccttcttgactctggaagactgtgaatggtgctggtgaagcccagaggacctggaagagcaaacggcattttccaaagcacttgttgcaggccctgatgtcagggagcatcaggcccagggacgatgcctatcgtgttgggtattttttttgaagctctctctctctctccatttctctacagaagagtttcctgactcagcccgtcacccttctggacatctatacacactggcaacagtaagtctggtggaatggaagggagggagcagggataccctaacacgtcatctttgcattgagctaatatgtgaatgtgttctaatggcccactgtgggcatacttgtcaccttcatttggtcagttccacctcccccactttccatgtgtgttctgttttaaagagaggatctcactatgtagatcaggctacccttgaactcacggagatcctgttgctgctgctgcctcttgcatgctgggacaattggagtgtgtctgggattaaaggcgcacgccttgggaggcagaggcagcctggttggtctacaaagtgagttccaggacagccagggctacacacagaaaccctgtctcaaaaaaacaaaacaaaataaaacaaaacaaaaaaccaaatgctcacacctttaatcccagcactccggggatattgaggtagtcaggtctctgagttcaagtccagcctcgtctacagagtgagttctaagagtctcaagaaataaaggaaaagaaatggaacagctgggtttttatttttttatttttgttttgttttgtcttttcaagacagagtccctgggtagccctggctgtcctggaactccctctgtagaccaggaattcaaagatccaccagcctctgccacccgagtgctgggactaaaaggcatgagcctgcacggcctggcttgtttcttctaggttgtaatcaatgcggcaggcacaagtcaaaggagatgctagtggtagtgagaactagtgaaggcaggagcctggcgcccaacctgagcgcttaccatctgagctgctgaaaagtgaggttggtagtgacagttctatcatggcagcaccgaaggcaggggatgccaggctccggaggagtactcgggtcagtgaaaatattgcccaccctccctccatacttttcatgctcctctgctgctcgacaagctcggagcacgggtgcgtccttgcccaggtgtgtgggtgttgctttctgtgcttccttccccagcaaactgttggagctgtgccacacacagtttcctgcctctgccccctctgtgggtgaggggtacagagtgggccaaagatctcacccactgagccagtccagagcagcgattacctatcaagtcaaacccagtaaacgagctacatgaccttgagcaacgtttgtgacctcctagaataacatcatctgtaaagtgaactctatcatcacgtattgggaagaagttcaaacacagtgatctatttgataacagtcctaaaactggccagtgagatctgtcctggcactggtcctcagatactacattcttgatgttacagagaacaagcaagaagggggggaaaaaaaatccctgttcttgtgaaattcacattctgttgggggatggggtgggggggtggaacaaacttatacctgtaataaagcctcttctaacagcttcctggcaggtggccttcctaggaagaaggaacctgggtaacacagcccaaactgtggacagcagtgtcaaacccagctaggaagaatggggcttaatgacttcctgccggtagaagggtggaatcaaagttcaagggactaagctgtctgaagacttacagcacgcgtgcgcgcacacacacacacacacacacacacacacactccccactctgcttccttccagactccagttcgatggtggttcctttctctaggtgtgtgccagatactgggtgggatgctgtatgctctctgggggcctgtttgtatagtagtggagtcgtccagaaatcaaccagagaaggaaacgaaactgaacgccagggcggagtgctggggggaggggggaaggggtgtcagcaaagatgcttcacgccaaactcgagagtaacgagagtgctccttcctctttgatgactctagcttgtgtcaagttaactggcaaaaccagtcagagctgggcgtggtggcgcacgcctttaatcccagcactcgggaggcagaggcaggcggatttctgagttcgaggccagcctggtctacaaagtgagtgccaggacagccagggctacacagagaaaacctgtctcgaaaaccaaaaaaaaaaaaaaaaaaacccagtcaggacagcaccacaagagaaggacgcagttctagggtcgggagaacctggatggttctgtgcagcctatgggctgtggccagtcagccgatagtagtgagtgagctgctgccgtcctgtcacctcgtcggctgcttgggaccctgagactggttaaggtgcattaggaagcgggtgaagaacagatcatttctgcactgtgtcggcgccactgtttaaactctgtgtgcccatttcctttgaaagactgaataggtaaacaggtatctttccaaacctcatggatttgtcccatctcccctgccctgcaggacctcagagcttggccagaagcagaaggcagaggatgatgagacccttcaggctaagaagtctcgagtgtcggatcctgttagcagctcagagagctcggatcaggagaaggaagaggaggcagcaaccgaaagggccaaagccagtaagagccctccttgctgtgtgagattgggacccgccttggcagttgcgggcttctagtctgctctaccggggtgtctgcctctgaatcattgtttagtgtcaaacaagaaaaggtggggcttctcagagggaggttgtagtacctgggaggccttcctttggcaggcattttaacccctgagggcaggcattctaatcctctgaggatccaaggatgaatcctaagatcccaggaggctgggtaaagtggcgcacacttttaatctcagcacagagacaagtgaatctgagaatttgaggccagcctggtcaacatagtaagttccaggccaaccagggctacaaagtgagaacctgtctccccccccaatctcccttcccccaaacaggatggcccacacagtcagttgctcagttcacttcacaaggactgtttccacagctcctggatgctgctgctagagattggctaggcatgggggggtgggggggaggcatttgtgcaggtgttgagtccatttcagaaggttgatagttctggcttctgtgtggccctggggctgctttcagacttgctggttgttttagttactgttctgctgctatgaggaggcaccgtgagcaaagcaactgacataaaaggaagcatttagctgaagggctggcttacagtgtcaggggagttcatccatgatccccatagcagcagccaggcaggcatggcaccgtagcagttcctgtgagcttacatcctgatctgtagacagtgaacagaaagctggagactgggcttggtgtaggcctttgagacctggaagcgcacccccgtgatacacctccatccaccaaccaggaaccaaacattcaaatatagtctcattcaaaccaccatactaattgtcctcttattttggcggtatgtggtgggtctggtagctatgtggcctcttctctcctgacagaagcagctagaatgctacacccagcaactggctgtgtctctgtgtcccacaaatatcatattgcttatacagaagacagtttcttgatttttaagtaggttttctgcttataaaagaagtgcaggatttattataaaatgttcattacagaacatttggaagttgttttaagaaaaggcaggggagaagtcacccacattcttgacatctatacccccacaatcttgtctttcattattcctcctgtgtatgttctgtcagatgctcaagaggacattttcggtgcatattttatatcttaatcttaaattataaatgcaaagcaggtccagtttatagacagaagcacagagaagggaaatgtaagaatccttgttgccagccccatcacttcctacccatgtctcttggtcggcagcccataaacctgccctgttgcttccagtcaaacaggagtccagctgtgtgcatgtggactgacccacagcgggcttcaaacagaaatggcaaatgcttgtgctattaggtatctgatagtaatcggtttttttaaaaataccttactctttaacagtttcatacagtatgtgttgatcatgcccatgcccagctcccccggggcacgcccccagtatgtcccctctccttagtaccctctttttgtttcccgagtttgtttttttattgttgcaatcaactggctggatccagttagtgctgcctgcagggtgttgactgatcctgtgtaggtcaccgggctacatcaggttcatgagtatgaccttgtcgtgaccatgtttcatcagctttgcattcttttgtttttgtttttgtttttttgttgttgttattgttttgggtttttttttgtttttcgagacaggatttctctatgtagccctagctgtcctggaactcactctgtagaccaggccggcctctaactcagaaatccacctgcctctgcctcccaagtgctgggattaaaggtgtgcaccaccactgcccagccagctctgcattctttttttttttttaatattttttttattaggtattttcctcatttacatttccaatgctatcccaaaagtcccccatacccttccccccactcccctacccacccactcccactttttggccctggcgcagctctgcattcttaacaccatctattctataatgctccctgagccatgtaggcttgataaatgtcccactgagggctaagagctcaggtgtcactcagtctcaactttgacaagttaggagtctctgcattgctattgcagaaaggtgaatgtgtgtgcatgcgtgtgtttgaaatgttctcatggcaaactgacagtagtaagtcccatcacttatacccccagcctacagtcttgagctagtagtcacttttaagaattatttattttatatatatatatatatatatatatatannnnnnnnnnnnnnnnnnnnnnnnnnnnnnnnnnnnnnnnnnnnnnnnnnnnnnnnnnnnnnnnnnnnnnnnnnnnnnnnnnnncccggtatctagacacaccagaagagggcatcggatcccattaacagatggttgtgagccaccatgtggttgctgggaattgaactcaggacctctggaagagcagtcagtgctcttaaccattaagccatctctccagccctataattgactttttacattttgggtttttgttgtttccccctagttcttcttgcgacagggtcctgatgtgtaccccagactggcctcaaactcagggacgtcctgcctcagctttctgggtgtctggcttaatttaagagtcctcagaagtatttatgggtaacatgacagggtgtgaagttcttcaaaataatgtatgatggggaagggaaaatgagacattgggtgaactgaggttggctacgggttgatataaagttacaataacagctgaggctgcatatcatacatacacacacacacacaaaagctggagttaggtgactttggtgtacttctgaatattttggaaactttgctcatgtgcagaaaagggagtgtcaaagagccccgaaatgaattcagtcctgccgttcatttcaacacctgtctctttagtgataacttcttcccctgaatgcctgagatccaaagcaccgtttcttaaaaccctcgagagtctgaatctcagtgtctcctactagtcccaggctcctgggtcggcacaattgacgaccacatagcttcctctatggcctggggctggctgcttgaccactgccctgcctgccagtgacttatcaggactgatgatggttggcacccaacccaaagagtagtcaccagagttgggcatgtcttgtggtggtgggtggtaagattataagcctgtcctttccctctgggggcctccagatctcatgccacagaacagctgggagtccctcggggatgcaggcacagtaaccaccatgggttctgggcgaggccttctcatggttctgggctaggcctcaggtcctcatactagcaccaagcaactagtacctgtaggaccattaggtggtgtaaagtctgcccatcttcttagatgagaagagcccaccttgctcacagcgtttgtgtcttgcagccccaagaccgacacctgtcaattctgcaaccgcagctttgccatcaaaagtaaaagaaaaggtgagtttatttccgagttactcattacctgtggaagctgtatccagtggagcatagtctgccgtgtcaggatagggtcgtgtggttcagcgtgtgtctctaggtgtctgtgacttcatctagctatgcctcgggtgccttttctgtgaaacagaagtgatgcctcaaaccacacacttgggcaagtgccttcctctgtcgtccttgcacccactcaccggttgtataaacagctcccctccagtccctggtgtgctactaggccgtcagtaccatcataaggaatgcactgtacacattttctagatcaaaaaatacttcaaaaatgtcattttccagtaatccatacacactgttgcagacacataaatgatgtgtcacccgaaccaggcgatagctatcgtatgtaaaagcaatgatgaaataataatagtatcacagtgaactatagcttcatgtaaagtaggaactactctgacccagaagcagtaatgctcccttaatgcttgtgtggaaggcatctttgtcttgctgtagagatgagatgacaaaccagtggactgtgaaaggccagagctggctgctcttagtctgtgggagaggtgggacactcagagagctcggaagtcgccttgtaggacccagtgtcctcctgatgcttttcacatgtcctgtcatgacagagtgctcatccctcccatactctgtagggaaagaccaagacagccaacaagacggtgaactctgtgtcgcaccctgggtccggaaagacggtggtccacctgctctctgggaagtcacccaaaaagtcagcagagcccttggcaaacactgtcttggcctcagaaactgaggaggagggcaatgcccaagccctcggacccactgccaagtctggtgagacccccagagcctggggcaaggggtcaggactgaacactgtggagagacattctgagtgtgggtttgtctctgacagccagggtcttacaacagccatttccaccttttctgacttcctagactattttaaatttacttttattttatatgcatcggtgatttgcctgcatgtacatctgtatgagatatcacactttgtagttatagacagttgtgaactgccatgtaggtgctgggagttgaacccaggtcctctggaagaggagtcagtgctcttaacctctaagccatctttccagcccgctatatgggctttttagagggtggcgtttccggccttctctctctggtggattatagggaacactgtggtcacctggaaactaaatgaaaaggtgtaggtcttgatgcaaaataggcctttgcccagcttgtcccccattccccaacttgatagcaaatagtgacttgattaactagcaggtacttctagcctttccaagacctcagagaggcctgcaaaaataggtagtgagggtccctgttccagctaggggactttgggtcagagcagatagcaagccctgtacagttgagaagcatgtgctacctaggtttgactaacaacctgcatggaggctctgggaggggagaggactgtgggaaggatccttagtcccctgtgtcccccccctcaggaacggtgtcagcgggccaaggcagcagttccagtgaagattcctccatctcaagcgatgagacagatgtcgaggtaattgccacccatccccagggattgatctcttccagcttctgaccctctcttgccagtgttcagatcccagtggccagtcatcagcccagcagttgtgtccgacagctgcatggttacagacagggctaggcagttggagaatgaggacctcagtactgctctggatatgctgggtatcagagtccagtgctgggagaggaagacacgggagcagagacctgagtaggagtaactgggacatgtggccaggggtaggactgcctcgaggattctgagcccagtggtgaatgtgcgtttggggatagaattggatgggatccttggtctgcagccttgtctctttgtaggatcgttgggggggtggggggtcatcacagggttttatgcaccgaagtgaggtggcctggctcgcatctcaaaaagattgctgtagcgtggcctggaggaagatttagagtaaaattagtgaggcccactggcagactgtcaggtaacagccacaggtgccagtggcaggaaccagtatgccccatatgtatgacatatattatttggcataataaccaacctctaccccagtacaaagccacaagcttataaaaacaaaagacaaaaaccatgagggtgtttatattccagttgttggatcttgggcatgaactttgtaaatcacaagactgtatcacactttcaaaaggttggacatttaagggggtagcaggagccagggatagactgtgcctacgcagctgccccaccaaacccagtggccctgtgtagcccgagccatccccttctgttcaagacttgaccacagctgttccctgcctgccgtctctctgttgggccctgagtgtaataaggcccacgggattcctctgtgtccctttactccaagccttgctcccacaaatccagctcctacgtatacgtatacagcacgtgtacagcactggcaacaggaaaccagcgcggagctcctgccgctgcgtttgaaagagggtggtgccataggctggtgtggggcgtgaggggcagcgtgaaacaggcgctgactggcctgctggctacctcaggcctgtcgggattttggaatgctaaggaagttccaggaagaagttcaagtcagtgcagatccaggctcctctgtccggaaagtacctcagtcagatgctttttagttgagtggcccctcaggatggaccctcttataaacatgtcagtgggcaggcaggtgcggtggccgagttctgccccaaaggtagccaggggtccttataagccttttgtgctgcccttaaatgatctgtgcctttttaggagaagggtgtaagattctgtctgcctctgggagatggaaaggaacatgcttttaagaaggggcttgtattccttttctgttgctaagaacagcccccataggctcatctatctgaatgcttggtcaccagggagtggaactatttgaaaggattacaagggttaggaggtgtggccttgttggagaaaccccatcaccgctgggggtgggctctgaggtctcaaaggtttccaaagtccttttgtctttgtctacctgtggatcaggctgcagctcccagctacttctccagcaacacgttcttccttttaaacgaccaccttggtcacggcgtctctgcacagcaatagggcagtgactcagacgccaaagcaagttttttaagaaaaaagtttagttgaacttatggtttcaaagggttaagagtttgtgacggcagagcaaaggcacaagaactggaaccgctcggagctcgaaccccgattcacaagcaggaggcagtgagaaaacgcagggcataagcctaccccagtgacacacgccctccagcggggcaaacacttctcgtagttgggagcctatggggccgttcccattcagattggcagagagctgacagcagagggggaaggctcttcatgtgctgcatctcttgcctgcttctaggtgaaatctccagcaaaaccagcccaggccaaagcttcagcagcccctgccaaggatcctccagcaagaacagccccaggccctaccaagttagggaatgtggcgcccacacctgctaaaccagccagggcggcagcggcagctgctgctgctgctgtggctgctgctgctgctgcagcagcagaagagtctgagagcagtgaggaggactcagacagtgaggacgaggcccctgctggtctgcccagccaggtgagtccaggggctgctatccgtgacccgctgcctgtagttccccccccccccatgctggcaaagccactgtgtgatggagaactcctgaagagggcccattctagagagagaagcaatggcaactggccagggggcttcggtgcctgtggaaacgtccactgggcccacaccgcagccagagtggctgatgcctttggggagttggggggttgtcctgcacctactctggtgatgatgttaattttcttggttttcgtgtgtggtcagtgtagctgccctcagcacagctgctcggaagagacctgaggctttcttcattctgagtcggtttccctatagcccaagctggcctctaacgcattctcttcctgcctgagcgccccaagtttgggggctacaggcacgtgctatcttgctgtcttaagttttctatcgcttcaaagagtcgtcatcacaaagcaacttataaaagcgagaattcaaatgggtgcttgcagttccatggccgtcctgactgagaacatggtgtcagccaggcatggcactggaacagtagctaaaagccttaaaactggtccacaggcagagagaacgctaccttcaaagccatttagtacaccttctctaataaagccaggccttccaaacgctcccaccgatggaaggggtggggatgggggagacacagcaagtattcagatatcacatgtgtcccagtgagtcctgagaatgttcaagggcttggttctctctttagccaaaccagaccctgagccggcaaccaccagagagaatctcttttgttcctcttctggggcctttcccatggagtgtaattcagatagcagtctcacagtcctgcacacatgctgggcggagcagaaagggctggaaagcttttagaggtagaacaagaagaagtgaaggggtctgtatccaggactggggcaggggtagggggtggggcgggggcatggcagttattaaaatgttaaagaagagttggttgacaacatgaagtggacaaggaaggacccagaaggagatgtgaccacagacctatagttgaagggtgtagaggatatagttggctgctgaagttctgtggcaataacttgggacccagcctacttggggctgcattgtgggtattggttcatgtctgaagagaggagccaaatgcagcttgtgtacaattactgcccctccacacagaaggccttagaaggtccaaagccatttattttctaggaagcttagggcagagcggacaaggccgtcatgagaagactgtagaagcttgtagccaccctaccaaacagggaggcagtggtgagcctttggctgagaacagtgaggagaatggataaagaggaggccagtgaagggactgcatctagaacagtagttctcagcctccctcatgctgtgagccaatacagttcctcatgttgtggggacccccaaccacaaaatcatttcatggctacttcataactgtaattttgctactgctatgaatcaaaatgtaaatatctggtatgcaagatatctgatgtgggtcgtgacccacaggatgaagacagctgatctaggagtcctgtctaccactggaagccctggggagtttgagcctttttccatgctcaggctgttcttgaagaactttgcatacaccccttctctgccttgagcattgctggctagttaatgagccggacagtctcacaagccagtgcttgtacccacagaacagactattccagctaaggatttaaccatttacgtgctagggctctgttcagggccagaatgaaggccactatatggtgtcactgggtgctgaggaggtcagtgctcaggaagccgagggccagccggggtggctggggcaccagtgaagatgagaaaggaaagtgttatctccagaacctctgggcttcttcctgatggcatcacctaaggactgaaaaagaagaacgggctattctttctcttcaccaggtaaaagcctctggaaaaggtccccatgtcagagccgactcggtgtctgccaaggggatctctgggaaagggcccatcttagcaaccccagggaagactgggcctgcagccacccaggccaaggcagaaaggccagagaaggactcggaaaccagcagtgaggacgattctgatagtgaggatgaaatgccagtcactgtgaatactcctcaggtaaagcctggggggagaagggaggcattatagcccagacctgaaggctgctaacctgtctcctcagctggtcccagcccctgtcccttctcctcagctgggcccagcccctgtcccttctcagctgtgcccagcccctgtcccttctcagctggtcctaaccccgtcccttctcttcagctgggcccagcccctgtcccttctcctcagctgtgcccagcccctgtcccttctcctcagctggtcctaacccctgtcccttctcctcagctgggcccagcccctgtcccttctcctcaactggtcctaacccctgtcccttctcctcagctgggcccaacccctgtcccttctcagttagtcccagctcccatcccttctcctcagcaggtcccagcccccatccctttttactggtaaggctccctgctcctgtcaggtctctgcccacatctgcctaatgatttactcctcaatttctcataccaggcaaggacttctgggaagagccctcgggccagaggtacctcagcccccgccaaggagtcatcccagaaaggggctcctgcagtcacccctggaaaggcaaggcctgtggcagcccaggcagggaaaccagaagccaagagcagtgaggagtcagagagtgacagtggggagacaccagctgctgcgactctgaccacgagtcctgccaaggtgaggccaggtgtgccttgtgctctgcctagaaaggaaggcctccttcttcaaaaccagagcacgtcccctgatcttgccctctgtcactcccaggtgaaacctttggggaagagctcccaggtcagacctgtttccaccgtcaccccggggtcatcgggaaaaggtgccaacctgccctgccctgggaaggtggggtcagcagctctcagggtccaaatggtaaagaaagaagatgtctcggagagcagcagtgcagagctggacagtgacgggcctgggagcccagccaaggtgagtcctcagaggtctcagcccgggagcctacatggccctacaccccaggtctgtcgtctgggtctctaattgctgcctgtctcctacctggggctcccactgatctcattccaggcaaaggcctcccttgcgctccctcagaaggtgaggcctgtggccacccaggtcaagactgacaggggcaaaggccactcagggagcagtgaggagtcatctgacagcgaagaggaggcagcaccagcagcctctgctgctcaggtggggaccagggaagagaggcagtctggctgtcctggcccgccccagtcagaaaccccacctctcagaattagatgggttctggttagtaaggagaccagggggagctgcatctcagaacgaattagtccaggagtctcccccaacctccatctgcactttctccacaggctaagccagctctggaaaagcagatgaaagcttcctctaggaaaggcacgcctgcatccgcaacaggagcgagcacctcgtcccattgtaaggcaggagcggtgacctcttcagccagcctgtcatccccagctctggccaagggcacccagaggtcagatgtggactcttccagtgagtctgagtcagaaggagctgctcccagcacccccagggtacaggtaagggctggatttacccaggtaggctcactcccagcccccatggggcatctctggcccttgagaaactctttcttctccttgactttctaggggaagtctgggggtaagggcctccaagggaaagctgccttggggcaaggggtggccccagtgcacactcagaagacagggccttcggtcaaagctatggctcaggaagactcagagagcctcgaggaggactccagcagtgaggaagaggatgagaccccagcacaggtgaggtagggaggaagcagcctgaaccaagactggggatgagctcagtggaggctgcccttggccctaggagcacagaatcctgggactcaggctcaactaagtctcacgttctcacacgctcttgtttcctgagccccctggctctaggttcctacacatctgggtgtgccacgcattctgcccactgccactctagacagaagtctgtggctttggccttggggaagttgccacctggggcaaggtgtgatatagtacacaccgttacagcaggatagggatgtgcagtagggctagccaagcatggtacccgagatattttaagaggagtgtcatgtcggtgaggaactgaaagtcgtctggtgaggtagagggtagactctttgcagaagccaagaaagttggctcgggtcgcaccacaagcaggattaaatggcagaggccaagagccaggttacctgggctcaagtccagttctattcctggggccttggctacagtcccatctgtcatcaatccacccttgtgggtatgggtaaggcctcgcctgccggaagcccggggacctgccttcctggccgtgggctaggctgctgggggcagagttgcaaggcacaccacctggcccgagagagcaggaaatgaaaaggagcttgtcacggtctgcgctatgggggaccttccttaagtcctaactctgtcgtacacatgagaggcattgggagttggagctactttgaaactaactagatggtgatatctgagtgagtcggggcctttctcaggtccacactcaccgaattgcactcagagcctatcagtgtctgtcttactctggctgaggccatagctcctagctgggtggtatagtgtttgcctaccatgcaccaggccctgggttccatctccggcacagcactgactccgtaatgtgggtttgtacaagctgaacaccctgacaggcatgggggggggggtgagattaagcagaagcaatgactctatcgtgttctgttaacctgcccagttcctagttcctgggctgagacggatgcttgagctctgcatttcagggagaagaaagcacagattgacgattctatatggcactcagcttccattctgtagagtagaatttaatgacagacacggagtctagttgaaagggaacctaaaaagcagttgtgtttgggtaggagtatatttaaaaggctttacagtgctgaatttgagtgtgtgttagtgccagttagactacttaaacacgtagtctgtttaatctttgcagaaatcccatagataatgttttatttttacactccttttatagagatgaaagtgaggcctggtaagattaagtggcttcttcttggttgtgttttgtttttggaatcaggtctcactgcatagctctggctgtcatggaacttgctctgtagaccaggctggcctcagactcacagagctatgactatccctgcctaccaagtgctggttaaaggtgtgcactgccatacctggcatcagggacttccttttttttttttttttttttctgaaacagggtttctctgtgtagccctggctgtcctggagctcactctgtagcccaggctagcctcgaacccagaaatcctcctgcctctgcctcccaagtgctgggattaaaggtgggcaccaccatcgcccagcaatctttttttttttttttttttttgggtttggtttttcaagacagggtttctctgtgtagctctggctgtcctggaactcactctgtagaccaggctggcctcgaactcaaaaatccgcctgcctctgcctcccgagtgctgggattaaaggtgtgtgccaccatgcctggcttggcatcagggactttttttttttaaacatttatttattttatgtatatgagtacactgtagctgtcttcagacacatcagaagagggcattggatcccattacagatggttgtgagccaccatgtggttgctgggaattgaactcaggacctctggaaaagcagtcagtgcttttaaccactgagccatctcttcagcccaaaatattggtacatcttttttttttttttttttttggctttttcaagtcagggtttttctgtatagccctgggctgtcctggaactcactctgtggaccaggctggcctcgaactcagaaatctgcctgcctctgcctcccaagtgctgggattaaaggcatgcgccaccactgcctggcttggcatcagggatttcttaaactcacactgctgttagttggaaggaggagccagcatcggctcagtgtctgcagcatcagtgttctttgatgactgctctgttgccctttgcccttcctaattcccttcccttccttccaggccacgcccttggggagacttcctcaggccaaagccaacccacctcccactaagacacctccagcgtctgcatctggaaaagctgtggctgctccaaccaaggcaagtaggaccagaaaccacaagatacgttaggataaaatctcaaaatctgtagtcccacagtgatccagcatggaccacccgctgtcccaccccctgtgatattacagccacacactagtagaaggatgactgccgccctttcctcctccaataccattgctacctctcgattcagggaaaaccacctgttccgaacagcaccgtctctgcaaggggccagcggtctgtgccagccgcgggaaaagcaggggccccagcaacccaagcccagaagggtcccgtggctggcacaggggaggactcagagagcagcagtaaagaggagtctgacagtgaagaagagacgccagcccaggtacccacccagctggacttggggttagagcaccatgtgttttggcccaggcctataggcacacttgacatgcctctccccttgctgtttctccagataaaacctgtggggaagacctctcaggtcagagctgcctcagcccctgccaaggagtctcctaaaaaaggagcccatccaggaacccccggcaagacgggatcttcagctacccaggcccagccagggaagacagaggactcagacagcagtagtgaagagtctgacagtgacacagagatgccatcagcccaggtgagctctgccaggcccgagagccaccgtcaccaactctgctcataaacagatcgtgccccagaggggagaaagaacagatagaagtcctaactccaggatcccttgcctccaggtcctccccaccatgcccctggatgaaatgagctgtaagtcccaaaccaaggccatcctagtataggacatcctaggtactcctacagctccgcaggggcctctgcagcactgggcacggcagtcccatgcaagctgagtcaggttctgctgaggaacctggagccatcctgcaaagacacccctgtcagagtcaccaggaagcttgggctacggcgcaagtctctgtctaagaagggcccgtctcgctcagtgatgcctaggcccaaggagtggaaaagaaagagaagctgtctcatactcaaaccattgtccagttctcggcccggttggttgcagcgagcagtggggcttgctctggctgacagtctctagtctgagctcaggcagcctggtagaatcggtacgtgatggcctctggtgtcgcaccttagggaggtggcagcaagatcagaaagaaaatggttggtccttgtcagtttcagccgaccgtggctttatagaaacaaagggaatgtcacatataagtggagattttgtagcttctcctgagaaacccagtcctacttgccgattgagcacaggccacccgagcagggagacatagagccctccctgggcctcccttaagttggcatcaccaccagctcttcttcactgattgacaagttctgtggctttggaccacccggcccgtgaagaatgctcttaacagggcttaagaagtgtcactcttccgcattttcccctcactgggaaccctcccgtgtcacgtgcttactcaagtcttgtcccctccaaaggatgctatctcccagcctgccagaggcaaagcgtcaggtccagcgtccccagagaagagcatagaagggtcctcagagagcagtgatgaggatctgccctccggccaggtaggctgtagctactctaaaggctgcccctggctgggccaggctgccgctctctgtgagagggtgcagcttcccaacagggatagtctcaccacatgcaggtagcacttcacagctcctagctgtcttctgatacactcctggtgtggtcgggcctcaggcttcacacccctggccccactctgctgcccaggagccttttaggactctgatgttttatgtaaactggagttggtcatggtgcccaggcacctgcctgagcactgttaggcgggcacgttgtcctggcggcctgttcggggccggggttgaggccccttatcttctcgtgaagaagtttgaggaacccagaacactactgcccaagcctctctggtccccatggacagttggggctctagatcctcccttgcgaccttcgttggaatctgtgggccccaccccaggtcaggcctatgcaatttatggcacctgctcattgtctgctggtccccactcctgcctggccttgttcccaagggtgaggtccgggacaccttctctgatttcaggagcccaacatagccaccaagatggtacaagctctgtgtgaacccaggcctttgtagaggcagcactgccctctttctgagggagtagggtatttccatttgaaggagagaggggcctgtgactctgaggcagctcagagaacatttgaatcctggcagtctgcactttctcctgcccagctgtccctttagcccccttccaggcttggcttttgccctctggctctgcagtctttctgaggtacctccctcactcctaaaggacagacagccagtatggaaggttgccttggtttttctctgtgtgagtagacttgcacaattaaaatgagcattatgctaaaattgaacctttaaagtggtcttgcagatctgggggtctctattttgaaaaaaaacaaagccaataattttctaggttcccagaaggaattcagggaaacgggcacagcccaggaagctgtggtttccctctgggagagtgctagcctacgcgggattgctgtcgctgttgggcatttatgaagcacttctctatggagagctgcagatggtccttcctagggctccccgtctggttggttgtttttcattagcctgtccgtgggagaaaaggccgggtagtccagctctgggccagctctgatcccaggttctgtcctgcagctctgtgtaatgccgtgtggagtgtaagcctcaagctgaggctggctggaacccggggtggctacaagttagaaagaagtgggcatgtgaggtaatgcaggcacgagacggcatggctgatccattctgttgtagccatgtatcgtactgcgtcacgcacatagtcatgcgtaacctcccacgtaaattattattaaatgtatcagcgtttgcctgcatgtatgtatgtatgtgcaccacatgcctgcccggtgcctgtggagacgagaagagggtgtcagatccctctggaactagaggtacagacagttgtgaggtgctctgtgaatgctaggaatcaaacccaggtcctctaacctccgagccatctctccagcccccttaaattgttttaaaggctacttcagctgctgttttgccgaaacaaaggcataggctatgtccttattgagtgagaacagggggcctgttaaaaaaaaatctaaattttagaattaagtcaaggcttgcatggttaggtctggctcccagagcgcttccttccagtcctgtatcttgaaaccagtttgctggtcgtcctggacgaggtgcttgtccactctgagagcctcagccttagctccgagtcagactggggtttataaacctcaggtctcctagctgcatccccagaaagtgtcgtttctaagtctcatggggaaggatgagcccccaggtaatagtcatcttcctcctctctgggggggcggggaggggtcctcagggggtcccagtgctgaggacacaccctccactgcactgcacctctagccccacaaagctgctttgagggaagctctcggtgactgtccccttcgacagagctccacctcccctctctgccccagactaactggaataagtagatagaagcccagctaagacagcgggcagtgggcaccgcccaaaagggccccaaatctgcttctgtaagcatcattcctgcaaataggtagggtatccccctaatctgctctcagcaccccaggggggtggaggtgagatgctcaggtggctgtggtggtagcgtcctcttccaccgctttgcctctctgatcaaagcacagcccacacccactgggctttgtgctttccccaggtgaccacacgcagcacccaccacagaatgaggagcagaggcgctacagacctaagcactgcccctgtgcccagcccaccctcatcagccaggccgctgcctcctctatcgcctgcccgctgcctcctctatcgcctgcccatcgcctgtcgtccctgcctcgagatggggtggtgtgggcaggtggggctggaggaggctgtgctgcagagctgcttttaacattccaagacgctattgtttgcctcagtgggtttgctgcctctcttggtccccaacaatctgttcttctgtcttctcacatatatatagatccccctccctccaccgcaagccttctcccactttccatccttctccttctcatcacgtgggaagggaaggctctggaagtggcagctcagagcagccgcgggggaggctgtttggcagggtagggagggcctgagcgcagcggtgccgccgccacacttggtgggtaccatagtgctaaagtttgttgctttctctgtgtctcacagcccctggggcggtgggagcttggtaaagcactgcaggcaggagggtgtccgtggatagagacccagctacccctcaggcagccctctcattagccagagcaccaacagccttcagccagcactggcgtttggagagtagaaagtggaattctagttccctaactactgcctctgtaccttcatcggctaggactctgaaaggaaatagatctggagtcccctggtatgttggtgacatatttgggaatctggtccactgccaaattgaccctcccagtactaggatctgctgctgctctgccgtctcagtgagatacagagcagacccacaggtgaagtgcatcagggcatgttagaacatatctgtaatcccagcatccaggagacaaggtaggaatatcagaggccaatgtggtaggctatacaatgagaccctgtctcaggattaaaaaagtaaaactgaaccctacgcattatcccaacctgcagctgtcccggtcctgagcaggttggctttgtgcacattctacttgagtccttgactttgaagctggtctcaggcccgtcacgtcatccatcagaatttcaatatgcaactcaaaatgataagagtcttcctagtccttgtagacacaaccacaagacagtatctcggctagaaagctgaccggcaagcaggccttgtgcctgtttctccaaagtatctgtctgatgagtggcatttttcatgcttgtcctgtttaagagtgagtctaataaataaggttagtatgtggagatctgttcctctaattccagcagtggaggcagaggcaggtagatttcttcatccaaggatagactggtctacagagcaaaacctgtctcaaagcaaataagggccacatatacacatatatcctgagcgctctagtctgttggctggcctacccatcccaccccccctgttactccaggcagtttgtgtactaaagaaactagttcagtataactggggtctgcatgctgagccacatctcagggaggatgctgtcagggtctctgggggaagggacaatgagactccagggaaatcatacagtcacactgttacaggaaatgctttttagaattccccactcagcaggtggccatctgatgtcactagaagaaaggctaaattagacattccagctctcgccttgcttccttcccatgtggctgtgtggcctgggcgctcctcttctcccctctggacttaaggctttcctgttaggccagtggagtgggtggatactgcttagcttggggtcactgtgaaggtcagctgggctctaagagctctgaagtgctgtgctgtgctgggtgtctggctgttatggggtgggagtgggcctagaagaccccaactccttgaagtttgcattacaaagcccctccctcacccatttcctctccccttcccctgaccaagcctttaatcagaggcgggatgtttctgtttttggttttcaaggcgattaaatcccctccagtttctgtcaaccgtaacagtagtccagctgtcccagctcctaccccagaaggagtccaggctgtgaacaccacaaagaaggcctcaggcaccactgcccagagctcctcctctgagagtgaggacggggacgaggacttgattcctgccacacaaccctccacctatggtaagcgctgctgcagtgggtgctgttcggccaggacgggccccagccacgcatgccctccccactgaggccagaaggcactaaccaggtggcctagcagaggcattggcgaggactggggactcagccttaggcactgtattgttcccttaatgaggaaagctcgtctgcctcattttgaaggaattacattcgaggcttctgtgtgctggctccaagcctgaaagccagagggagcattctggtggctacaggaaccaggctagtctaaaccagagctctgctatagccacctggccgtggggtacactattagcctggcagtgagcttccatccccttagcatagaaaaaggagacaggtaacattttatacttattctcttcccagaacctaaggtgactgagtgtctttgtatgtggcgaggccctctggtagcgcaatcatcttcagttatatatcaggacactgtgtcgtgccgggcggtggtggcgcacgcctttaatcccagcacctgggaggcagaggcaggcggatttccgagtttaaggccagcctgatctacaaagagagttccaggacagccagggctatacagagaaaccctgtctcgaaaaaccaaaaaaaaaaaaaaaaaaaaaaaaaggacactgtgtcgttaagtatggacagcaagattcctactgtcagcaaaatactgctgtttatttggcgagtacatagtggtgacatgagctcacattaggctgtggtaaacatctcagcacccagcagctctcccactggtcctaactgagcagttgctcactgtgacctgcacaagagaaaaagatgagggtaaggcttggagtcaccgccacagcagccattttcaaatgacatggtgacagctgctgtctggaaggcttgggaagccagcgtcccctttatgatccctaagctcagcataggtccgagggaagagtgatctggtaatgccttgctggggagtcctacggctttgtatcctgatgtgcccccccttctcctccgtttcagctctcagaaccagtgtgacgacgcccgcagccctctcacgagcagcttcccaacccagcaagagtgagcagtctagccggatgccaaaaggcaagaaagcaaaggcggcggcgtccgctcaggtactgtcgggtaagagagggctgtggtggggtcactctctgctgccttgccatgtgtcctcaggccacacgccagtcactagcttgctcccagccccctggcactgtcatacaggccaggagccaagctcccaaatcccatggtgttgtccggaagagcgggctgggagcccgaaggcaagcggaagcccctgtcctcccagcttgcctgagtgtggattcgttttctggatttgagacgctgaaaccgactcttgagttgcttgcctctcttagtattcgtaatggaagtggccttactgtttcctccagccttcacagtccagtgcattattaatatctagggcaagattagtggacaatatctaaataaaacagggctcatcccaccagggttggtccaggccagaacctgggtcctccagctccaagttctttgctctggaggcctaatggggtttgttaacgtgagggaagagtctatcgcacacccaacaccctaaggggcaggagaagaaggctgtactgaagcccctcccagcttcggggtgctactgtgccaccctgttacccggtgcatcacaaactagcccaaaaagagcctctggcggccgggtgatccagtgggtagtgagatggcctgagcatctgccctgctgggcaccgaggctgcagcaggcacgagaccttcacggagtcctaaaccagcagagacacagccattacacagaaaaagcagcataaattagttgtcaccaactgctaggtgttgcaaagggaacagcacagaacagagaataatgggtgacctgctttagaaaaggcgggcaggaaggcttctctgggaacatgagcagagcctgccctgcaggaagggaacccagaggtactagagccctaggtgattgacatagggcgggtaagataaagtagcaagggggtcaggccatacctggactgctttgtgtctgcagctccaggaggcttagcaaaggctcatctattgtctgtgtgctcttcctgacttctagcaggatgggaagcaggggtgccctgagggaccacctagccagggacacatcccagaggagacacaggcgatggccactggagttggggctgcgctgtcctcccctgggcccagattagagaacaaagccatagctcaccacctggtacccatctttccagctgcgatggctcctctgttctccaccttggcctcagggcttttcttgcttgaacatccctgcctctttacccatgccagtcatttctggctcagggtagcacagatgctgttctgagaatctatgggtctcagggcctcctcgtaccatcagtggataacagagggaccctgggtctctcccactggtgttgaaagctcattcttaaaaagccagtaagccgggggctggagagatggctcagtggttaagagcaccgcctgctcttccagaggtaatgaattcaaatcccagcaaatacatggtggcccacaaccttctgaaatgagatatgataccctcttccagtgtgtctgaagatagctacggtgtacttatatataataaataaatcttttttttttttaagccagtaagcatgggggaggggcacagcttacttactgtgcaagcatgaggccctgagctcattctcctgtacccacaggggaaagccaggcatggtagtgggcgtttgtaatcccaatactggggcacgttaaccagccagcctagcctaattggtgagccccaagtcacattaaaagacagaaggcttcatatgactgggttctcttctgctccacctcagtgaaaggccagcatggttgtgtgtgtagtcagcagcccctctttcacctccctgggcctcagtgtgctagtgccaggtaaggagccacagtgcccaccagagggctgtgggaaagtcatagaaagccatgcgtagtgcttcccacgtggagcctggcctgccgtgtccttctcactgtaacttaaccttgtgttcctactttaccaaactagaccagcagtgccgtggaaacactccccatgatgcctccccagagcgcacccatccagcccaaagccaccaacaagctcgggaaatccaagctccctgagaagcagcagcttgccccaggctaccccaaggcccccaggagctcggaggacagcagtgacacttcttccgaggacgaggaggatgccaagagaccccagatgcccaagtcggcccacaggctgggtgaggattcccagagggagggtgggagatgaggcacagcctggtagaactgtaggctctggccttctcagcccaccctggccttgtctcatcccctgataatacctttacaacttcaaagacccaactgctgttcgacagctggcagcttcttggtattaagctccggttattgaaggccccaagtcccaggactctgcttcccttggggggagggggggcagaaaagtgggagcctcaggaaccagaggggaaatgatgccattcgtgtgtcgggctaggtgctccagactagcatgggtggacagcaggaggcttcgtgcaggaggatgaggaacagagaaagacccaggcctcggaggcctcctggggagctctgcctggcctgaataacagggccgccagggactcacactcaacgggaaacctctgcttccacactagatccagacccttcccagaaggaaactgtggtagaggagacccctacagaatccagcgaagatgagatggtggccccctcacaggtaactgccaggcagggctggaacttggaagctgcctttagacttcagccaccccctggatgagtgtctagatccccattcccagggccctgggtaaggtcctgtcagtggggtgcctctaatcaatcggatagaacctcacctcatgctctggggcccagggaagagattcagatggattctgagacatgaccagagaagacgacttcttaggtctctcttaaggctcttcctatacaggacagactccagtgactttctcacgtgtggggagtgggtgcgtgttggggtcagtcctctccttccactttcacgaaggttactggattgtactcaagctgtcaggctcgactcgtgtcagtgcctctaccctctgagccatcttgccagcccaaaaaacgttaaccatcttctgtgatggtactagtccattggcaataagaaagtccccttttaatgtgccttacatatgcgttaattcacatagcttagaaggcacaagctgaaggcctatgtcccccgtgggctcagtgccgcccgctcatgcttggctgggttggcctgatccggggtcaccgactgattcccttgagccttgcctctgggatacggctaggggctcgatgcgtctttcacactggacttcttcagtctctcctctcaggttacatgactcccggcttgactgtggctaattcccaggcttcaaaagctactcctaggccagactccaactccttagcttcttctgccccggccaccaaagacaacccggatggcaagcagaagtcaaaatcccaacacgcagcagacaccgcactccctaaaaccggtgagtggggacagcaagacatggagaagcagggctgctggtccctgcttgttatgggcagcatttgtctgtgtcccttccaagagtctcatattcgagcctgtggggtcctctgggaactagaggtacccttaaatgcagctggcgcccaggaccaggttgccagctctgggcagtctgggaacagatatagccagccatttgaagctatttctttaaagcttgtggaggaggccttggctctccgtccgtccctactgacttctcagtcagtggacaagggtcctgggtatagggacccagaatgactcagactaggccagcagccttgtttagagaattcaatacctagaggagaccctggataagggacaggcctccgggggctgctctggctcacactgctgtagccttgacaagctcctgaccctgtgtcttaatcacacaaggtaagagcaatgccatcgtgcagggtcaaaagcagagcataaagaaaactgtcacatgacatttggagggacccaggggaagggactgttgggagtgcccacatccctgacttatataacatgaagcatcccgtcccactcctgtccgcttctccttaaccgcactcactgctagggttcagcccctgtgcccagcatgtaggcattccttgctgcacaggtgacctgggaggccagcgggggttctgggcccaggctctgggggctggtaacttcagcttcccagcgctgggtcagaggcggagctgttgctcactttcttcgccagtgttcttgtctatgtgagaggcgggtgcgagcgacaaggagacattttcgagggggctgtggaaggtttttttttttttttttacacgtgtagtcagcacacaattatcaaaggcaagcagaggcgtagaaaattctaaacaaaggctgcaccagaagccactctggcaggcagtaaacctgcttagtcagccactgcatgcatacacagcatactcaggagtgccccccaatctgcctgtcgccccagccttgatgggctaaggacccatggtgtgtctacagacgggagctgagcattggtctgtaggaccccctcgtgtgttataacccacagttcatggcagaagacatcattgtatgtctagcttcttcctctaaggtgggaaacagccttgagggactgtgacgccttgagggactgtgacctggccaaagccctacactaagttgataaaggcagtcctagaaccagtgtcacccatgtcccacctactgtgccctccgtctcattagcagacttcaggtcctctccttagcattctgggatctctgtcgatccacaaacatagctaagcataggagacagatagagcagagtgacccctggatctcagtttcccatttatgcagttgtaaagtacaccccctcagttgtcatgcattgtgcaagatctcaccctcagctttccagacttgtgacctccaagacctgtgatctacaggtaggaaagaggcctcctcgggctccacgcctcagaagcccaagaagctcaagaagagcacctcaagctcgccggcccccacacagacactgccgaacagcatcacccagcgcctcctggagcaggcctggcccctgagcgaggcgcaggtgcaggcctctgtggtgaaggtcctgacagagcttctggagcaggaacggctgaaggccacagaggccatcaaggagagtgggaagaagagccagaagcggaagttatcaggggacctagaagctggggccccaaagaacaagaagaagaaggagcagccagtgcccagggcaagcgctgtttccccagaaaaggctcccatgacttccaaggcaaaatcaaagcttgacaaagggagtgctggtggcaaggggaaggggtctcctggcccccaaggagccaaggagaagcccgacggcgagttgctggggataaagcttgagagtggcgagcagagcgacccgaagagcaagtcgaaaaagaagaaatccctcaagagtaagtgactgctttccagtacgcgctgccggtgcaacctgggtggcagggccctgccccggctctttatctcattctttccacagagaacaagagcctgggaagtggtttgtccagagtttaacaagtgtctggtggcaaaggcaaaaggagactgtagagctggcctgcgtcccctgcccccacggccccttacaatgcccagtatttagcctcagggtttggaaaacaaactcaaccccggcttcacaacagggagctctctgctccagcagagtccacggccagtccctggggtgtggactgtcccctgggttctcatccagagcccatctttactctagaattcagttctttggtgaaaacagccattcgttgccctccatgcgggaacctgcacccagcaggacttctgagtcactcaccagccctgggcctcgggcagtgttgttttccttttctaaggggaaagcaggctctgagaaggaaagaccactggcgctaggcagtccctgctttagttttgtcttaagacagggcctcacaatgtagccttgaccggcctggaactttctgtgtagaacaggctgttctcaaacttacagcaatccacctgcctctgcctcctgggtgctgggattaaaagggtactctaccacgcccagcatggaagtcctgagcactgccattctgtggcaggagatgtgtcacctgatctctcccaggttcttgtcccttccctcacactcaagattagatagatagacttgcatagttctgaggccagattgtgtagtccacagtcagtaagagtggagcctggcacatggatggtatcctggccctatcagggcctgatgttaagagccgcgagctgccgtgggcctcctgacgctgacccatcagtgtcaaaatctattgctcaggaagctcgctttcttcccacagaaaaaaaagacaaggagaaaaaggaaaagaagaaaggaaaaaagtccctggccaaagactctgcctcgccgatccagaagaagaaaaagaagaaggtagattgagttcctgaggggtctcagggctaggaattcaaacccttccccttctaacacctagaccaggcccatgccacctttccagtcccttaatctaatggaccttgtgaggaggagcaggggaggggtgatgggagagacctccacaggcgggacaatggtcagctttcaggttggctggccagcggggagcccactgaagaaacagccagccagccgcttcctgggatcagaaggcagttctgcccagggctggtatcagtgggtctcgatccttacacctatggggggccgtggatccttcgaagggagttctgtcctggacctgtgggacagcggtggtgaggagaagccacagaactgatagcttgcttcnnnnnnnnnnnnnnnnnnnnnnnnnnnnnnnnnnnnnnnnnnnnnnnnnnnnnnnnnnnnnnnnnnnnnnnnnnnnnnnnnnnnnnnnnnnnnnnnnnnnnnnnnnnnnnnnnnnnnnnnnnnnnagagggagggagggagggagggagagagagagagagagagagagagagagagagagagagagagagagagagagagacttctttcctcaggttggttggacagcagctgctgcagcatgcagagggtccaccctgagggagtctggtgcctaagctagctgccgcccatccctcccttggttttgttcccttttgtggagataaaggtcggcaaagctgaccaaagcctggtttgttttcttctcctagaatcttggcagagtgtgaccatccatccccaggcctctgacctctggccagcgtgaattgggcctggactttttaactttccctccctcagcagaagatgatggctggcgcgtgctggccaaaccagtgaacccgcagggaagctgcagtaccaggaggaagcgaggtgggacacacaccccctctgagtgctacgtgacatgtgtatagtatatctatttttttaagcgacttgcctctctcccttcaaatccaccgtgcccagaggcctccggacctccctccatgttatctgcagagccagcaaggtcccgcgtgtggttcatcccacaccctggacccctggcgcagcctgaagccttgccccatcaatttttccagctattttggttttgttttttaaagaactcagaataaaagactttaaatataaaggtttgccttccccatgcatctgggactcggactgttactggctacttaggacagacagtgtagtgaccctggacatgcacaggtcagtactcagggctccttcctgacttcaagccaaggccctaggtactgtgagtaggacagtttgctaaagaggaaggctcagtgaagctccccagggagggagttgatgcagggacggctccccgtaggaagtggcctataagcttaaaaggagctgaaggtgggtcagacgccaggtagatggctcaagtgaccagggggcctttggaaacaagttacgatgtggagggaggcagtggcgaacagtggtggctggcatgagaagcggggaagacccagtgagctaggccttgagtcaccctctgtctggggaacagttctgtgctggtgacagtaagaagtgggcagagctgaagtatgttggaataatcactgaacattcacctcaacaaaacaaaaaaccagtacagagaaggagcaggtgcaagtctcggggaccctgtgctcagagccttgggacgggcacgccatacccaacagtcagccattccatccattctcaagtgtggatcagagtgtgggatgtaggtctagatcagaatacagagagcctctccttggctcggctgactcgcagaagtatttaaacctacaaaatggaacagcgtccttaacgttcatctcggagtccctggtggtgagggatccgctcccttttcctgtgacagtgggctaaagctgacaagacacaggtcctgcccagacagacagccactggcagcccccacctgcatccattcctgacactaggtccctgtgtccactgccatctgtcatcacacttacgctgtccttagtccagaaatggaattggggacgggaggaatggaagctaggacgtgatgagatgtgattttaaaaccgagcaggagtctgtttctttctgactgttaagtagacaccacgtgtgtctgggacccatctccccagtccatgtacgtagaggattagatttaaggttgtcctcggccttggggtaaactaactggatcccaactgaagaggcggaagcaagagtgttctactttcttcctttattgtcacttgaaccatgatcctacaggctgctgacaagcttggctgagcaaggaacctgaaagggggtggggcttgagggggggtggcaggatgtgaggaggggttactgggaggaggggcttgggttcttcttccttgaggagaaggcagcaaatgtgtccagcctaggttaagggtagggcatcccttgtccctgtctgcgggcctttatctcagagccccacattcaagactactaatgggtcagaaatgggggttccctttagatagcggtagccagcaaggccctccagcgtcctccttctgttctgacttcatttgccgtgtcctgggacgatgaaacagacaccagtctcaagccccagggtgcagggagacgggaagtggggtgtgacatcagggaacataagaagggctgaggcacaggagagcagggggcgctgctgctgtgcagagctggcctctgtcttcacagggtgactgggaagagaagcacaggttgatacagctgggccaccagtttgttgtccctgcctcctctgcccaacatcttggaactgcagatcagtctgtccccctgctaagctcaggtagtactgtgctcccagccaccatcccattctagaaaaaccatcccagtgatagtgatgaatgtcccagtgtcaccagagtctgcatgtgggtggccccctctgtgatccccccccttaccttgacccagttcctgcctggtcactcccaggccagaagataggtcttccatgtccagtggctctgcaagggaagcatcaggctcactgttatttttaccccaacacacacacacacacacacacannnnnnnnnnnnnnnnnnnnnnnnnnnnnnnnnnnnnnnnnnnnnnnnnnnnnnnnnnnnnnnnnnnnnnnnnnnnnnnnnnnnnnnnnnnnnnnnnnnnnnnnnnnnnnnnnnnnnnnnnnnnnnnnnnnnnnnnnnnnnnnnnnnnnnnnnnnnnnnnnnnnnnnnnnnnnnnnnnnnnnnnnnnnnnnnnnnnnnnnnnnnnnnnnnnnnnnnnnnnnnnnnnnnnnnnnnnnnnnnnnnnnnnnnnnnnnnnnnnnnnnnnnnnnnnnnnnnnnnnnnnnnnnnnnnnnnnnnnnnnnnnnnnnnnnnnnnnnnnnnnnnnnnnnnnnnnnnnnnnnnnnnnnnnnnnnnnnnnnnnnnnnnnnnnnnnnnnnnnnnnnnnnnnnnnnnnnnnnnnnnnnnnnnnnnnnnnnnnnnnnnnnnnnnnnnnnnnnnnnnnnnnnnnnnnnnnnnnnnnnnnnnnnnnnnnnnnnnnnnnnnnnnnnnnnnnnnnnnnnnnnnnnnnnnnnnnnnnnnnnnnnnnnnnnnnnnnnnnnnnnnnnnnnnnnnnnnnnnnnnnnnnnnnnnnnnnnnnnnnnnnnnnnnnnnnnnnnnnnnnnnnnnnnnnnnnnnnnnnnnnnnnnnnnnnnnnnnnnnnnnnnnnnnnnnnnnnnnnnnnnnnnnnnnnnnnnnnnnnnnnnnnnnnnnnnnnnnnnnnnnnnnnnnnnnnnnnnnnnnnnnnnnnnnnnnnnnnnnnnnnnnnnnnnnnnnnnnnnnnnnnnnnnnnnnnnnnnnnnnnnnnnnnnnnnnnnnnnnnnnnnnnnnnnnnnnnnnnnnnnnnnnnnnnnnnnnnnnnnnnnnnnnnnnnnnnnnnnnnnnnnnnnnnnnnnnnnnnnnnnnnnnnnnnnnnnnnnnnnnnnnnnnnnnnnnnnnnnnnnnnnnnnnnnnnnnnnnnnnnnnnnnnnnnnnnnnnnnnnnnnnnnnnnnnnnnnnnnnnnnnnnnnnnnnnnnnnnnnnnnnnnnnnnnnnnnnnnnnnnnnnnnnnnnnnnnnnnnnnnnnnnnnnnnnnnnnnnnnnnnnnnnnnnnnnnnnnnnnnnnnnnnnnnnnnnnnnnnnnnnnnnnnnnnnnnnnnnnnnnnnnnnnnnnnnnnnnnnnnnnnnnnnnnnnnnnnnnnnnnnnnnnnnnnnnnnnnnnnnnnnnnnnnnnnnnnnnnnnnnnnnnnnnnnnnnnnnnnnnnnnnnnnnnnnnnnnnnnnnnnnnnnnnnnnnnnnnnnnnnnnnnnnnnnnnnnnnnnnnnnnnnnnnnnnnnnnnnnnnnnnnnnnnnnnnnnnnnnnnnnnnnnnnnnnnnnnnnnnnnnnnnnnnnnnnnnnnnnnnnnnnnnnnnnnnnnnnnnnnnnnnnnnnnnnnnnnnnnnnnnnnnnnnnnnnnnnnnnnnnnnnnnnnnnnnnnnnnnnnnnnnnnnnnnnnnnnnnnnnnnnnnnnnnnnnnnnnnnnnnnnnnnnnnnnnnnnnnnnnnnnnnnnnnnnnnnnnnnnnnnnnnnnnnnnnnnnnnnnnnnnnnnnnnnnnnnnnnnnnnnnnnnnnnnnnnnnnnnnnnnnnnnnnnnnnnnnnnnnnnnnnnnnnnnnnnnnnnnnnnnnnnnnnnnnnnnnnnnnnnnnnnnnnnnnnnnnnnnnnnnnnnnnnnnnnnnnnnnnnnnnnnnnnnnnnnnnnnnnnnnnnnnnnnnnnnnnnnnnnnnnnnnnnnnnnnnnnnnnnnnnnnnnnnnnnnnnnnnnnnnnnnnnnnnnnnnnnnnnnnnnnnnnnnnnnnnnnnnnnnnnnnnnnnnnnnnnnnnnnnnnnnnnnnnnnnnnnnnnnnnnnnnnnnnnnnnnnnnnnnnnnnnnnnnnnnnnnnnnnnnnnnnnnnnnnnnnnnnnnnnnnnnnnnnnnnnnnnnnnnnnnnnnnnnnnnnnnnnnnnnnnnnnnnnnnnnnnnnnnnnnnnnnnnnnnnnnnnnnnnnnnnnnnnnnnnnnnnnnnnnnnnnnnnnnnnnnnnnnnnnnnnnnnnnnnnnnnnnnnnnnnnnnnnnnnnnnnnnnnnnnnnnnnnnnnnnnnnnnnnnnnnnnnnnnnnnnnnnnnnnnnnnnnnnnnnnnnnnnnnnnnnnnnnnnnnnnnnnnnnnnnnnnnnnnnnnnnnnnnnnnnnnnnnnnnnnnnnnnnnnnnnnnnnnnnnnnnnnnnnnnnnnnnnnnnnnnnnnnnnnnnnnnnnnnnnnnnnnnnnnnnnnnnnnnnnnnnnnnnnnnnnnnnnnnnnnnnnnnnnnnnnnnnnnnnnnnnnnnnnnnnnnnnnnnnnnnnnnnnnnnnnnnnnnnnnnnnnnnnnnnnnnnnnnnnnnnnnnnnnnnnnnnnacattagccacaccaagcctggcccctggtcccccatgttggagagcagcggtgaggggcacccagctatggaactccagtcagggtcaggagctgaaccagcacctccagttttttccctctgtctgggtcctctgcctgtcctcacacaaccagtgttccctgctgtaggccaagagccatgtgccatgcactgtgcctgacacgaagcaagcatgtgcaatattaatttgggaaggagaacatggtattgtggccaagtcaatccattggaccttaatttgatttttttaaaagatttatttatttatttcatgtatgcgagcacactgtctctgtcttcagacacaccagaagaggacatcggatccccattacagatggttgcgagccaccatgaggtggttgggaattgaactcaggacctctggaagagtaggtggtgctcttaacctctgagccatctctccagtctcaatggaccataatttttaactcctcaaaagtgaggtggctggaacctggcctagtgatgcacgcctttaatcctagcactgggagccagaggcaggcaaattgtgagttcaaagccaacctgttctacatagtcggttccaggactacatagactcttatctcaaggtgggtaggggatggactgtacgcaacagttaaggaccaccttgtattccttggactaagcatgtgttgagtttatagtgagcctaacccatgagtgagggccggggtcccacgtgacccaggagactacccgctggctctgatactcaccgtgagcagatgcatcacatggtcctgggtcatgttgccgtacttggtaacgttcttcacaggctgtggggaagggaacagggttaccagcattgcagggatcagcagctatagtctagtacgagtcaggtgcttgcactcaacagctcaaatctgccacctcctaacatggaagtgccagcccctcacgcccttcctgcctctatgccctctctggtcaggcgggcagaagcttgtcagagccttcccaatagcagagtttgcttcctcctcccaagccctcccatatgttccttcctgcttcacttcaaattcatggcctcttttttcattcattgtcattgcttgcatatattatatgtctatatatatacaccactagtcctaattaaacctgccccgtctgtatcatgctaacttatgtatgttttcaggactgaccatttggcaccgttcgattgatgtgctctgccctggataaggtaccaatagtaatcctatgagtaacagcatttttgcagccaaagacttggaggaactgagggactataggatgctgaggtgaagaagcactttgcaagctgtgggacttgccctttccccaccaggggagccctaagagttctggcctcctcagtcaccttgggcaagcctctctgaggtgtgccctgctcctcgccagtagttagtgcccagattccttgacaactgttatccttcggcccctccccttggcaaacaccagctaccatttccttcctgccgccttccttaccccaaggagcatgttatccatggacattggacgcatcagcaagggagtagccatccgcatctggctcacaggtttggcagctgtggggcagggaggacagtatgagtccaggtccaagggagtaaggaacccaggggttaagatttgaaacccggtgcgggggaggaagggagatcgggaggggctaaatggagaaatgatgtctgtgaggtgagggacaggtggagcacgcacatttcggaagcttcatgcgaaggctctccagttgcaggttctgggaggtgatggtcagcttgtctaggcggccctgttgctggtacaggaagtaagcagtggtggcctgcccagccaagagcagagccaccaggacagaaacaccggtgtacagagctccacggctgcacctgttgggatggagtaagagcatgatccagagctggacgctgactggaagtggggacgtaagcccggacccacgccctctcagactcaaaccctcccaatagtgaggacatctgctcctgccgccccccagtgtccttcccaggaagatccacctggggcccaagctcaatgggaaggatgagccacgttccttgcctcctctgggctttggtgtctcctctgtgtagtgacagggtaaagtccttcctccttccgagtcccctctaccctagagatctgaggagctaagcccccctcggaagtggggagggggatttgatcttgtttttgctggcagaaaaagataggtgagtttactatgtaagaggaagaagggttttcatctactgtgccgtccccaatccccacggtgacgtcaggtttaaagagaaaagggaaggaagtgcggtaggggacagcaaaagccggatttatacctgaaaaggagaagtggggcctagagtttttacatgtggagcgggaggaacattgtcaggctgaagcagtgccaggcacgtgtgcgtgcacacacacacacacacacatctccaagacaaccccctcacccccacccctgctccagagtccgtctgtcccagagtccctggaaatttgaatagatcttcttccccagtctcccagctctctcatatgtcatgtgagcaaccctcaaacccacagtgttaaaatttggctgtcctccaacaagtgtgtgtgtgcgtgtatactcatgtgtgctgtgcatgtgtatgtgnnnnnnnnnnnnnnnnnnnntatggcctagaagcatcttgtagtgatctccaactgggaaagttcaagagcaacacaggtacctaggcttcatgctcttggacagccagactctcagacttcagtgactccttacagtttgggggcttttttgggctgtgttggggtgcatgcacatgttacaatatggaacacaaggaccctgactgggcaccctgagatttcctgtccagtcttccccactcacccttgggtagggagaactatcagtaatgttatttgcacacatcccctttaagattcaagtgttggggttggggatttagctcagtggtagagtgcttgcctagcaagcgcaaggccctgggttcggtcctcagctctggaaaaaaaaaaaaaaaaaaaaaaaaaagacaaaataacaaaaagaccaaaagaaaaacaaacaaaaaaaaacaaggtaaaagattcaagtggatggatggagttaggcaccgttgtaggaaggcttaacaggggagtgagtctcctgccttttcactgcctttctatttacaacacagcaagaaactcatcattaggggctggagagatggctcagcggttaaaagcgctgactgttcttccaaaggtcctgagttcaaatcccagcaaccacatggtggctcacaaccatccataacgaaatctgatgccctcttctggagtgtctgaagacagctacagtgtacttacatgtaaaaataaataaataaatatttttttaaaaaaaagaaactcatcattagatgccagcgccttgatcttgggattctcagccttcgtaactatgggaaataaatctccagatttttattattattattattattattattattattatttatataaacgacccagtctgtggctttctattatagtaacacatactcagactaagtaagacgaactacattggaaatcctcgtgataagtttgcatcttgcctactccagcaaccaggaagggtaatttaggaaactccagaaaacctgtctgcctggtaacttatgacatcacagacacagctaattctcattggcttgccaaccctctgtatttcctaagccaagggctggagaaaggagatcagacaggagggagaataggtttaaatttcttggccttctgaaggaagatggaacctgggctcaaggtcttctgcttcatctactttggtgactcatggaacccccgaacccctctaccaccccatattcagatctagtcccagctctacctgctaccacatgagcttggggtagccacgtccctctcctttcgaacttcaacctttcagaaggccagtgaacacaggtttgtattgaagatgtgaacagtagccataactggcatcctggcttgcctaactctggggccaggaacaagacacttctgcgtgtggaccaggttagggcttggaatgagcggttgttaaataacgaagagatgaaacataaataacgaagagatgaaacacttggccccacaccggacacacatttcctctaccagtaatactgctctcaggaaggtcactatccataacaatgctgccctccaggaggctggatgtcaagcccagcatcatctctccttccacttttattcaatttaatattattttgtttttctgagatggtctcatgtagatgagtctggccttgaacccctgatcctcctgcctcca

SEQ ID NO: 44 - DNA, 4013 bp, Mus musculus
tagcgggggcgagggggcgtgcacgtgaatcccctggccagatctctggcatggccgaggccaggaagcggcgggagctgcttcccctcatttaccatcatctgttgcaagcaggctacgtccgcgcggcgcgggaagtaaaggagcagagcggccagaagagtttcctgactcagcccgtcacccttctggacatctatacacactggcaacagacctcagagcttggccagaagcagaaggcagaggatgatgagacccttcaggctaagaagtctcgagtgtcggatcctgttagcagctcagagagctcggatcaggagaaggaagaggaggcagcaaccgaaagggccaaagccaccccaagaccgacacctgtcaattctgcaaccgcagctttgccatcaaaagtaaaagaaaagggaaagaccaagacagccaacaagacggtgaactctgtgtcgcaccctgggtccggaaagacggtggtccacctgctctctgggaagtcacccaagaagtcagcagagcccttggcaaacactgtcttggcctcagaaactgaggaggagggcaatgcccaagccctcggacccactgccaagtctggaacggtgtcagcgggccaaggcagcagttccagtgaagattcctccatctcaagcgatgagacagatgtcgaggtgaaatctccagcaaaaccagcccaggccaaagcttcagcagcccctgccaaggatcctccagcaagaacagccccaggccctaccaagttagggaatgtggcgcccacacctgctaaaccagccagggcggcagcggcagctgctgctgctgctgtggctgctgctgctgctgcagcagcagaagagtctgagagcagtgaggaggactcagacagtgaggacgaggcccctgctggtctgcccagccaggtaaaagcctctggaaaaggtccccatgtcagagccgactcggtgtctgccaaggggatctctgggaaagggcccatcttagcaaccccagggaagactgggcctgcagccacccaggccaaggcagaaaggccagagaaggactcggaaaccagcagtgaggacgattctgatagtgaggatgaaatgccagtcactgtgaatactcctcaggcaaggacttctgggaagagccctcgggccagaggtacctcagcccccgccaaggagtcatcccagaaaggggctcctgcagtcacccctggaaaggcaaggcctgtggcagcccaggcagggaaaccagaagccaagagcagtgaggagtcagagagtgacagtggggagacaccagctgctgcgactctgaccacgagtcctgccaaggtgaaacctttggggaagagctcccaggtcagacctgtttccaccgtcaccccggggtcatcgggaaaaggtgccaacctgccctgccctgggaaggtggggtcagcagctctcagggtccaaatggtaaagaaagaagatgtctcggagagcagcagtgcagagctggacagtgacgggcctgggagcccagccaaggcaaaggcctcccttgcgctccctcagaaggtgaggcctgtggccacccaggtcaagactgacaggggcaaaggccactcagggagcagtgaggagtcatctgacagcgaagaggaggcagcaccagcagcctctgctgctcaggctaagccagctctggaaaagcagatgaaagcttcctctaggaaaggcacgcctgcatccgcaacaggagcgagcacctcgtcccattgtaaggcaggagcggtgacctcttcagccagcctgtcatccccagctctggccaagggcacccagaggtcagatgtggactcttccagtgagtctgagtcagaaggagctgctcccagcacccccagggtacaggggaagtctgggggcaagggcctccaagggaaagctgccttggggcaaggggtggccccagtgcacactcagaagacagggccttcggtcaaagctatggctcaggaagactcagagagcctcgaggaggactccagcagtgaggaagaggatgagaccccagcacaggccacgcccttggggagacttcctcaggccaaagccaacccacctcccactaagacacctccagcgtctgcatctggaaaagctgtggctgctccaaccaagggaaaaccacctgttccgaacagcaccgtctctgcaaggggccagcggtctgtgccagccgcgggaaaagcaggggccccagcaacccaagcccagaagggtcccgtggctggcacaggggaggactcagagagcagcagtaaagaggagtctgacagtgaagaagagacgccagcccagataaaacctgtggggaagacctctcaggtcagagctgcctcagcccctgccaaggagtctcctaaaaaaggagcccatccaggaacccccggcaagacgggatcttcagctacccaggcccagccagggaagacagaggactcagacagcagtagtgaagagtctgacagtgacacagagatgccatcagcccaggcgattaaatcccctccagtttctgtcaaccgtaacagtagtccagctgtcccagctcctaccccagaaggagtccaggctgtgaacaccacaaagaaggcctcaggcaccactgcccagagctcctcctctgagagtgaggacggggacgaggacttgattcctgccacacaaccctccacctatgctctcagaaccagtgtgacgacgcccgcagccctctcacgagcagcttcccaacccagcaagagtgagcagtctagccggatgccaaaaggcaagaaagcaaaggcggcggcgtccgctcagaccagcagtgccgtggaaacactccccatgatgcctccccagagcgcacccatccagcccaaagccaccaacaagctcgggaaatccaagctccctgagaagcagcagcttgccccaggctaccccaaggcccccaggagctcggaggacagcagtgacacttcttccgaggacgaggaggatgccaagagaccccagatgcccaagtcggcccacaggctggatccagacccttcccagaaggaaactgtggtagaggagacccctacagaatccagcgaagatgagatggtggccccctcacagtctctcctctcaggttacatgactcccggcttgactgtggctaattcccaggcttcaaaagctactcctaggccagactccaactccttagcttcttctgccccggccaccaaagacaacccggatggcaagcagaagtcaaaatcccaacacgcagcagacaccgcactccctaaaaccggtaggaaagaggcctcctcgggctccacgcctcagaagcccaagaagctcaagaagagcacctcaagctcgccggcccccacacagacactgccgaacagcatcacccagcgcctcctggagcaggcctggcccctgagcgaggcgcaggtgcaggcctctgtggtgaaggtcctgacagagcttctggagcaggaacggctgaaggccacagaggccatcaaggagagtgggaagaagagccagaagcggaagttatcaggggacctagaagctggggccccaaagaacaagaagaagaaggagcagccagtgcccagggcaagcgctgtttccccagaaaaggctcccatgacttccaaggcaaaatcaaagcttgacaaagggagtgctggtggcaaggggaaggggtctcctggcccccaaggagccaaggagaagcccgacggcgagttgctggggataaagcttgagagtggcgagcagagcgacccgaagagcaagtcgaaaaagaagaaatccctcaagaaaaaaaaagacaaggagaaaaaggaaaagaagaaaggaaaaaagtccctggccaaagactctgcctcgccgatccagaagaagaaaaagaagaagaagaagtcagccgagcctgccgtgtga

SEQ ID NO: 45 - DNA, 3963 bp, Mus musculus
atggccgaggccaggaagcggcgggagctgcttcccctcatttaccatcatctgttgcaagcaggctacgtccgcgcggcgcgggaagtaaaggagcagagcggccagaagagtttcctgactcagcccgtcacccttctggacatctatacacactggcaacagacctcagagcttggccagaagcagaaggcagaggatgatgagacccttcaggctaagaagtctcgagtgtcggatcctgttagcagctcagagagctcggatcaggagaaggaagaggaggcagcaaccgaaagggccaaagccaccccaagaccgacacctgtcaattctgcaaccgcagctttgccatcaaaagtaaaagaaaagggaaagaccaagacagccaacaagacggtgaactctgtgtcgcaccctgggtccggaaagacggtggtccacctgctctctgggaagtcacccaagaagtcagcagagcccttggcaaacactgtcttggcctcagaaactgaggaggagggcaatgcccaagccctcggacccactgccaagtctggaacggtgtcagcgggccaaggcagcagttccagtgaagattcctccatctcaagcgatgagacagatgtcgaggtgaaatctccagcaaaaccagcccaggccaaagcttcagcagcccctgccaaggatcctccagcaagaacagccccaggccctaccaagttagggaatgtggcgcccacacctgctaaaccagccagggcggcagcggcagctgctgctgctgctgtggctgctgctgctgctgcagcagcagaagagtctgagagcagtgaggaggactcagacagtgaggacgaggcccctgctggtctgcccagccaggtaaaagcctctggaaaaggtccccatgtcagagccgactcggtgtctgccaaggggatctctgggaaagggcccatcttagcaaccccagggaagactgggcctgcagccacccaggccaaggcagaaaggccagagaaggactcggaaaccagcagtgaggacgattctgatagtgaggatgaaatgccagtcactgtgaatactcctcaggcaaggacttctgggaagagccctcgggccagaggtacctcagcccccgccaaggagtcatcccagaaaggggctcctgcagtcacccctggaaaggcaaggcctgtggcagcccaggcagggaaaccagaagccaagagcagtgaggagtcagagagtgacagtggggagacaccagctgctgcgactctgaccacgagtcctgccaaggtgaaacctttggggaagagctcccaggtcagacctgtttccaccgtcaccccggggtcatcgggaaaaggtgccaacctgccctgccctgggaaggtggggtcagcagctctcagggtccaaatggtaaagaaagaagatgtctcggagagcagcagtgcagagctggacagtgacgggcctgggagcccagccaaggcaaaggcctcccttgcgctccctcagaaggtgaggcctgtggccacccaggtcaagactgacaggggcaaaggccactcagggagcagtgaggagtcatctgacagcgaagaggaggcagcaccagcagcctctgctgctcaggctaagccagctctggaaaagcagatgaaagcttcctctaggaaaggcacgcctgcatccgcaacaggagcgagcacctcgtcccattgtaaggcaggagcggtgacctcttcagccagcctgtcatccccagctctggccaagggcacccagaggtcagatgtggactcttccagtgagtctgagtcagaaggagctgctcccagcacccccagggtacaggggaagtctgggggcaagggcctccaagggaaagctgccttggggcaaggggtggccccagtgcacactcagaagacagggccttcggtcaaagctatggctcaggaagactcagagagcctcgaggaggactccagcagtgaggaagaggatgagaccccagcacaggccacgcccttggggagacttcctcaggccaaagccaacccacctcccactaagacacctccagcgtctgcatctggaaaagctgtggctgctccaaccaagggaaaaccacctgttccgaacagcaccgtctctgcaaggggccagcggtctgtgccagccgcgggaaaagcaggggccccagcaacccaagcccagaagggtcccgtggctggcacaggggaggactcagagagcagcagtaaagaggagtctgacagtgaagaagagacgccagcccagataaaacctgtggggaagacctctcaggtcagagctgcctcagcccctgccaaggagtctcctaaaaaaggagcccatccaggaacccccggcaagacgggatcttcagctacccaggcccagccagggaagacagaggactcagacagcagtagtgaagagtctgacagtgacacagagatgccatcagcccaggcgattaaatcccctccagtttctgtcaaccgtaacagtagtccagctgtcccagctcctaccccagaaggagtccaggctgtgaacaccacaaagaaggcctcaggcaccactgcccagagctcctcctctgagagtgaggacggggacgaggacttgattcctgccacacaaccctccacctatgctctcagaaccagtgtgacgacgcccgcagccctctcacgagcagcttcccaacccagcaagagtgagcagtctagccggatgccaaaaggcaagaaagcaaaggcggcggcgtccgctcagaccagcagtgccgtggaaacactccccatgatgcctccccagagcgcacccatccagcccaaagccaccaacaagctcgggaaatccaagctccctgagaagcagcagcttgccccaggctaccccaaggcccccaggagctcggaggacagcagtgacacttcttccgaggacgaggaggatgccaagagaccccagatgcccaagtcggcccacaggctggatccagacccttcccagaaggaaactgtggtagaggagacccctacagaatccagcgaagatgagatggtggccccctcacagtctctcctctcaggttacatgactcccggcttgactgtggctaattcccaggcttcaaaagctactcctaggccagactccaactccttagcttcttctgccccggccaccaaagacaacccggatggcaagcagaagtcaaaatcccaacacgcagcagacaccgcactccctaaaaccggtaggaaagaggcctcctcgggctccacgcctcagaagcccaagaagctcaagaagagcacctcaagctcgccggcccccacacagacactgccgaacagcatcacccagcgcctcctggagcaggcctggcccctgagcgaggcgcaggtgcaggcctctgtggtgaaggtcctgacagagcttctggagcaggaacggctgaaggccacagaggccatcaaggagagtgggaagaagagccagaagcggaagttatcaggggacctagaagctggggccccaaagaacaagaagaagaaggagcagccagtgcccagggcaagcgctgtttccccagaaaaggctcccatgacttccaaggcaaaatcaaagcttgacaaagggagtgctggtggcaaggggaaggggtctcctggcccccaaggagccaaggagaagcccgacggcgagttgctggggataaagcttgagagtggcgagcagagcgacccgaagagcaagtcgaaaaagaagaaatccctcaagaaaaaaaaagacaaggagaaaaaggaaaagaagaaaggaaaaaagtccctggccaaagactctgcctcgccgatccagaagaagaaaaagaagaagaagaagtcagccgagcctgccgtgtga

SEQ ID NO: 46 - DNA, 58822 bp, Homo sapiens
  misc_feature (4679)..(5145): "n" at positions 4679 to 5145 can be any base
cagggaaaggtagacaggtagttccctctgcctctaacctgctggggtccttgtcgagtcacttcctgtcactgggcctgtttccttatcagcaagaggagtgagctgggctagatgctctccaaggacccttctagctctgagaaataaaaccacaaaaataagaaattatgctgatgaggctatgaattgctacaacccttttggcagttaattgggctttagctattaaaataaaactcatgcatcccctctggtccacttgcaattacatcatacagaattaaagctccagtctgcaaggatgtatttactaggatgtttagagcaacactactctattagccaaaaaactagaggcgaataacctgtatcatatcatctcccatctctgtctgttgatggccctactgagggactggttatgagccctctggcagctggagcctgtcttgagcctcagtttcctcatctacaaccatttgacatgctttataggatgttgtgaggttttgattggttagtgttagagcctggaagcacagctccagctcactgcacacactcaacaaatgatagctgttactattactcaaaagagtgtggcagatcccagcatctagagaaatagctctgctgtattgttattaggtgaaaaaagagagttgcagagttgagtgtttagtatgattcccttttgtaagaaaagaagcaaagaagccaggtgcagtggctcatgcctgtaatcccagcactttgaggggctgaggtgggtggatcatctgaggccaggagttcaagaccagcctggccaacatggtgaaacccatctctactaaaaatacaaaaattagctgggcatggtggcacatgcctgtagtcccagctactcgggaggctgaggcaggagaatcatttgaacccagaaggcagaggttgcagtgaacagagatcatgccactgcactccagcctgggcaacagagcgagactccgtttcaaaaaaaagaaaagaaaagaaaaagaaaaaagaaaagaagtaaagagaagtgaaaaaggaaaaggagaaggaggactaaaccttatgaaggatgtctgtgtttgtctgggcagagaaaggatgtgaagggattgaataccaggcttctttctgattgggaaatgaagaggctctagtgtggagaagtgggcagggaatggctaagagggagggaaaaatgatggactttgtcttaatatatctctgaattgtttaacttgttacttcagtaacaacttgtaaacctttaaaagctcctgtgagattaaagatttcgtgtcatttcacgaaagggaaggaagtcttgggaaatctactggccaaaatgacttggcccagggaaaacctgttgttacaatggatgaagggagctactgggaagggcacccttcccagatgggcccttctcttaagagttccactactggaagggtctttgttcaacagcttcatttaacagaaggtaatgctgaggaccagagagggcaagagactggcccaaggtcacacagctgagccaggtgaaaagggcctgactcctgacagtaacacaggggagaggcccagtaacctttcccctgtatcgctgctacctcccacctctgtgtcagagccattcctgctgggagagacaggtagagtgccccatctgttgagcttccttctcttctgttgttcattcttccttcattcatttcctaagtgacctcgccgtgccctgcatgggaatccaaggtgactaaagcatgctgcttccccaagaggcactcgcagttcagtggtctgggagcatctggcttctaccactaacaaaggcattttctcttactggtagagaaatgctctgaggctaattttttttttaatgcactgttttgtttgttgctgtcttaatagttgccatgttatattttatcagtttaatgttctaattttgtgcttgggccctgaggcaattcagtgaagggtatgatttggaaaatgagggaaataaagaaattgtccacagaagagacagcctcccaggagccgaggacaaagcataagtgccgacaatgaattttattaggagcaaaacaaaaacaacctgttgccagacagaaggtattagacaatcctggtgtggttttgttttcgttctttaatttaattccagttctgcatttcttccagggtcagccaaggatgcacaatccagttccttccccactgccttccaaagccttccacattcctgcctccaggcctaaactcagtgagcaccttgcctgccctgccctcccttcttcttcaggagaggtctgtaaccattcctgcacttgccaatacttattaagtgcctgctgtatgcaggcactgtgcaaaatgttggaaataatgcaaccaacaaggcaaaggtaagtctgccttcagggagtttacattctactaaggcatgcattctcaaatggggccttgatgccctcgaggaaatgaaaactggttcctggaggtgttggtggaaaaaaatcttagatcttacaatggtttgtatgctcatcatgtacattcatcacccatccagccacccaagcagaaacctgggtgtcaccaccagttccagctcccagccctctctgatctcaggggtccctcataaggcctggcccgtgaaggattccactctctccctgcaaacatccatctgccttgcttccctcgctacccagtgtagatcccaggacccagaattttagcatctctttgccaatactttagactcctgtgcccttttttccccacccatctggcaaagccctaggcctggataaatcccactatgtacatacatctccccagcctgcagctgggtaggtgagccctgatggaggaattcactcagcaggacaggacgagacacacatacactaaggaccaccaacctcaactggggagccaaggctgtcaggcaattggggattttgtgggcaagttgcttctcaacactctgaatgatcattctttcaaactcctcaccacctcttcttcactctcagcagaagaccttgcctcccactttgcagaaaaaatagaagctcaaaatgaaatctcccttaacatcccactataaacctacatctacatctgcacccatcctctctttgttcctgcttttgggttctagagaactcatccctcctcctccccaagacgaacccccccaacccacatgcctgatcccagcccctcgcacatgcttgagagaactttactcgctgattatctcccctatttcttacactcttggttaacctctctctcctggatctgccattcacttttaaacaaatctcaggtttcttctaccttgaaacacacctcccctaacatacatattggccctagcactttatctttctcgtcctttttatacaaaaacttctcgaaagacccactgcctccctcatccctcctgcactcatcagaccactgccatctgaccccctccatcatgccacacataaatagccctccctaagtccccaacaatctccacgcctgtccataaaccaaagcccagggctgcaccctcctcctatctgacctctcagagcattccctccatcaagtcttcccagctttctaaaatgtctcccttggcctccttccataagcccactctcctgggctttctccaagctgtccagccactcctgatcagcctttgcaggcagatccttttgtacacagccctaatctgtagatgtacctcaaaacttcatcctgggccatctctcttctctctccacattcttctccctgggtaagcttctcctcatccacagccgcaattatcatctgtctatcgacaacttctcatcttcatctctagcccagacctccacgccacgtccaaacccaggtttccaagaaccttctcaacatctgcatgtggtgactgtaaggcatttcaagctcaagatgtctaacatagaatatatactttcacctctctgtccacatcctcctctcctcaatcaaaccacccccctgtctcagtcctcttctagttttttctatctcagtgaaaaatactgcctacttgtttgcacagaaacctcaaggtccattctgacattgccttttccttcccctcccattccaacacacctctgtgaaaactttagttcctgattaactctgggaaccttccactctcttcaactccactgccaccagcaccctccccgctgcccccgccacctaccacccgccccccccccccccacatacactgtcttctccctggatgcctgcctgcactcctaaccctgacttgtcttcccacatctactcatacccaccagacacactccactctccactgggcaggcacacaggtcacagtaaaattcagatttcatcctgtacctcttgggcttacaccgtcagtggcttccaatggctcttaggatggaggaaaaaaaaccctgatgtggccaatccttcacatggagtctgccctctgcccaccttctacactccccagtccccctgctctccctccggactatgctacaaaggcctttttgtgtctattctctcagctgtaccttctgccctaggccctttgcacaggttcttccctctgctcaggtttnnnnnnnnnnnnnnnnnnnnnnnnnnnnnnnnnnnnnnnnnnnnnnnnnnnnnnnnnnnnnnnnnnnnnnnnnnnnnnnnnnnnnnnnnnnnnnnnnnnnnnnnnnnnnnnnnnnnnnnnnnnnnnnnnnnnnnnnnnnnnnnnnnnnnnnnnnnnnnnnnnnnnnnnnnnnnnnnnnnnnnnnnnnnnnnnnnnnnnnnnnnnnnnnnnnnnnnnnnnnnnnnnnnnnnnnnnnnnnnnnnnnnnnnnnnnnnnnnnnnnnnnnnnnnnnnnnnnnnnnnnnnnnnnnnnnnnnnnnnnnnnnnnnnnnnnnnnnnnnnnnnnnnnnnnnnnnnnnnnnnnnnnnnnnnnnnnnnnnnnnnnnnnnnnnnnnnnnnnnnnnnnnnnnnnnnnnnnnnnnnnnnnnnnnnnnnnnnnnnnnnnnnnnnnnnnnnnnnnnnnnnnnnnnnnnnnnnnnnnnnnnnnnntttagtatgtgtctcctccgttagactgtaagctctattggagtagagacaattccatcactagactgtaagctctataggagtagagactattccatccccaatggtaggtactcaataaatatttgctcaagaaaatgggaaatgttgaatgtgtacagacacataacattttccattcaagttcaagacaaagataaccacatacctggacctcctagggttagggactcctgcgcccgtaagaaacatgctgccctcagattctcaatgggtcggtgaagttaagaacagctcactctaacattctccagcctacctcaccttttccctgccatccttccctcaacaactacaacagcctcacatttagtattaatggtatgtgctttggttttagcaatcttttaaaaacacaaaacagggtcaacctcctcggaaaagccagtcagagactatctaatgccctcagagcaaagtccaaactctgttgggggtgggggagttgtaggccttgtctacttcttcatcctcatgtgccctcatttgttccctcttccccacctcaccccaccccacctggacagcccagcagcgcagactaggggttctgggtttagggttcccaggcaatagcagggtgttttctcatgcctagactcatgcagtgccctctgccagtcctctcctttgcacccagcaatttcgggtgtctttatgcctcagcttagatatctctctggggttcggtgctcctccttggggcgcccataggctgcatctgtccctgacaaggcacacaagatattgaactatagttgcttggttacggacagtcgtctctgtgagctttgagggcaactgccatgtattatgcatcttttgaatccccctagcctagccgggtgctagcccaagttaggtgcttattacagatttgttcagttagcgaatgaatcaatgaataaactggcaattcgtgtctggttcatgggcaccaaaaaccgtgcgaaatggataaatgagcaggtaatggcagtacaaagttcggatctagagaaagatccagattagggagttcagagatgagtaaaacgcagacccagccatcagagaattaacaaggaagataaatctcttcaagaagccagccggaaggattaaaagagagtcgtccaagtcccggccggccccgggggcgggtccctgtctagccccgcatgctccgcgccaatgggcggtattgttgatcacgagtctccgcccccttcgccttgaggggcggggccggccactcccggagaggggactacgtttcccggcgcgccgcgcggccggagcgaaagaggagccggaagtggggcgcgcgaggtctaagggcgcgagggaagtggcgggcggggactaaggcggggcgtgcaggtagccggccggccgggggtcgcgggtatggccgaggccaggaagcggcgggagctacttcccctgatctaccaccatctgctgcgggctggctatgtgcgtgcggcgcgggaagtgaaggagcagagcggccaggtaagcgttcgtgggccgtgtgcgagggccgcgtgcaagatgtggagatcagcggcccgcggcccgcgccccgtccccaggcgacccggcaggcgcccggagccgggtcccgcagtgctcgacggcgcggccaggggtaccggaggagccgcaatctctgccttcccactgcgacttcagttcccctgggcctcactttcctcatccgggcagtgggttgggccagaaagtgtgctcgcaggggccgaactttgtaattcccgcttcccttacctccacgcccttcctggtagcgggtattttaagtttcctaagtctcccgccacgtggctaggctctgcgcggccccccctggggcaaggaggttgctgcgagtctcgggggtggattgcgaccagcccctcgggggagcgcctggaaaagggaccctacagcctcttagttgagctggaactcaggcctttagcgattgtctgtactgagacggtcagctttggtactcgaactcgtggtacagtcatttcttacttgattaattcaactgttaatccggtactcagggtgcttcctggtgttcgaatggtgagcaccatctctcagccctcctggagcttacactctagtaaggtagacaaatcaaagaatcacaaaagtgactatatgcttagcaccgcaataagtgttaagaatgagagggatgggccgggcacggtagctcacgcctgtaatcccagcacttagggaggccgagactagcggatcacctgaggtcagaagttcgagaccagcctggccaacatggtgaaacaccgtttctactaaaaatacaaaaattagctgggcatgttggcgcacgcctgtaatcctggctactcatgtggctgaggcacaagaattgcttgaacccgggaggcagaggttgcaatgagtcaagatcgtgccactgcactccagcctgggcgataaagcgagactctgcctcaaaaaaaaaagagagatggatggcagattgccctggtcaggaatagctgaggtgtaaatgccttgtggtgggagggaacttgtgtacacactggcctggagaaagtccactctcttgagcccaggaatttgaggatacagtatgagccatgatcatgccactgcactccagcctgggcaacagagcaagacactgtctcaaaaaaaaattttttttaagtccatagcaggccaggtacggtagctcacgcctgtaatcccagcactttgggaggccgaggcaggcggatcacttgaggccaggagttcaaaaccagcctgaccgacatggtgaaaccctgtctctactaaaaatgcaaaaattagccatgcatggtggcatgcacctgtagtcccagttactcgggaggctgagtcaggagaatcacttgaacccaggaggcagaggttgcactgagctgagactgagccactgcactccatcctgggtgacaaggcgagactccatctcaaaaaaaaaaaaaacgtccatagtggctgaagtgtgaagtacaagggccagatgcccctggggagatggaggcaggggctggctggagtggtctggtgggcagtttgatcttccttggaagagcagtggtaaaccaatggagagttttgaactggtgagacagtatcctaagtagtcagatccctttgccctgtggtgtaggctctgctcctaatgcttgctctcagaacctcctggagggactaaagggtgatgggccctaagacgttatgtatgcttttcccagtttctctgaacctcacttgctcttcctaccgcagctatggtacttcacagataaggggagcaagagatagtacccatcttcattggagcaaaatatcctgccgtcatggagcacacattctagtaggagcagacaggtgacaaatagaaaaagtttaataagttaatgatatagtatatccaatgatagttggtgcttgctataaaaggcaggcaagggggataagggatgtcagacttcgattataagtagggtagtcaaggaagtctcattgagaaggtgtcatttgggcagagacctgaaggaaatgagggagtgagctgtgtagttaacaggggagagaacattccagacaagaagaatagcaaggccgcgttagaggcagggtggcctgacacatttgaggacagcaaggaggacactttgcctgaggtggagcagagggaaactgactcttgaaatcttagtgttaccggctcactgctgggcactgacagatggtcttgttcaaaccagatagcagcctgcaaggtaggtatcgctgttgtccccatgttaagaagaaatctgaagttcgaagacgtgacgagattagttcagtccacccgtgccccacattgcttagcctcattagagtacttgatatcctggcttattgacatttacagagacattgggccctctggcctctgctccaaaggcctggattccacctggttccctctgcttccaccaagggactggtaccatttgggcccagtcttctcccagcagactagtagactgtggtcatgccacctggatgcctcaggtgtctgggctgtgattcgtgctttgggaagattggctggccacgtctttgaaagcttttttaaaggtcaaaggtggggaaaaccctgtctcatggcctctaggcatggatagtgccagagaggctgggagctggatgaatgctagcttggaacattccacctctggcctttcaaaggggttgtctaaaaaggttttagttgggattggttgttcttcttgtctctggaaggtttgggacagaactggcagggccaagcagacatacttcccagagcaaaaagaccctctttttttttttttttttttttaaagaaagggtcttgctctgttgcccaggctggagtgcggtggcacaagcatggctcactgcagcctcgatatcctgggctcaagtgatcctcccacctcagcctcctgagtagccgggaccaccagtgcatgccaccattctcagctaatttttaaatttttttatagagacagtctcactatgttgcccagactggtcttgaactcctgggctcaagtgatcttcctgcctcagcctcccaaagtgctgagattacaggtatgagccaccatgcccagccaaaaagaccctcttctgaaccacctgtctatacaagtcatgagtttggggagatctgggcccaagaaggatccttactgtgctggggattaattgtggctttctctttacctctctgcagaagtgtttcctggctcagcccgtaacccttctggacatctatacacactggcaacagtaagtggtggggcctatagggtggagtagggacggacaccccaagcaactcagcttggaataagctgggatacctatctggtctaagatctgtccccatagcccactgtggacaccattgttgcctccagaaagccagctcacatcacatggatgggtatttctgtgtggatatctggtagtgggaggggacattgagagctgtgatctcttaagaacaagagcttctcaccagcttgtcagttgctcagcaaacgtatattgagcacctcctgaaagccaagtcctgttcttacttagtatgcaaatattgtcacaagtgagacagacatggttccttctttcctgcagctgacattgtagccaaggaggtaggcataagtcaaagaatgaaacaaatgaatgttaaattacagtggtagtaaggattacaaaagagaggaatctgttgccacagccacataaatgggtaagtctggcttcatctgggggtccaggggaagcttccctgaggtgatctttgacttgagagctataggaattggaggagtgaactatgcagtgggtagagagtggcaggtggagtgtacctgccagtggaaattgctaatgctaagtcctgtggctggtggacagtacagatggggctaggtcatcgcatggatagccatgcatgggctggttatccatggtgaggaattttgtctttatccaagagcagtggggccatggtagggtgaaaaagtgaggagattgctctgcaccatggtgagactggtggggccatggtcaccatcgtccaggcaagagctgatggggcttgacacagggagaacagggtagaaagtggattcccaagaatcatagggatgaaaccagggcctgtggatgggtgggagaggaagtatcttattgactccacatctaacttgtgtacccatgcatagagcttgaagggaactcagtttggaggggaaagatttcaatgacatgttgagtgtgagatgccttttaaacatgtaaaatttatgtactcttcaaggaagggggaatcatccaaggatatatcaacagaggaatggttggaaaatggagagagtaattgtgttctcttcatgcactggcctgaccacagctgactaagggagtgaaggacatgcagacatatcccatgaggaatggtagagagtactgaattgccttggatggaaaggaggcaggagaggggtgtgagggaccactgcacatctttgaggaccaagaatagtgcgttctctgaggccccggagacagaagtgggccccaaatgtacctgcttcaggaagacaggtttcagcttctgaatataatgacatcagagctatctaaaaatgaggtgggctaggtggaagtggtgggctccctgtcattagaggtgtgtaaacaaaggcaaaaatggtgtggaagggattacagcctctggtggagagctaaggtcattgaaaaccctgccaaccctcagtcctctgctgctaaggagagcttagagcacagggcacagcccacacttcctcaccctgacttgcccaggtgagtgggtgttattcgtagtacttccttcccccaaaaaactgcttcagtgagctactctgcacactcttccctgccactggccccttctatgggtgagggggacaaggacctcaaacccacgaaaggcagcctagcctagcaattccctgcagagttcaaacccagcaactagctgtatgtatgaccttgagtggatttcttggcctccctgagtctgtcttcacctataaaatgaaaataatgatggcaattatctcattgcattgtgagggttagacacagtgctccatataaagtgctaaaactaccggttggaggctccccgacttcctgcacccgcctcagtatttattaagcatctactacaacccagcaatattcttgatatagctgggaacaaaccagagaaaaatccctgctcaacatttttgttgggggaaaagaggcagaataaattgatacatgtaaaaatgaaacctgtttttaacaggagaatcctgacaagtggctttcctgggaacaagggaccctactatcacatcccaaaccatgacagagcagagtccatcgcagctgggaaacctggggcctagacagtgactccctgggatgggggtcaatgggcgtgagacttcaaagtccagggcctcagccatctgggtgcttatcctacccatgccctagactcactttgccatgagcaagtcacttagttgttcagtttttgagacatgtgtgaggcactgaggatactgtagtgagctgccagctgccttcctccctgggcctttctgtgtaggggaggagtctaggaagtaagtaaaataacaggagatagagaaaagctatgaagaaaatgaaacaggatcacagggcagagcatgccttggaagaggggcaatcttcgagggcctctcttggggggctacattaaagttgagacgggaaggacgaggacctgggcagagtcttccaagaaggcacagtacacacagcatgttctgcagggggaagagcctgggcggttctgtgaggtgcctgcatgggtcagctcctatcacttaaagactggtagctgctgcagctgttatataacattatccagcattcctgattattttaaagactaatcaagaattgtaaaagcactttatgaagtgagtgaaaatgcagaatacaaaattgtgcctatactgtgttttcaccactgtttagattctatgcacattgcctttaagagctggaaggatgcgggaaggtctgtctagtcaattcttgtggagttgttctgtcacccagttggtatagacagtcacccttgtcctgcagaacctcagagcttggtcggaagcggaaggcagaggaagatgcggcactgcaagctaagaaaacccgtgtgtcagaccccatcagcacctcggagagctcggaagaggaggaagaagcagaagccgaaaccgccaaagccagtaagagccttgcagctttgggaacaggctatggaatattgattgttctagggtagagtctacctccagcttcttctcttatcactagaagacctaaaagaccctggggaggagattgggagggcaccacatatctttggcagtatttgagcccttcctccgtgccaggcattatatctccatgctctgggggtgcaaggccgaaccaaaacaaccagatgggcccttccagtctcatttggtgtatggggcccaggagctgccctattacaggctcccaggtgattcttattagctggaaagaagacacacgttcagaagtactgctggagggatttcagaaagcagctagcggacacattttctgtgtgacctgtgggatgctttaggaattgctgatcttcatgttcgtttagaattgtacccattagcactggaacgctgtactgggcactggttttacaccgtttgcaggagtaactcagtcaaagcttttatagccccttcttctcctaaggtcccagggctccttgtactttccccaacagcagccataactctacagaggaattgctgtgtctcctttgcatcgtattatcttcttttgcttacatagaagacacatttcttaatacttattttttatttttcaagacaaagtcttgccatgttgtccaggctggtcttgaactcctgagctcaagtgatcctcctgccttagcctcttgagtaggtggaattccatgcacataccaccatgcccagcttcctgagtctgcttttaaagtgtttgagatcatactaggtatatattttattatttttttgagacggggtttcactcttgtcacccaggctggagcacaatggcgtgatgtcagctcagggcaacccccgcctcctgggttcaagtgattctcctgcctcagcctcccgagtagctgggactacaggcatgcaccactactgtcagctaattttgtgggttttctttttctttcttttttttttttttttttttaatagagacggggtttcacaatgttagccagactagtctcaggtgatccgcccaccttggcctccaaaagggctgggattacaggcatgagccactgcgccctggatatatattatatatcgcttaattttacattataaatgcaaaacgagttcactttgaactgtagaagagcatatagaagaaaacttaaaggttttttgttgtcctaccctgttccctatcattcctaagtgcatctcctcataggtaacctttaaaacttcctcctttgcctctatattcattcaaacatgtattcttacatgcatatatacagacctgcatgctatttgaaacacaaatggtaaaatttcttactgattggctatttggtattaatcaattttataagctgtgataatggaggtgtaattacatttttttgtttgtttgtttggggctttttttgatatgaggtcttgccatgttgcctagactggccttgaactcctggcctcaagtgatcctcctgcctcagcctccgggtatgtaattttatttttttaaaagtcttcactgggttgggcatggtggctcacacccaccggtaatcccagcactttgggaggtcaaggtagaaggatcacttgagcccaggagttggagacccgcctgggcaacatggcaaaaccctgtatctacaaaaaatttaaaatttagccaggcatggtggcgtgtgcttgtagtttcagctgcctaggaggcctgaggtgggaggattacttgagcccaggaggtcaaggctacagtgagccatgactgtgcctgcactccagcctgggcaacagagcaagactgtctcaaaaaaaaaaaaaaaaggaagaagagtcctcgttggcatcctgggcaacatagtgagactccgtctctgcaaaaaataagaaaattagctgggcatggtggcatgcactggtggtcccagctactcaggaggctgagataggagaatcatgtgagtccaggcattggaggttgcagtgagctatgaatgtgccactgtactccagcctgggcagcagagcaagaccctgtctcaaaaaaaatttaaaaacgcatcctcattgagagagaaacatgctgaagtatttgtgggcaacgtggtaggatctatggcattttcttcaaagtaatgcttgatggggaagggtgagtgagataatacatgagatgaaaagattggtcacaagttgttaatggttggagctgcctggttcttcctttctatttactacttaaaaattttccataattacagaaagagagagatggagtgaagtgccaggaaaagaattagatcatgccattcatctcagcaacattcttcttaacaaaaagaaatctgagatttaaggagacaataccctggtataaaagcactgagaagctgggtgcggtggctcatgcctgtaatcccagcactttgggaggccgaggtgggcagatcacgaggtcaggagatcaagaccatcctagctaacacggtgaaaccccgtctctattaaaaatacaaaaaattagccaggcatggtggtggacgtctgtagtcccagctactcaggaggctgaggcaggagaatagtgtgaacccaggaggcggagcttgcagtgagccgagattgtgccactgcactccagcctgggcgacagagcaggactctgtcccagtaaataaataagcactgagaatcagtgaatatcgatatctaacggggcccaggtggcatggttcagccacctctccactaagaagccatttgaattccaggcaactttctctgtggacctgaggctggctgcctgcctgaccactgccccttcttgccgaacagctttcagggctacagtgtggtggcctgtgtgaatggtgcccattgcagtgtgcagtgcccagtaggcagcaagaatgtgggccagtccttttccctccaggggcctccacgtctcatgctgcgggggagttgggaatccatcaaggatgcagacacatagcttcatgttaccatcctcttctctcttgctcctggtggacctggctgatgcatcacagagctcattcctgcaagtctgggctcagcctcagatcctcatgccagcaccaggcagccaataccaatagaattgttaggtgagatgaaacctgtttgccattcatagatgagaaaagctcatctggctcctttagcagatgtttgtttcttgcagccccaagactagcatctaccaactcctcagtcctgggggcggacttgccatcaagcatgaaagaaaaagccaaggtgagtgggactgccttccaagctattgcctatgggatttaaggtgcctggtaggggacagtcttacatgtcagagaaggatagggttgtgagtaattgccccacctggattcagagctcaacctgtgtcaccagttgtgggatcttagtcccttcacctctctgggcctcagtttacttttctataaagataaggatgatgcctgctgcagtgggccactgggcacattctacacctggggtaggcgatttctttcctctttcatgcctgcgttcacccgttcactcaacagatcttgactaatacctgttatgttccaggcactgtgctaggtgtggaggcaccgtagtgatcaagacatctgtggttctgaaactctaaaagcattttccaaactggaaactgctcaaaaaacaaggtgtcattttctaataatccagaaagcagagttagatacatacatgtataaagaattgtgcctctgcgattgcctggagcattagcaacaatgtctcaaagtaattatgaagtaatgataagatcaacaacaaactgctacttaccacttagtaaataactaccatgtcccaagaactgggattctgttttctcaacacctctggtgagaggaggtgctgtttttaacctcactttaaagattgggaaacagattgaaggggtagtttacccaaactcacacagctaagaagtggtaagattgggttcagatgcaagtggcctgtgctcttagttcaccatgccataccagatgtgtctgtcactcttgttctctgtaggcagagacagagaaagctggcaagactgggaattccatgccacaccctgccactgggaagacggtggccaaccttctttctgggaagtctcccaggaagtcagcagagccctcagcaaatactacgttggtctcagaaactgaggaggagggcagcgtcccggcctttggagctgctgccaagcctggtaagaagtccccacctctaggaacctagtccccagaacttgggctggtgaggcaggcctaggcattgctttaagttctgggacatttctggaatcaaaagtttgtctccaggacagccaggttcctgcatcttaggacttttctcatcacctagacgagggagggtcagcttacagggacctggcctcaggctgaacagcccacctggtggttggagcattttctgctttatgactccctggtgagttacagggacaactggcagctcagagactaaactgaaaggcctgatttgcctctgtttcctatgtagagtagacatctgtctggcctgcatcagtggatatgatggtggatggaggttctgtagactgtcaggtgctggtgcatatttgttgggtcccctcacagcccttcccagggcctcagagatgtgtgggaacatagggatggtgatggtacccacctcagaagggggcttcacagctcagtgcatgtgaggcacacgaggggtgagcgctcagcacctggctttgatgagcagctggtttgtggggaggtgctggggaggggcaggtgaggctggaaagggagtccctcagtcccctccgtgtccgatcctcagggatggtgtcagcgggccaggccgacagctccagcgaggacacctccagctccagtgatgagacagacgtggaggtaattgccacccatccctaggagttgccctctcccagcctctaacccttccaggaacctgtctggggcttcagacaccagtgggcccagatgagttcagcaactgtggtagggtgaccaggagctggaaaggctgcagccggagaggggcagggagaggagtctggtgctgcttgctgcactctgagtgtgagatcagccctgggggcaggagagggacaccctcctgcctgtgagactagacaagccttcctgggagaggtgccctggagtagggcctcaaagcacagtgggcttcactgggaagggatgtggaggaggcagggcattccagacaggaaatggggcaagaacagggcccagaggcaacagtgtggctgtcgtggtctggctagggctgcggctgctgagagggttctgggccaactggtgaatgccaggcctagacacttggctagagttgggcaggactcttgggtttgtgaactttgacctggaaaaggtctccacaggttactttttattgtgtacctactaagtggcagacctggggaatatagtgatgagcaggacaggcagagttcctgctgccatggggcaagggagcgtccctcagatatttaattggtgatggctgctatgaagtggaaatgtagagggccacgcagggcaggaacctgacgttgatgagtaggcgtaagcagaaggaatggcatgtgcagagaaggcggcaaagagagtttggtgcttttaaagaacattgatctttttttaagacagtctcactgtgtcacccaagctggagtgcagtagcgcgatcttggctagctgcaacttccacctcccgggttcaagcgattgtcgtgcctcagcctcccaagtagctgggattacaggtgcacgccaccacgcctggctaatttttgtattttttgtggagacagggtttcaccatgttggccaggctagtctcgaactcctgacctcaagtggtccatgtgccttggcctcccaaagtgctgggattacaggcatgagccgccacgcctggccaaaaccttgatctttaaatgagagggagaaaccaggcacggtggctcgcacctgtaagtgcagcactctgggaggccaaggcaggaggatcatttgaggccagaagtttgaacccagcctgagcaacatagtgaaaccctgtctctacaagatgttattttttaaaaaaacaaataaattatggggaaagtgacacaagatgaagtcctaggtagacaggggccagatcttctgtctgaccttgaggaccaccataaggaatttgggttttattctaggggctgtgagaagccatgccagcaaggagagatggcctgatttgcatttaataagattgctggctgcagcctgggttggagggcagtgcagaataaaagcagtaagaccatgtaggagactattggagtaatactgatactggcataagaggctgggggctgggagaccaaggtgtccacagttggaaagatgttttcaagggaaaaccagcacaagtcagggatgaactgatctggtgcccagggaacttctcactttactgtgctgcctggcccagtaaccctgtgaaggttgaaagctcacccccatctaccccaggccttaccaagggctgccctccaccttccgtcctcacccttgcgccctagataccaccagctgtaaggacatccctggcttctgtcaccccaggccttgccaaagggaagaagaccactcccagccctccataaacacacaacctcaatgggctgaggctgtgcagagctccagtagcagacgccccagaaacccagggccgcaaggggtctgatggatctcagaggtagaagtagggcactgactgcctgggaaatgtctgaattgtggaagtgtaggaaagagctcacagagggaaggaatttgcccaaggtgtggcaagccagtggcagaggtggtgttcacatcctgaactcctggccctcaggagggctgctgtgatcagatacttgagtttaaggggcagacaggatgcgctctcctgattgagatgcaagcccttctctcaggccaagcccggtgtgtgccaggtgggagatgaacgtaatggttttgagatctgttccaaagtcagacagtccagggttccaatggggctctgtcccttcatattgatcatgagtgattttacctctttaagccttgtgtacttttctggaaaatggatctaaagctaatagccgtctcagggagttgcttaaaaatccagtgacattaggaaagagctttatcaactgctgaagcccctaatacagaaccttagggggaaacagtaattattattcattttctaattccatcctcttgttccaggggaaaccctcagtaaaaccagcccaggtcaaagcctcatcagtttctactaaggagtctccagcaagaaaggcggccccagcccctgggaaggtgggggatgtgacaccccaggtcaaaggaggggccctgcccccagccaagagggccaagaagccagaagaggagtcagagagtagtgaggagggatctgaaagtgaggaggaggcccctgcagggacacgaagccaggtgaggcctggaggagggctgccccttggaggacctgcgggtcccccagcagcctgagcactctgccatgagcacctctgccactggagttggggagagggaggactatggtgtgaagttgaagagcaagaacagcctgcttcccacaggggagtcttgcactccactttgtctgtgaccaactttacctcagtttctctgcctagtaaatgggccgctgtcctcgtcccagccagtcctgctgtgagggacttgagaagttttgattgcctaatcctctgacttctcaggacaaaccagaccctgagcaggcaaacactacgttagctaaagggaatccagttcccttccccatctgctgggagtgggcagggctgcagccccaaggccctgggtgtatcccaagggcaagacaggggggctggaaagcaatggaagtcagagcaggaaggaggaagagtgagggtcacccacccagccccaggcctgggcaggacaaggcgggggcatgcagtagataagcagatcccctgcgttagctgctggtaaatggtaaagaggaagtgggggacataggaatggcaacttgaagcagagtgctctgggctggccttgggagaaggcgtctcagtaaagaccagaaggaggaagcactcttaggaaggtcattccaggcaggggctcagcaagtgtcaaggccctgaggtagaagtaggactacgaattgtgacaaattgttgttcccaccccatctacagggaacttctacgcctcggctgtctattttgcagtgtctgggggctacacagtgttggatgggcatccactttgagaaggaacacaaatgtgaattttttttttgagacagagtcttgctctgttgcccaagctggagtgcagtagcggcaatcatagctcactgcagcctcactcctgagtagctaggaatacaggcacacaccaccacacccagcttgtgtgtgtgtgtgtgtgtgtgtatagacagggtttcactgtgtttcacaagctgtggactcaagcagtcctcccaccttggcctcccaaagtgccgtgattacagatatgagccaccgcacctggccataaatgtgaacttttatgtaaaatctgctttctccatgttggctcaaaaatttaaaaaggagctagccaagcaagacctgtgtggagcagcctgcactttctgcatgagaagcttcttagaagatcagagctgctgttttctagggttgttggcccagggctgaacacccagggccttccagggaagacagggcctgcagccaccctgccaaagccccaagacagtgcagagccccaccgaggagttagtgaagagggggccaggtgtgcaaaccttgccccatgaggctgagggtgggcttccaggggtcctgctgctgtccatgtgcagaaagtccagtgagggcctccctcagtcccttccccactttcagactgcctcttcattccttcccttccctgggcctttgcacaccccctccccacagcccagtctgatgatgctcccgataagccagtgcctgtgcctccagagctctctggccagtgggagcccagcagaggacaggctctaactacccagtgtgctggggcaccagggggaaccatgttaaggaagtggtgtctcttagggagccagagacagaggaggcagtggctaagtgaaatggaacagggggcatggaggctccaggagtgagagtgtgtgaagctgatcgatttttgagaaaccaggaggccagtgtggccaaagtatcagtcaaggtggggagtggggagggaagcaggggaggtcttaggagcctcattaaggcctctggactttatcctaaaggcatcaccagagagttttcacaagcaggagagcaagctgccctttctttttcaccaggtaaaggcctctgaaaaaattctccaggtcagagctgcctcagcccctgccaaggggacccctgggaaaggggctaccccagcaccccctgggaaggcaggggctgtagcctcccagaccaaggcagggaagccagaggaggactcagagagcagcagcgaggagtcatctgacagtgaggaggagacgccagctgccaaggccctgcttcaggtgaggcctgaggagggagactccatgcagccaggcccgtccccagaaggccttctcaggacttgttctcccactctgggccagagccccgggcgtgcctcagaccccagccccttactcccctctcactgtgtggcatcatttgccctatctggtcttctgtacgtggtgtcctgtgtctcctcacacgtccatcctctgggctgtctccccttgtcttgtttctccaggcgaaggcctcaggaaaaacctctcaggtcggagctgcctcagcccctgccaaggagtcccccaggaaaggagctgccccagcgccccctgggaagacagggcctgcagttgccaaggcccaggcggggaagcgggaggaggactcgcagagcagcagcgaggaatcggacagtgaggaggaggcgcctgctcaggtgaggcagaggggaggggtggagagtagccccatgcctaaaccccagcacctgcatgggtgtggccacctttgccacatccagctcctgtctccacacgtccaccctctgggctctcccctcatcctgtttctcactccaggcgaagccttcagggaaggccccccaggtcagagccgcctcggcccctgccaaggagtcccccaggaaaggggctgccccagcacctcctaggaaaacagggcctgcagccgcccaggtccaggtggggaagcaggaggaggactcaagaagcagcagcgaggagtcagacagtgacagagaggcactggcagccatgaatgcagctcaggtgaggctggaagccgccctgcatggcctgtgccctgcctcaaaagacctcctgtggttttgacttttcctctctgaacctagagccctgtgcggctggcttcgtttgctctcctcccctcactcacattctccttctggactccctccctaatcttgtcctttgtgtctcccaggtgaagcccttggggaaaagcccccaggtgaaacctgcctctaccatgggcatggggcccttggggaaaggcgccggcccagtgccacccgggaaggtggggcctgcaaccccctcagcccaggtggggaagtgggaggaggactcagagagcagtagtgaggagtcatcagacagcagtgatggagaggtgcccacagctgtggccccggctcaggtgaggccccttcctgtaaggctctttctttttcccccccactcagagtggagctgcctgtggcctcccaacctcacactgggactctgtctacaatcttagtttcttaatgtctgcacacacctaccctgggctccctctcccgatcctgtgtatctcactccaggaaaagtccttggggaacatcctccaggccaaacccacctccagtcctgccaaggggccccctcagaaggcagggcctgtagccgtccaggtcaaggctgaaaagcccatggacaactcggagagcagcgaggagtcatcggacagtgcggacagtgaggaggcaccagcagccatgactgcagctcaggtgaggcctggggaaggaggctgctacatggcctgatctgccacaccacagtcagcacccccggggagctgtgctccctcaggcagagcatgggttttggctggtggggcagaacagatgggggactctgagttcaggaaccttctccagcctttctttggtgtcccctcaggcaaaaccagctctgaaaattcctcagaccaaggcctgcccaaagaaaaccaataccactgcatctgccaaggtcgcccctgtgcgagtgggcacccaagccccccggaaagcaggaactgcgacttctccagcaggctcatccccagctgtggctgggggcacccagagaccagcagaggattcttcaagcagtgaggaatcagatagtgaggaagagaagacaggtcttgcagtaaccgtgggacaggtgaggcctgtgttttctgggcgggcctcagggccgcccctacgtggtcctttggactcctggagacacctctcttccccttgtcatcccaggcaaagtctgtggggaaaggcctccaggtgaaagcagcctcagtgcctgtcaaggggtccttggggcaagggactgctccagtactccctgggaagacggggcctacagtcacccaggtgaaagctgaaaagcaggaagactctgagagcagtgaggaggaatcagacagtgaggaagcagctgcatctccagcacaggtgaggcctagaaggagcaggcccatcccacccacacctgttcctgagccagggctgaggatgggcttgactgggggctagtgttgcctgcaggtgtgcagaagcctcagaggtagcctcaacacagcttccttccctatctttcactccatgtctcctctgcccatcagagctccagggtctctgtcttgtttgccttttgaggtcctcctgctgattgattccctgtggttttcacaagctctggagttcccaccctgccaggtgctgcccttgtctggggttgctgaggccctgttcctcagggaagtcctgtctctgtggagcatggacatgctcctgcagtgtggagcgatggggttgagatagagggtgtgagcctgggctgcgcagcatgacaggtgagagcatctaggccttttacaggaggtggcagcatctgagccatgggctgaaagagttggccaggtgaaatgggcagggagagtgttccaggcagaggaagcagtctgtgcgaggccagggaatgagagagtgcctggcttgggtgccttgccacaggcggcacattgtggtgggatggctggcagttgtttagagccagaccgcctgggttcaagtttcagctccacagcctggcaagtgctgtaagccctcagagcccttactctcctataaacaggaaatcagccctcacaggtttgggtgagaatttaggtgagatctcacctgctacacccagcaagggagctgcacacagcaagttgtctctgtcaccctgacgatgggccaggctaatgtggaacagatcaggagtgaggtctccaagcctggaagagctgagagaagatggctcactccctgcactcacccacccactgtttattatttttaattgtcgctctgtttttttctgtaaccactcagaaattagtcatttcttttttctctgtaccagagcacacatttctactgatttttttttgtcctcctctcgttgacttgtgggacctcagggctctagaattcctccattgaggtttttaagctctgcaggggccccttccagagccgcctctactctttcccaagctgcaggcacattccagacccaatgccttacagagtttcattatgcagctcacttaaatatttgtcttcccttctgagcctcccacctgtaccatgaggtgggtgttttatttttattttttgaaccatgggctattttgaagtaagccgtttaatttccaaatatctgggattacccaggtttctttttgttgatttctaatttagtcacattgtggttggagaacatattttgtatgatttaaatccttttttgtgtattgagacttgttaggtcaagtcagtcttgtgtcttgtttcttgtggaaaacatggctcccctctggaggatttacgtgctctactgatgagcacctcggcctgagtcatacttggtccacactgtagggaatcttcttgaagtcctgattcttcacctcatttgacctcatgtgtttgaggaatgctgggggatggggttgttttctgacactgaccagatgccatccctgagtgaggcaggggccttgagatgctgccagagtcctcattctgtttcacattaggcttgctgtcactcctgttaaggatctcactctgggaatttccctttttttttgttctccttctatttgttggaatccctgacaggccttttgggggttctctggatatcggttaaggctagattaagctgaagaaaaccttaaacaacaagtatcttgttctgccgtggctgcttgagctccagctctgacctcagcattccatctagcctggaggaggaagagacatgtttctgaccttttatggcactcaacttacatcctatgagccagaatttaatgacattgccacctagctgaaagggagcctggaaaacatctgttttaggtagtcttgtgcttagctaatgctaaggaaggcacgcacaatgagtttgagtgtttattatgttccagacatcatgttaaactctgaatctcctatttagtcttcatcataacccgtaggtgggccttattattatctccatttgatagaggactgaactgaggcccagtgagatcaagtgatgagctcaggttcacacgcctattgcatggaggagccagaatccagactcgggctccagctccagagtctgtattcttggctagctgctttactcaatctcaccttctccctccttaattcccttttctccactcaggtgaaaacctcagtaaagaaaacccaggccaaagccaacccagctgccgccagagcaccttcagcaaaagggacaatttcagcccctggaaaagttgtcactgcagctgctcaagccaagcagaggtctccatccaaggcaagtggggccagaagccacaggaggtgtggagggttggggtagagaggaggaccagtcactgagcccagccaggagaaggtgcgtgcatgggcaggccacccacccagagttgtgccatagtggggagtgggacctgaaaggaatcacttttgcctccaatactattatccccctgcaattcaggtgaagccaccagtgagaaacccccagaacagtaccgtcttggcgaggggcccagcatctgtgccatctgtggggaaggccgtggctacagcagctcaggcccagacagggccagaggaggactcagggagcagtgaggaggagtcagacagtgaggaggaggcggagacgctggctcaggtgagggggagggaatggagatcatcccctacatgggatgtaacacctttgccacatccagctcctgtcttctcacacgtccaccctccaggctctctcctctcatcctgtttctccctccaggtgaagccttcagggaagacccaccagatcagagctgccttggctcctgccaaggagtcccccaggaaaggggctgccccaacacctcctgggaagacagggccttcggctgcccaggcagggaagcaggatgactcagggagcagcagcgaggaatcagacagtgatggggaggcaccggcagctgtgacctctgcccaggtaagacttgccaggcctctgagccaccaacactcactcctcagaacgggggtatagggctgggcgtggtggctcacacctgtaatcctagcactttgggaggccgaggcagatgtatcacttgaggtcaggggttcaagaccagcctggccaacatggtgaaaccccgtctctactaaaaatataaaaattagctgggcatggtggcgggtgcctgtaatcccagctactcgggaggctgaggcaggagaatccctagaacctgggaggcggaggctgcagcaagccaagatcatgccactgcactccagcctgggtgatgagagtgagactgtctcaaaaaaaaaaaaaaagaaaaaaaagaaaagtgaaaaaccagggtttagggccaggtaaggaaaagaaaggaaggccaggttaaggcttaaggctccagctccaccatgccctcctccgtctgctgtcatccacatctccttaggtaaaacctgctactaaaaccccccaaacgaagacttccgtagctaaaagtgtcctgggtctatatctaggtcgaggtctccaccagctctataagctaggccagtatttcccaccaaggcatatgagaccaagaatctacatgttagttattgtgcatacgttaacgttatacaaaatgactctccctgtcagagtcccagggaagcttggagtgtggcacaggtccccctgaggtcctggagagatggaggaagtctcatcctgcaccttggcccggagcctcacataggcaggcgcatcttctcaggcagggcttgtctagcttagtgcaaagcctggaccctggagagtggggagaaagaaaatctgaacaattccctctgtctgcttgcagaagatagcagggcttgctacatcctacagaagtgtaggatgacaaactccagcactgccaaggcacaggtgtgtgatggaaatgactgatgcaggcctggcaggaatgatagatgtcggccgggtgcggtggctcaagcctgtaatcccagcactttgggaggccaaggcgggcggatcatgaggtcaggagttcgagaccagcctggccaacatggtgaaaccctgtctctactaaaaaaatacaaaaattagccaggcgtgatggcaggcgtctgtagtcccagctactcgggaggctgaggcaggagaatcgcttgaacccgggaagcagaggttgcagtgagccaagatcatgccattgctttgcactccagtctgggcaacagagtgagactctgtcacaaaaataaaaaaaagagatgataaatgtcaggagagatggtagatagtggtagcaagtagggcagaccggagagcccttgccccatccagaggggcagttcttatcagcttcagccagtcatgactgtggagatggaccttctgtgtggccaggtcttccatttcttaagggaagctggaagtccctgtgccaggccaagctccataacctcttagatttgttttcttcatgagtaaaacaagcactgagatgaatgctccctagccctaacctctgcctttgatacaccaaaccaacaattactgggggtgaaagacattggccccaccctcaaggagctcacagtctgtggggcaagacaggtgaccggattatcgcagactatgctagtggtgctgacagctgaaagagcaggtctctgagaggccagaaaaggaggagatgattgagctgaacctgaaggatgaccaggcacaaaagtggagaaggcccctcagtgtgtgcagaggggctgggcatgaaggcacatggtcactgaaggcagctgtcctgcaggccgtaggccctcccaggtgcttgttactggtagatttatggaggacctaaatgccagactaagacataggccccggccatattttgggctgtgtagtttttttgtttttaagttttcaatgagttcttagtcagaatggcctaatctgtaggagaaagccccattcaaaagagcttaaataaggggattgactgtcttaaagtgcacaaagtcccaggttccagctgctgaaaagctggttcctttagctgagcgtcagtggtaaccagatttcttcatctctgcactccactagctttatggtcatagcagggctgcagcatctcctaaagtgctgggggcaggccaggcacggtggctcacacctgtaatcccagcactttgggaggctgagacaggcggatcacttgaggtcaggagttcaagaccagcctggccaacatggcgaaaccccatctctactaaaaatacaaaaactagctgggcctggtggcaccagcctataatcccagttgaggcaagagaatcacttgaacctgtggaggaggaggttgcagcctgggcaacagagtgagcagagcaagactccatctcaaaaaaaaaagagattagggggtagacttaaggctactcagacctcaggctggacgttctaccgccttagccatagacaagaggccggtagttcccatgactggctgggaggagggcccaccctccctgaagcatgtggtaggggccactgaacagagtgagggttctattagcaaggaacagatgggggcatggctgttaggaggcagcctgcagtgtgcattgtagttgccccatttaaaaattggaaatgacatgtacaaatcttccagcttctcttgataaattggaagctcaggcagcctgggtcctacttttttggctaggctgagtagggaaaaggggggcccccattccaatagggaccactgagctgccatcaccaccagcatttccacccagatctctgagtcctcctctgactgcagtgcttgctcatccttccagcccccatcatcacacctgccccaacaggaggggatggtagccagtggaacacttctaggtggctcctgcttttggctgggggtgttacaaccggaggtgagctgtgctgggaccactggcttgtgcctgcaaccttgtcccaggctgctgtcacctcttgtcgagacattgggccaacagccctgcagccctcaggttttagctgcatcggagtcataaatccctttcatgttcggagtcagctctggaaggagctagcagggtggaagcatgtttccagtggctgtggggcaggtcaggccagcaggtatccctgtgcatgtgcaggaaggggccacgctgcctcccctggaaaccagagtgcctgagggtcattgcctactggctgtttccccctcagcaaatgccccactccccgaccacgtgcttatccaggtcttgtcccctcagaaggacagtaactccaaacctgccagaagcaagaccctggccccagcacccccagagaggaacacggaggggtcctcggagagcagtgaggaagagctgccactgacccaggtgcgccatgccttctctctgcagatgctgcaggatcagagctgggctggcaggccttgcaggagagggcagatcttgcccatagggaaaatctcgccatatttaaacagcacctcacagcttccagagctctttcctctattgtgacattcatctgagccctgtgaggcaggcagcagtacacagttaaacatacaggcttcagagccaggtggtgttggggcgaagcccagctcttccacccaacagccccatggtcctgggcagatgccttttcccctgtgtgaggctcaatgtttcagccataaaatggggacagtactggcacctctctcctgcctctgtgcactggtgccagcacacaaggtacttgccacagtcccctgcctaagaaagggtgcctgttaactgtgagaagggcagggagtgttgccccatttgacagattgggaatcaagccttagagttgaagcagtttccccaaattctcatgattcataagaggctgaggaaaggtccaaacgctggtcccctggctccctgtatctctctgttttctgtttaggaccaggagtcttcttgaatcccatgagctctgcccaggaccctctctcaagcacctgtggcataccttcatgtgctccactgcacccagagcttaagccacagtcctgctcaggctacacctccaagggtgggaccaggcccaccttatcttcctgtactccagaggcccaagtcagccatgctggtgtggtccaagcttctgtgtgaaccctggcccttccatcagacagcattaccctttgtcctcctctagccccaagctcccagaagcttctgccaggcacctcagagcaccagctcccctgtcccagggcctaaccacagatcctggagttctgcaacctccagaccagagcggtctcatgaaccacctccccttgaatatcacataccacattgttatcaattcatcagtaaggtcagatgctgtttgcacacctccagcaatagggtgctcactgcctctcactttccaatggcacagattacaaaagtaaagaacaaccaccaccaacatcggtaactccctgtattctcatttttctgtttaatctccacaacagccctatgagggtggctccctttgttgtttgcattttaaggaactgggagtgaggctcagagaagttgagggacctgtcccagcatcacatggctgatgacaagtggacagacctggtgtttgagcacaggccattcacattctgacccgttgcctggtgctgccccgacactctcctctcctgggcttgggcattgccctctggctctgtgtggagcctttacgaggccacctgcctctctgagggatctaaacaactgggagggaggggaccgctccccctttctctgtgggggtggactaacacaattaaaatgaacatcctgcttaaactgaaccatttaattggtatgttagtcctgaagattctggagtctctatttaaaaagcagaaaagaagtcagcggtttgtacattcccccaggaggatgcggggaagacgggcatagcccggggaagctgcagcctcttcctgattgagagatttttagttcctaatccccagctcactaattatgattattttcattattgtacatttattgagcacctctctattgacaagtttcagtctgattttattagcccatcagtggggaaagggattgaggccagggtggtgggcagagtcccaggctgggaggcagggatagataccttggctccattcctagacccctcactgtgcctccgccctgttgtgcagagtagacctcaggccagagtctgtgctggggtcaggacagcttccagatttaaaaacaagtaggtgatacatatgttaaataacttaatttagctattccacaatgtatatgtgtatcaaaacatcatgttatataccacaaatatatgcagtttcacttgtcggtaatattttttaaggccaacttcttctattagtttgtcaaagacgtaggccctgctctcaaagttttaggttgaatcaaagaaaaaggaaacctgtaagaaactaaattctggtgttacattgaggcctagcataattggttctagaaggagctccagtctggtgcctggagaactaacttctaatcctggctctggcaccagtttgctggttgccctgggtgaggccacttgccttctctgagcctcattcatctcaatctctgggatgagacttcctgggttggtggggtggaccttgaggctccaggccacatccccagagagtagaatttctcagtcccctggagtggggctggcctagatctgttaagcagcctcaggcaattctgagagaggttcttggagtgtttgttgcctttgtggtcatgtcccttgccagggtccgcagcctaggccatcagccccctctccccactctgtgacttgctggaatgaaggcacagttagaatgagctcagctttgacaggatggggtgagcactgtccagaaagcccctaggtttggttctgcaggcatcagacctacaggtaggaggggtatcccggggttccctctgggtccttactgcccagcacctatagggaggtacaaccaaatgttcaggccagtgctggttttgctgcttcactcccatcagttttttttctaactgaccccagaactacattcctgtgtatactgtgctttccagtttccacagtgcattggaacccctccagtgaatgagcccaggctgggataactactagccgtttcattaaacgggaaactgaggatcagaaagttgaggggcttgaccacacagtgaagtcatgagagaggcgtaatgagaagcaggtcttctcctataccctgggcaagcttcactgcccacctttatgaactctacaggctaatgccccgccccaaccccccacagccaagccccctgcaccacctccctcctatggcccagaggcccagtggggtggcgtgggcaggtggaactaacaggaggcttttgctgctgagctgcttttaacatcccaagacgctattgtttgcctcagtgggttcgttgcttctcttcgtccccgacaatctgttcctgtcttcacatatatatagatcccccctccctcaactgtaagccttctcccactttccatccttctcttttttatatcgtgggaaggaaggctctggaagtggcagatcggagcagccgcgggggaggctatttggcaggggtaggaaaggcctaagcccagagaagcttccaccctcaggcaggcacctttctgttttactttttactttatgcctctccacagcaccttagcaccctgaggagccaggtgtgctaagtcaggctcagggggtaaacaggatggtgaaacagagaccagtctggacctgattccactcctctcttagcctcaggcagctccctcttcctgccctccagctcttcactggccagagagggagcagagctcaaaccagatctgacatttggggaatggaaagtagacctgaccagctccctggctcacaaccatgtgtgttctcgttagctggaggttcaggaaggaaatgggcctggagatgccctcgtgtgcggtgaacatgttcagggatggtgcagttcaaaaccagactggcctgcagaataccagggagctgctgttgcttgtttgctttttcttttattgtttccttggaaaatttaaagcatacccaaagatagataatgtaaagaacccccacgtaccatccccagcctcaacagttaggaactcctgagcaggctcgtttcacgcaaaccctccactcagttccccaacgcccctggattactttgcagccagtctcagacatgtcagctcatccaccaggatttcagtatgcagctctcagttataaggacctttttaagcacaactacgatacagtgtcacacctaataagttgatctacccagtcagtgtccctatttccctgattgtctcatagagttcagttaaaggccacgtacggcattgagttattaatcctctaagtcttaatctgttggttctcacccactcacccaacccttgtttctcttgtgcatttttttgttgaagaaactgaattggtatagctggggagtttcatcctgggccatgtatcaggagggctgcatcagaacctctggggttggggcaactagactgtaaatacctccccaggtgaattgcatattccaaccaggcagccttggaaaactgcttagaccactccctgcattcagcaagtaactgtctctgaagccagccggggaaagaaggcagaattggacattctggccgtggctttgcttccagtagggacagcagccttgggtcgctccctttccctctgggcttgtggttttcccactttgtataagggagctgatcctgctgaatgtagggcttcactgtgagggtcaggtgggctctgggagttgtgaagtgctgtgctgggtcttagcagatgtgtggggtgggagggggcaccctgggcagctggaatggcttctgtgcccagctgcccctgagctcagtggaccctttgccttgtaaaacactccctaaccccatcacctcctttccctggccaagcctttaatcactgggggggtgttttgtttttgtttttcaaggtgattaaaccccctctgatttttgtcgaccctaatcgtagtccagctggcccagctgctacacccgcacaagcccaggctgcaagcaccccgaggaaggcccgagcctcggagagcacagccaggagctcctcctccgagagcgaggatgaggacgtgatccccgctacacagtgcttgactcctggtgagcgcagcccttatgcagtggtgggaggggctgccagcactgccccacattgaggcccagaagggacaggacactggctgagtcacatagcaaggtgttggtcgggaggggcttggggtcaggtctctgggccctgcattagccattctgattagggcctggctcagacctgcagttctgggggaatagttgccagagcttttttgtggcagccccagtcatggagcccagaccagtggctagaagctgcagggaccaggttcctacatagtctaagaaagaattctgtatcagttgactgcctgtggaacaagtggtcagggtggtagtgagcttcccgtccttggtggcatgtaaagtaggttaggcaatccctaagccagagacatcacagggatagatttcatctatcagagagacaggaccaatctgaggtttctttgacttctgagaatctgtgattctaccaatgacaacaggaaaagggttaatgttactattacagttattgtaacagttttacaagcaataatacctgatcctgataggacaatttaaaaatgcagacgggtgcagtggctcacgcctataatcctagctctttgggaggctgaggcaggcagatcacctgagatcaggagttcaagaccagcctgggtaacatggcgaaaccccgtctctactaaaaatacaaaaaattagcctggcgggcgcctgtaatcccaggtacttgagagggtaagccacgagaatcgcttgaacccaggaggcagaagttgcagtgatctgagatgtgccacagcactccagcctgggcgacagtgagactgtctcaaaaaaacagaaagcaggcaaaatagagattactgctgggcatggtggttcgcacctgtaatcccagcactttagaaggccaaggtaggaagatcgcttgagcccaggagttcaagaccagcctgggcaacatagtgagagccctatctctacctatctacctacctacatacatatgtacatatacatatacttatacatatatgtgtgtatgtgtgtgtatatttttttaataaaaatacagattagcacataagaaactatatcacctgtaattctgccccaaataattactgttaacatttgacaaatgctaactttataaaaacctaaaatatacgtgtgtttttaaagcaagaccatactgtatctaatgttcagtaaccttcactggatattttatgacatcgggtttttttcatctttacatatttgcagcacaattcctaatggctacagagaaatcccttgggtggacatgctacagtgtgtgtagccagcaccatgttggaggaagcagagggttttgtttcagggtggaggggtgagggagttggctgttataaacagtgctttgaagaacatgcatgtaaccaggcctctgcagataaccacggggactcttaggagagacgattttaactgcaaggagagtcgtttggtgccggtgctctggcccattgctcaggagtggcagcccgaccagttgggaggggaggggatgaggaagcctggggtcacccccagagcagccatttgagctccctgagccttgtcaaatgacataatgacatctcctgcctgggaggcttggagagggaagtaaacaagcttctacctctgtaagccctgagcacagctctagatcaccagcacaggccggtaaattgggttattgccgctgctgaggaggcgatggggcttttgtgccctgatgtgcccccatctcgctccatttcaggcatcagaaccaatgtggtgaccatgcccactgcccacccaagaatagcccccaaagccagcatggctggggccagcagcagcaaggagtccagtcggatatcagatggcaagaaacaggagggaccagccactcaggtacctggtgggcaagggagggtaatgcaggccagtggggtggggccctacttccatacttacccacatgtgctgatgggatggcctgcaattgctgtcacgcccacactccagaggtcgtggcctcacagccagaggctttctggcctcctagctacaaccccccaaatcacctttgagttatgaggaagagtaatctggggacacagcctcctggccaagcaagccctgcagcactcgagtccctcatgagattttccagcgtagtggggcttttgattttttttcttccagttttgaaatgccatgaacaaaagttgcccttttttggtgtttgtaatagtgacttcagcattcttccaagcctttaccatcttcagtgcatttttatttggtccttgcctgaatctaaaagctgggcattttagggttaatggctggtgcattgtttagatcataaaacttagcacacatccccaccccaagggctgcgatgtgaccagcattcagcaaggccggaacccgggtcttctgagacccagttcattgctctttgggccatatcagtctggtttcccatcccactgagaggatgaagtccatgacacactctgacctctcttcctgaggggtgggctaagggggtgttggggggcggtggggctggtgtgccacccactccctgggctcatcacaagctccaggtcaaaaacttctgggaacatgggtgtcggatgggaagtcaggctgtggtcactgcatccatgagcatcggttcctgccaggccctagggatactgcaggaaccaagacagggacaaggaattcccaggccagtcagggagtggtgaggggcagcgattaaacaaggaaacccacatataaataaaaagtattcaccagctggtaggagaggaaacaataaaaactagagaatagtggggtgacctgctatatgaaggcctcctgagacagcgatgcttaagcagaaaaagcagccagtcacaggatgagctgggccaccctccaggcagggaaactgcaggtaccaggtcttcgggggaagcgcttgggaatgagggaaactgagaggtggggacagctggatgaggagctgggggagaggagatgagccaggccgtggcaagagccacgccacatttgaaggctctcagcaaggggtcatgcccaatttccatgcccaccactctccctgactgctagtggttataagaagtagagatgggggtccaccaggttggagattatccccagtgaaggtgcagattgagtagtggggcctaagctgcttccctgccctgggctgggaactgtcccttgctccttgagaacaatgtgattcgctcataacctgaagcctgccaccagttttgcccctttgactgcccctcagtccctgctccagccctcaccccagccagacagcatctgaccagggtgtggcacagctggcatcccaaggacttgtgagtctgagggctacctcttgccacccacaggtgtcaaagaagaacccagcttccctcccactgacccaggctgccctgaaggtcctcgcccagaaagccagtgaggctcagcctcctgttgccaggacccagccttcaagtggggtgagcttggggagccaggggaagcaagcccacggagcgtagaaggtgcaggcgtggccctgcattgcggcaccagcactcatctgccccatgacctctgcacttggtttgcctccctcggcctcagtggcctaatctgtaagaaggaattacagtacctttcgtagttggaaggatcaaatgaggctgcatgtgtgccccatctaacacagttcctggccctactgaagtgttcaggaaggaccaggtcttacttgccctaatttttccttccattccttctcctttcaccgaattaggttgacagtgctgtgggaacactccctgcaacaagtccccagagcacctccgtccaggccaaagggaccaacaagctcagaaaacctaagcttcctgaggtccagcaggccaccaaagcccctgagagctcagatgacagtgaggacagcagcgacagttcttcagggagtgaggaagatggtgaagggccccagggggccaagtcagcccacacgctgggtgagggtgccaggggaaaggcaagggtgggccaggaagagggtgttgtgtggcctggtggagccatagctctggcctcagctccatatctcagactcattctgcacctgtggctgagcctgggcctcagtttccccacctgtacaacttcatgaggaagtcaatccaaatgatttcagagacctgactttgctgtttgaccactctcagctttttggtatcagactcccttcactggctcccaaaaactccagggccatgtttctggaacagtggaaagcagggaaatagaaatggggcctcaggaattagaaataaggctttggcattcaaatgtcgcacctagcatgctgtgactagcgataagtgtgcaaggagtgttgaagcagtaggaagacttgtggtgaggcggggcaggggatgggggtgagggacctgcagagagaccagggccttcctgaagggctctgcccttcccggctggcaggggccacctggggctaccaacaggatactgtgcttctccagtaggtcccaccccctccaggacagagaccctggtggaggagaccgcagcagagtccagcgaggatgatgtggtggcgccatcccaggtaactgcaagggagaggactggcagcccataggccttagggtggagccccaggccaggctcctgtctacccgatccctcaggtcaggggtctgggtcccctctcttcacagaggccttgggcaaggtcctgtctgcaaggcaccacgtgtggcccagccagcagaccacagccaggctgcctccgtcccctcatagagccctgagtagctgacccttggggtctgtagaagggattgaccttgattctgggtgatgtccggacaaaaacattctttagcagatttattttaaggttactatctgtatgtggcaaaagctagtaattttccatttgtattaataagaaatttcctttttaaatgtgcctgtctagaaagtgtattaattaaaatagttcaggaggcacacgccaagggctgaagtgctgctctgtgccttgttgtccacccactctgcactgatagggcagggtgatcctagaggccccaggctgctttcctcacagcaggccatgactcgggctgggttatggcagtggggtggggtggtggcagcctctttcacaatgggcttcttcagtctctcctctcaggttatatgacccctggactaaccccagccaattcccaggcctcaaaagccactcccaagctagactccagcccctcagtttcctctactctggccgccaaagatgacccagatggcaagcaggaggcaaagccccaacaggcagcaggcatgttgtcccctaaaacaggtaagttaaggtctgcaggagggacatagcaggacacagagggacagggcagtgggccccttcttgccctcctgtagcaacagtcctcccaacatggtcctgtctgcccccagagcctctccaagtgagaccttgtggccttgcattggacctgaagatgctcatcaaagtgcaggtggggccaggtgcagtggctcatgcccataatcccagcactttgggaggccgaggtgggcagattgctcaagcccaggagttcaaggccagcctgggcaacacagagagaccccatctctaaaatttattttaattagccggtgtgatggtgcacgcttgtagtcccaattacttgagaggccaaggcagaagaatgacttgaagccaggaggttgaggctatagtgagccatgatcatgccactacactccagccagggtggtacagtgagaccctgtctcaaaaaaaaagtacaggtgggccccacgcccaggtgtctggctcccatggccctggacagcctggaagtgggggtgtatccagccctgggtggtgctgatgcacctggtaggatagcccttgcctcagaggaagctgcgtcttttggcttgtggagcaagtgttggctctctccaaccatcaccatcaacttttcttccctgtaaataggctcacggtgtgggccttgggcctcagaggatagcttagacaataggctgacagtcacgtttggaggacactcagcacatgcaggagaccccaggcagtagactggccccaggctgttctgactcattgtaaagccttggaaatcccctggccactctggacctctgtgtcttaaccatacaaaacagcagttgatgtatccagtctgtgtcaaggcatggcacatgtagaaaatagtcacattgtatttggagggcagactggattattcaattcacctaacctggggcatccacactccctgaccctactggagctaagggtcaaatatgtaccagctgggcacacttgggacagctccagggcttccccagccttggtgttctgggtgtttgcagataagcagcagaaaagtgggcctggcgcagtggctcgtgcctataatcccagcactttgggaggccagggcgagtggctcacttgaggtcaggagttcaagaccagcctggccaacatggtgaaaccttgtctctactaaaaatacaaaaaactagccagcatgatggcaggcgcctgtactcccagcaactcaggaggctgaggcaggagaatcgcttgaacctgggaggtagaggttgcagtgagccgagattgcaccaccgcactccagcctgggcaacagagcaaaactctgtctcaaaaaaaaaaaaaaaaaaaaaaaaggcagcagcagaaacgtaggctctggggagagaggtttccggggctaactgccctccccagcttccctctccattggctcctgccatcttgaagaatccccagaggatggaattgggcctccagccgtcccgggggcccctctgcctaacctggcctgccctgcccagtccacctcccccagcccaccgcagctctagagccaaaagtcgccagaaatcctggttggggctgaggggccaagctcactgcatgctgcagggggcagccctagcctcagtgtgacatgagtaccacatagagtgtgacatggagtatccacctgggccttcctccaggcaaacacctccaggaccaaaccaccaagccacctttcagagcccagcatgcaggagtgttgtgcccatgagacccagaatggggcagagacctccaagtcacttggaagttagagccggtgaggagacccagtcatggggctttcagctgcagcttgccccaggctgggtcggaagaggaattgctgctcactttcttccccaacattctctgtgagaggcggtgcgacaaggagacattttagagggggctgtggaaggtttttttttttttacacgtgtagtcagcacacaattatcaaaggcaagcagaggcgtggaaaattctaaacaaaggctgcaccagaagtctctctggcaggcagtaaacctgcttagtcagccaccacgtgtatatacactgcacccagagctccccaccttgcctggaccccctgaccaggaagggccgagtgtgggtaatcatcagttgaatgtctgcatggcccccacttttattataaatctacaatgtatcataggaagccttactgttcatccacccctcacgttatagacagggaaaccaaggccctgggaggagatgggtcctggccagaatcacactgaaagtgggtgggaaagtcagacctagaacccaggtctccttcctcccagctccagactccatctccctcctttctgaattttcattccattgatagatttcaggccctttcattaacattctggagtcattttctgtcccccaccctaactggagtttttagtataaagagacagggaaaagctgtaagttagaaatgaagtcagggtgtgaaattggtggaaaggtgtgagcttaggagaccagctggggcagagtgaccgccaagccttgctctccccatctgtgccattgtaagaaaagatggagtcactccctgcaccctcttcgctcttaggtaccataagatctgtcccccaactctcccagatctgtgaccccacattctctctccataggtggaaaagaggctgcttcaggcaccacacctcagaagtcccggaagcccaagaaaggggctgggaacccccaagcctcaaccctggcgctgcaaagcaacatcacccagtgcctcctgggccaaccctggcccctgaatgaggcccaggtgcaggcctcagtggtgaaggtcctgactgagctgctggaacaggaaagaaagaaggtggtggacaccaccaaggagagcagcaggaagggctgggagagccgcaagcggaagctatcgggagaccagccagctgccaggacccccaggagcaagaagaagaagaagctgggggccggggaaggtggggaggcctctgtttccccagaaaagacctccacgacttccaaggggaaagcaaagagagacaaagcaagtggtgatgtcaaggagaagaaagggaaggggtctcttggctcccaaggggccaaggacgagccagaagaggagcttcagaaggggatggggacggttgaaggtggagatcaaagcaacccaaagagcaagaaggagaagaagaaatccgacaagagtgagtgaccgcttctcccagcccaccccaagggctgctgggcaccccacgggggcgggagggaccctcagccagcacctggtctcattcctcccatgtagaaaagagaggctgagaccagcctggccaacatggcaaaaccccgtctctactaaaaatacaaaaaattagctggatgtggtggcgggcacctgtaatctcagctacatgggaggctgaggcaggagaattgtttgaacccgggaggcagagcttgcagtgagccgagatcacgcattgcactccagcctgggtgacagagcaagactgtcaaaaaaaaaaaaaaaaaaaaaaaaggctgagaagtggtttgtccagagtcacaggggcagcttgtggcaaagcccgaactcgattccagagcacttgagtcagcactgccaggaatgctccagaaggacgaggagtcatgtcctctttccccaagcccagtgcagcagatcttggaggaacctgcttctccagccagctcctgggtgcagaatggaccaggaaccagactgtcagaatcctcatcccaaaccccatcttgtctctagacctcagttttccctccatagtaacactggccctttactgagtgctgttctagactccgcatgcagcaggacctcatttaggtagaaatgagactcagcaggtagaaaactgcggctcgggctcggagaagtagagatgctgttcagggccacagagttttgctaggtggagccagagtcaaacctaggcagcactctcgagcatcgccctggacggtgggttgccagtgacgcccgaagagccagctcgttctggaacaaaagtcgggcaccctcagagcaggacttgcagccccttggtgctcagaactgtgctagatttccatttacagtagggatagatagtgtccatttaaaataaatttgcgggagttttaaaaagtgagttgagctaaagaaaaatggtagtcatccaggtggtccatggatgggacagaaatcatgagctggcctccagggggcaggtgaactggccctgctgggtgatcaccacagctgccagcctgttttatttttattttttgagacagggtcttgctctgtcacccaggctggagttcagtgtcaggaacgcagctcactgcaggctcagcctcccaagctcaagcgatcctcttgcttcagccccccaaatagctgggaccacaggcgtgcaccaccatccccagctaatttttgtattttttgtagagacaggtctcactatgttgcccaagctggtcttgaactcctgggcttaagcaatccacccgcctcagcctcccaaagtgctgggattgcaggaatgaacctccacgccccgccctgctggcctgttgtgatggcttctggtggtgtggggaaagctgggagccctgccctgtgcacctcccaacattgaccccagcacttaggattaccatctgttgttcaggaactttactttacttcccttaggaaaaaaagacaaagaaaaaaaagaaaagaagaagaaagcaaaaaaggcctcaaccaaagattctgagtcaccgtcccagaagaaaaagaagaaaaaggtagagagttcctggggtgtctcaggccagaaaacagacccaaacccaagccccctcctacacacccagacctggttcctgcccccttcccattttcggggcccagtcgggggcgtcaggggttgtgacacaccagggaagaggctggcagggcatgttccctgagcacatggaagccgtagaagtggcctgccggaggtagaagggtgttggggaaggaaggagagactccccccagcacagggaaaccaggtagactgtggcaggtttccaggtgaaaggaaacgttgcctgggctgcgtgtgccccagctggcaggctagccctgaacaacagctgtcctcacggcccggggccttagcacctcagacacagatgaagttctcaccttggccagcagggcctcagctgtatttaggagagctgaacatctgtttgcctctgcccttggaggtcgctgcagacccagtatctattctaggggaattcactagtcctcaggaggtgggggcagcagtgggtggggaaaagctgcaggtctgagagcctctcgtacttccctcctcacagaagaagacagcagagcagactgtatgacgagcaccagcaccaggcacaggtacgcttcccaatcattcctgagcattcagggtgggaggacagctctggtgtcccctgtggtcccagagagccaggcagacctgataggtgggctctaaggggaaaggaggctggggaaagaggttctgttgccaagggtccatggggccactggggtgacatcaggagctggcactgcagcatcagaaggatccagaacagtaatggcagtggtgacaccgagtgcacctgggtgcaggggttgtgcatgctttagggggtgtgccctgggatggagcctgtttgtaggtgaggtcggatacagcttggttcctccttcacttgtgagcggttcattttcctcatgatcctgtaacttgggggcatttccttttgggaaggaagatggtttactcaagatgagctatcaccatggatctatgcttccctatggaggacaggccctgccaagtggtggtgacagttagctgctccacctggctctgctggccctgtggtcacccagcctcctgtaaatgggggtgatgcagagcccgcctcctgggccagtggtgaggcttatgtgaagctaaactaaacactaaaggactcagcccagttctcagaacattccaagtgctaaaaaatgtccactgtggttaatgcctcccccctgcattggagatgccagatttcattttccttgcaggggaaaagggtcaggaaatttgacatctgcatgtgtttccttcccctagggatttcctagccgagcagtggccatccccatgcctctgacctccaccgacctctgcccaccatgggttggaactaaactgttaccttccctcgctccacagaagaagacagccagcttcaggggtccctgtgctggccaagccagtgagcctgcggggaggctggtccaaggagaaagtggaccagctcccatgacctcaccccactcccccaacacaggacgcttcatatagatgtgtacagtatatgtatttttttaagtgacctcctctccttccacagaccccacatgcccaaaggcctcgggacttcccaccaccttgctccacagatccagctaggcctgacctgtgcctcatcccgtgccgctcggtctctggctgatcccgaggctttgtcttcctctcgtcagttcttttggttgtgttttttgttttttttttaataactcaaaaaaaaaataaaagacttggaggaagggtgcaagctcccagtgcatctggggcacatgtttcttggaagggactgtctcgccgacactcgggattccctcttgcctgcatgttgaggctatgggtgaccgtggttagtgggacaggcagtgagcagtgaagtgcctgagtgccgaattggtggggaaggcttcctggatgaggtggcatctaaactaaaggatggaactaaaggatggtcatggttgatttcctgttgccagagtaagtcatgtaaatacccaaagacaagaaatggaaggggctgagaatcctcgagttaggcctcgagctaggggcaggctccctggaggtgcctggtgaacagctgtggcaggcacagcaggtctaggaaaatcggaagtgagttgcccctcaaatcgagctcaccatggttctgtggtggtgagggcaagaagtggatgaacatgaaagacaggatgatgtcttgggtgtggactgagggaggggagggatagcaaaggaggtggtctgctgctccagcctggaaatgcagaagcccacttccctgggcccagagccatgtggaacaccaggggtcctggagatggtctccagagcttttagcctcatgctggaaacagccagaggcagtgcagaaaaggaatgcatggctggaggtgtcggagacccaggttggcatccagctgcacccttgactcggggcccggggccagaccctccaccatctggcctctctcctctcaagcatgttgctctagaacagaactacagagtagtgtcctcattgggccttgttgacccacagcaagactttaaacttaaaaatggggtgatttcactgcagttcttgatttctggctcctcttaaaaagataacatctggcaacgggggctgtgcttcctcctggcagcaaccagatagagctgagtagcagtcagccccttaggtaaggcatgggcacccagttctccacagtcccctacttcctgtccatcctgacacggaggccctatgtcggttgccatctgtcatcacattcacactgttcttagtatagaaatgaaattggggacataggaaaatgaaagctgtaccaagaagagcttgtgcttaaactaggcaagagcctatttctttttggaagtagagtgttcgtgtgtgttaaacatgtaatcaagtatgtctgtgtccaaagactacaagcccccccccaggcctgcctggccccgcaggcatctctgtgggttacttgggctgcgttctcccacctcagtgactggatttagcgtctttagttacctctttaggataaatgaactggatctcaacagaagagccaggagccagagtgttctaattactaccttttattctaatgtgaaccatggccctgaaagctgataacaagcttggctgagcagagggaactaggggtcggcagaaaggattatgggtggaaaacattggctcttccttggggagtgatgctggggaaagggaagagagtggctcagcctgcaggtaaataggctagaaaagccaaggccaaaggctggaggggagaggacagtcagcatgtccagcctggggtctgggtgtagggttatcccttctccctgtgccttcccatctcgtccatgagcctaggtcttggagccttgtgttggaggctgctgtgatgtcaggaacggggatctgtctagcttttggccacttcctgggacctcacgcccctgttgacagatggagattgggcagcagggccttgctgcattgttatctgctgttccgacttggtttgtcttgtccaagggtgacgaaagagccaggcaccagggtctcatgggatgaggtacagggtgggagatgggggaggggctgggggctgaagggagcaagaaagctgtagctgtgtggggctggcaggatgttgaagaccgcctctgctgctctcacatggggactggagagagaagcagcaggttgaggttggggtcacccatttgttgtccctgcccctttctaacatcctggacctgcagagcagttaaggactgtccaccctcccctgccccctgctcaggtccaataatgaccatcatggatttgtgtaactccccacagccccccaaccctgttccttcgtctgtgaaatggacatcccaggaatgttggagagtggcccagcgtcacactccttcacctgcccacaaaggagctggccctgctggggatgagctgctggtgaccagatgcccctctgcaaggcccttacctgggcccagatcctgcttggtcacacccagcccagaagacgggtcctccagttccagtgactctgcaaaggagcagcaagtccgtttgtcacttgaagtgcagcctacctgacccaagatgcctgagggcagtgcttcccacctagccacaggcttagtgcctgggaaagcaggtacccagggaaggacagctgcaagcagcaacaaagaggtgtaatgggggctcgagtgagaagggggtgatgaaatgagatgggtgggtctgtaggactcctggatgctagaggatggcgcgtggatggatgaaattcacagatgaaaggactgacggataagtgaacaaatatgagtgcatgtaagaggagagatgataaatggacaaataggaatgcacaggtgggtggatggataaagggctggacgcatgactacgtcactgcccccaggagctgccatcctgggtgtcctggtcccatgtgcttcagaggggacctcttgcccctcaaccttcctagtccttcctggtcctctgacactggcacagtgccactgcttaccactgcagttatggtgcccgcggcttctggtgttggggacctccgtgccgttggggaagacacaccagcagtagccgatgctcccatagcactggagtggcagatagttgccgttctcgtcgcacttgggcctgaatgaacccgggtggacagcagggatgtggctgacctcttcctggcacttggtcagtactgaagcgacaggcatgatgaggacacagtgagtgagtgagctctgaaccagggtctgagcagagctaaagacccacacaccactgctgtgggcttaatgccttcttcccaagtggctttactcactccagccatcacacggatgggaaaactgaggcctagaccaacaaggtctgagatcaaaaaggaagtgaatggccatgtgtccaattcacctcagaagttgatggtttcttctgacactcaaagcccattacagttttgggccaggcacagtggctcatgcctgtaatcttagcactttgggaggccgaggtgggcggatcacttgaggtcaggagttcaagaccagcctggccaacatggtgaaaccctgtctctactaaaaatacaaaaattagctgggcgtggtggcacatgcctataatcccagctactcgggaggccgaggcaggagaattgcttgaacccgggaggctgaggttgcagtgagctgagatcgcaccactgcactccagcctgggcgacagagccagactctatctcaaaaacaaacaatcaaacaaaaaaacaccattacagtttggaattgcacttgcgattctgattctagagaaaagcaatgggcaccttggtaagtctaagcttcctgttactgggagttctcaagtagaaatggggtttaccgtttgttggagatgtcttagaggggtttaagcatcagctaggagttggagatagcatgtaaggtgccttctatgaatctgatgcagaaactgaggccccaggcagggtggccctttgaccttctacttcaggaccctgaatcctagagggaaggggacttgtccaaagttacatagcaaattagagacagcaccgggatagaaacagcactctgtctttgggtctaaaaacatcctagtctgcattgtccatgaggtgggaaacgcccaaggctctcttggcagcagctgtgaccttggcgccctcactggattgcgggcagcactggggcaaggtcattacaaggattcctttctgcagtgtttcgggcaggttctaccccaggcaccctgtgctgtaccatcctctatgagagaggtcacctgtaccctgtggtgacaggcctctgtgggcccttaggaacccttagacaagatgggggtgggtcaggggagggggacagccaaaccaagaaggaacagacaggagagagagagaagtgagaaagaagtgagagctgagaggatgggagattccgcggtgctgggaccagggagtgctggaggccccggcctcagcagcttcaggagagccccgagggtccagaagccctggcacgctaaagctcccactccctgtacctttcggtggagcgtcagtgggcttttgctccaaggagtgcctgctcatttcaaacaggagccaatggtgcatccagctctcaaagacctaatacggatagaggtggaggtcaggttcgatggccaccaccaagcccctacactgcctggctttgcccctggggacagaaacatgcagggccaaatagggccccaacacccgggtccagctgcagcctggttccctcttaaagacccctggggctgaaccccacatactctgcagcatccaggttttggaagtgctggtaaaccccttcagcttcctgagaatggcttccccagcccaccctcaccccacctctcctagccctgccctagacaccagaggaaagagagagttcccatgcagggaaacctgctgaccttccagtctatggtctccatggtgttcttaaggtgtctcaggttctccgggaagctccccttcagtggcgggtacaccttcagggggtcagcattctacagggtagcagggcaggaaggatggttcaagaagagctccctggcaggcagtgtgaaatgtgtagcccacgttcccttggtcttccattctgaggaatggaccagagctacaccaagcctaaaccctggacttcagccatgatgggaggggaggggagggtacgggtaagggtagtccagctgttcagctacgagactgcagcgttgcgagtcgagttccagattccaggccagctctaccaacaagccccagtgtcctccctgtggatggctgctcagctttcaggtcttacctgctccagcaggtgaggacccaaccttgactgcccccagctaggttgagtcctctgcctctttcttcacaaagccccctgcacttctgtcatcacctggtcacttgtctgtctcccacactagcctgggatccccatggcttcaggagctgggtccaattgctccccattgtgggcccagagccttgcacagtgctggcataggacagacacgcagtacaaatttggggagaaaaaaagggtgtcttgagcaagtcacttccaaactttgagcctcagtttctttttttatttttattttattttattttttgaaatggagtctcactctgtcacccaggctggagtgcagtggcgtgatgatctcggctcactgcaacctccacttcccgggttaaagcgattctcctgcctcaacctcatgagtagctgggattacaggtgactgccaccacatccggctaatttttgtatttttagtagagactttcactatgttggccaggctggtctcgaactcctggcctcaggtgatctgcctgcctaggcctcccaaagtgctgagattacaggcatgagccactgcacccagccgagcctgtttatctcaaaaatgcagaggccagactacatataacatttaagggtcacccttgtattcagtaatccagagagcacatgttgaaagtctgccatgagccaggtatacaggccttggagcttggcccggccagggtcctgggtgggcaggcaggaccacccagctagctccctgcactcacctggagcaggtgcatcacatggtcctctgtcatgttgccatacttggtggcattctgcatgggctgtgggaggaagtaacagaaggttaccagagctggtccctggagcagggggtatggagcaggagccggttgctgggatctaggtaagagactggaatcgcaggcacttggtcaatggttccatctctgccacctccaaacatgagagctcgagcaagtcactttagcttcctgcctcaatgtcctcattggtcaaactggcataagctttcctgcccagggttttgtccacagcacagtattgtgaatataaatattgtcaatgcatgatagcaaggtctttgagaatgggagaggacagtgagatgctataggaaatgagaagcactttgtaaactgtagagggctgagccttcctcccagggatggcaccaagagactcttcacctgtgccctccacacctggggagcccgattcttcctgaggcaggcactgtccctcccgcagcagtcaggacccctccccaggtgggctctcttccctgcccctccccttggcactgtcctccatccaggcgggataaccttgcccctcccaccaccctggggctgtccttaccccctggggcagggctcccatgggcagcgcctgcatcagcagcggggtggccatgcgcatcttgctcacaggcttgggagctgtggggacaggaacgagggtaagtgtggccccggtgcccagggaggagggtatcagacccagatgaggaagggctggaattccaaaccggagggagaggacagtgggcccagctgggtgcagggatgcgggtctctgagttgagggatggtgggaggtggggggtatcaggatgtaggggtgcacgcacgcttgggaagcttcatgcgcaggttctccagctgcaggttctgggaggtgactgtcagtttgtccagccggccctgctgctggtacaggaagtaggcggtggtggcctggccagcgaggagcagagtcaccaggatggaaaagcctgtgtacagggctccgcggctgcacttgctgtgggaggtggggaggataggtcagaggaggatccacagtggtggctgccccaagggctggctaggaatggggaaatgtatacccccatctccattagacccctaagccacccctaataaacaatgcatttgaagcacaaacagtaagctggctatggaaacacagcttgaagacctcaccccacccctccttccaaccatcgatgtgcctgaagtcttccctggcagagaccctgcagctgccacgggcctgagttgaacagagaagagcaaagaggcatgctctttgtcctctctggaccttagggtcctgcctgtgcgatgaggggttgaggtgggggggtcttcccaggctccctttgccgtgcggatctcctgatgatcagggctgccctcaaggggaacaggtttggtttttgttttgttttgttttgttttgttttttgagacggagtcttgctctgtcgcccaggctggagtgcagtggcgcgatctcggctcactgcaacctccacctcctgggtttatgccattctccttcctcagcctctccgagtagctgggactacaggcacccgccaccacgcctggctaattattttgtatttttgatagagacggggtttcaccgtggtctcgatctcctgatctcgtgatccacccacctcagcctcccaaagtgctgggattacaagcgtgagtcaccgcgcccagccttttgttttgttttttttttctgctggcaggatcaaccaggtatgttattttttttaattgacaaaaccaaaaaaaattgtatgtgcttaccaagtaaggggaagagggttttcacccctctgcccaacctcccaccctcacagtgaaatcagatttaaggagaaaaggtaaggaagtgggaccgggacagcagaaaatgtagcccacctgggaagaagtggggcctggccattttaggagtgggctgggggaggcttggacaatgtcaggctgaagcagggccaggcaccacccactctggggccatcctctgcccaggctctccatgtctttgagcatgtccctgccaatctctgtgcctctgttccctcatttgtcacataggtgcccccacctctgcgattctagaatttggtgggtttcttcttttaagcaagatctcactgcaagcgccaaagtatttcaaatggtaatatccatcctgcagggggtgggcaggagtataggtgcctgagcctgtgtggcctggatgaatttctcatgctccctggactcaccatccagaccctcggacctcagcaagcccttgtatctgtgggacttggatgcgactggggggtgcatgcatatgttacagtacaggggatgtaaggatcctgcccctacaccccaggagtttctgatctgttctttgacgaccccaggggtgggactactaagaccctagtccaggtgttgccaatgtgaaggtgttgggaggtgatcgggccacaaggccttctccctcacgaatgggattaggtgccctgtaagacggcttgatggaaggagttggttctctcttgcccttctgccttccaccatatgaggacacatcaaggaagcccctcaccaggctgggtgtggtgactcacgcctgtaatcccagcactttgggaggccaaggcaggtggatcacttgaggccaggagttcgagaccagtctggccaacatggcgaaaccccgtctctacaaaaaaatacaaaaaacttagccaggcatggtggcgtgcacctctagtcccagctacttgggaggctgaggtgggagaatcacttgaacccgggaggcggaggttgcagtgagccgagatcacgtcactgcactccagcctgggtgacagaaggagactgtctcagaaaaaaaaaagaaagcaagctaggccgggcgcggtggctcacacctgtaatcccagcactttaggaagccaagacaggtagatcacctgaggtcaggagttcgagaccagcctggccaacgtggtgaaaccctgtctctactaaaaatgcaaaaattagccggacgtggtggcgagcacctgtaatcccagctactcgggaggctgaggcaggagaatcccttgaacctggaaggtggaggttgcagtgagctgagatcatgccattgcactccagcctgggcaacagagtgaggctccatctcaaaaaaaaaagaaaaaattagccgggcgtagtggtgggcacctgtagtcccagctactcaggaggctgaggcaggagaatcacttgaacctgggaggcagaggttgctgtgagccaagatcacaccactgcattccatcctgggggatagagtgagactctgtctcaaaaaacataacaaaaaaaaaaaaaaaaaacaagaaagcccctccagaactgtgagaaataaatttctgggtgttttttgtttgtttgtttgtttgtttgtatattacgcagtctgtggtattctgttaaagcggcacaaaacggactaaaacagacccattgggaactgcaaggatgaggctgcaccctgcctactccagcaaccagcaaggatggtttaggacgctccaggagtcccttgtgcctggtaactcatgacatcacagactggctcattctcattggcttgctgcgtgccagtctgtgctttctgggataaggcccagcccaagggagagttattcgggaaggaaacagcaaaaacccgacggtgggcggggggcgggggggaagtggggagaccagacaggaagggaaaacaaattctacttcttggccttctcaaggaacacgggtggcctagcctgtgttcaggctctccagcctcatcctccacctgttcagtgcttctgcaaccccacacccaattctagccccagctctacctcccacacacgacatgggacagtaccttcccctctctgcaccacagttcctcaggag

SEQ ID NO: 47 - DNA, 4840 bp, Homo sapiens
taagggcgcgagggaagtggcgggcggggactaaggcggggcgtgcaggtagccggccggccgggggtcgcgggtatggccgaggccaggaagcggcgggagctacttcccctgatctaccaccatctgctgcgggctggctatgtgcgtgcggcgcgggaagtgaaggagcagagcggccagaagtgtttcctggctcagcccgtaacccttctggacatctatacacactggcaacaaacctcagagcttggtcggaagcggaaggcagaggaagatgcggcactgcaagctaagaaaacccgtgtgtcagaccccatcagcacctcggagagctcggaagaggaggaagaagcagaagccgaaaccgccaaagccaccccaagactagcatctaccaactcctcagtcctgggggcggacttgccatcaagcatgaaagaaaaagccaaggcagagacagagaaagctggcaagactgggaattccatgccacaccctgccactgggaagacggtggccaaccttctttctgggaagtctcccaggaagtcagcagagccctcagcaaatactacgttggtctcagaaactgaggaggagggcagcgtcccggcctttggagctgctgccaagcctgggatggtgtcagcgggccaggccgacagctccagcgaggacacctccagctccagtgatgagacagacgtggaggtaaaggcctctgaaaaaattctccaggtcagagctgcctcagcccctgccaaggggacccctgggaaaggggctaccccagcaccccctgggaaggcaggggctgtagcctcccagaccaaggcagggaagccagaggaggactcagagagcagcagcgaggagtcatctgacagtgaggaggagacgccagctgccaaggccctgcttcaggcgaaggcctcaggaaaaacctctcaggtcggagctgcctcagcccctgccaaggagtcccccaggaaaggagctgccccagcgccccctgggaagacagggcctgcagttgccaaggcccaggcggggaagcgggaggaggactcgcagagcagcagcgaggaatcggacagtgaggaggaggcgcctgctcaggcgaagccttcagggaaggccccccaggtcagagccgcctcggcccctgccaaggagtcccccaggaaaggggctgccccagcacctcctaggaaaacagggcctgcagccgcccaggtccaggtggggaagcaggaggaggactcaagaagcagcagcgaggagtcagacagtgacagagaagcactggcagccatgaatgcagctcaggtgaagcccttggggaaaagcccccaggtgaaacctgcctctaccatgggcatggggcccttggggaaaggcgccggcccagtgccacctgggaaggtggggcctgcaaccccctcagcccaggtggggaagtgggaggaggactcagagagcagtagtgaggagtcatcagacagcagtgatggagaggtgcccacagctgtggccccggctcaggaaaagtccttggggaacatcctccaggccaaacccacctccagtcctgccaaggggccccctcagaaggcagggcctgtagccgtccaggtcaaggctgaaaagcccatggacaactcggagagcagcgaggagtcgtcggacagtgcggacagtgaggaggcaccagcagccatgactgcagctcaggcaaaaccagctctgaaaattcctcagaccaaggcctgcccaaagaaaaccaataccactgcatctgccaaggtcgcccctgtgcgagtgggcacccaacccccccggaaagcaggaactgcgacttctccagcaggctcatccccagctgtggctgggggcacccagagaccagcagaggattcttcaagcagtgaggaatcagatagtgaggaagagaagacaggtcttgcagtaaccgtgggacaggcaaagtctgtggggaaaggcctccaggtgaaagcagcctcagtgcctgtcaaggggtccttggggcaagggactgctccagtactccctgggaagacggggcctacagtcacccaggtgaaagctgaaaagcaggaagactctgagagcagtgaggaggaatcagacagtgaggaagcagctgcatctccagcacaggtgaaaacctcagtaaagaaaacccaggccaaagccaacccagctgccgccagagcaccttcagcaaaagggacaatttcagcccctggaaaagttgtcactgcagctgctcaagccaagcagaggtctccatccaaggtgaagccaccagtgagaaacccccagaacagtaccgtcttggcgaggggcccagcatctgtgccatctgtggggaaggccgtggctacagcagctcaggcccagacagggccagaggaggactcagggagcagtgaggaggagtcagacagtgaggaggaggcggagacgctggctcaggcgaagccttcagggaagacccaccagatcagagctgccttggctcctgccaaggagtcccccaggaaaggggctgccccaacacctcctgggaagacagggccttcggctgcccaggcagggaagcaggatgactcagggagcagcagcgaggaatcagacagtgatggggaggcaccggcagctgtgacctctgcccaggtgattaaaccccccctgatttttgtcgaccctaatcgtagtccagctggcccagctgctacacccgcacaagcccaggctgcaagcaccccgaggaaggcccgagcctcggagagcacagccaggagctcctcctccgagagcgaggatgaggacgtgatccccgctacacaatgcttgactcctggcatcagaaccaatgtggtgaccatgcccactgcccacccaagaatagcccccaaagccagcatggctggggccagcagcagcaaggagtccagtcggatatcagatggcaagaaacaggagggaccagccactcaggtgtcaaagaagaacccagcttccctcccactgacccaggctgccctgaaggtcctcgcccagaaagccagtgaggctcagcctcctgttgccaggacccagccttcaagtggggttgacagtgctgtgggaacactccctgcaacaagtccccagagcacctccgtccaggccaaagggaccaacaagctcagaaaacctaagcttcctgaggtccagcaggccaccaaagcccctgagagctcagatgacagtgaggacagcagcgacagttcttcagggagtgaggaagatggtgaagggccccagggggccaagtcagcccacacgctgggtcccaccccctccaggacagagaccctggtggaggagaccgcagcagagtccagcgaggatgatgtggtggcgccatcccagtctctcctctcaggttatatgacccctggactaaccccagccaattcccaggcctcaaaagccactcccaagctagattccagcccctcagtttcctctactctggccgccaaagatgacccagatggcaagcaggaggcaaagccccaacaggcagcaggcatgttgtcccctaaaacaggtggaaaagaggctgcttcaggcaccacacctcagaagtcccggaagcccaagaaaggggctgggaacccccaagcctcaaccctggcgctgcaaagcaacatcacccagtgcctcctgggccaaccctggcccctgaatgaggcccaggtgcaggcctcagtggtgaaggtcctgactgagctgctggaacaggaaagaaagaaggtggtggacaccaccaaggagagcagcaggaagggctgggagagccgcaagcggaagctatcgggagaccagccagctgccaggacccccaggagcaagaagaagaagaagctgggggccggggaaggtggggaggcctctgtttccccagaaaagacctccacgacttccaaggggaaagcaaagagagacaaagcaagtggtgatgtcaaggagaagaaagggaaggggtctcttggctcccaaggggccaaggacgagccagaagaggagcttcagaaggggatggggacggttgaaggtggagatcaaagcaacccaaagagcaagaaggagaagaagaaatccgacaagagaaaaaaagacaaagaaaaaaaagaaaagaagaagaaagcaaaaaaggcctcaaccaaagattctgagtcaccgtcccagaagaaaaagaagaaaaagaagaagacagcagagcagactgtatgacgagcaccagcaccaggcacagggatttcctagccgagcagtggccatccccatgcctctgacctccaccgacctctgcccaccatgggttggaactaaactgttaccttccctcgctccacagaagaagacagccagcttcaggggtccctgtgctggccaagccagtgagcctgcggggaggctggtccaaggagaaagtggaccagctcccatgacctcaccccactcccccaacacaggacgcttcatatagatgtgtacagtatatgtatttttttaagtgacctcctctccttccacagaccccacatgcccaaaggcctcgggacttcccaccaccttgctccacagatccagctaggcctgacctgtgcctcatcccgtgccgctcggtctctggctgatcccgaggctttgtcttcctctcgtcagttcttttggttgtgttttttgttttttttttaataactcaaaaaaaaaataaaagacttggaggaagggtaaaaaaaaaaaaaaaaaaaaaaaa

SEQ ID NO: 48 - DNA, 4236 bp, Homo sapiens
atggccgaggccaggaagcggcgggagctacttcccctgatctaccaccatctgctgcgggctggctatgtgcgtgcggcgcgggaagtgaaggagcagagcggccagaagtgtttcctggctcagcccgtaacccttctggacatctatacacactggcaacaaacctcagagcttggtcggaagcggaaggcagaggaagatgcggcactgcaagctaagaaaacccgtgtgtcagaccccatcagcacctcggagagctcggaagaggaggaagaagcagaagccgaaaccgccaaagccaccccaagactagcatctaccaactcctcagtcctgggggcggacttgccatcaagcatgaaagaaaaagccaaggcagagacagagaaagctggcaagactgggaattccatgccacaccctgccactgggaagacggtggccaaccttctttctgggaagtctcccaggaagtcagcagagccctcagcaaatactacgttggtctcagaaactgaggaggagggcagcgtcccggcctttggagctgctgccaagcctgggatggtgtcagcgggccaggccgacagctccagcgaggacacctccagctccagtgatgagacagacgtggaggtaaaggcctctgaaaaaattctccaggtcagagctgcctcagcccctgccaaggggacccctgggaaaggggctaccccagcaccccctgggaaggcaggggctgtagcctcccagaccaaggcagggaagccagaggaggactcagagagcagcagcgaggagtcatctgacagtgaggaggagacgccagctgccaaggccctgcttcaggcgaaggcctcaggaaaaacctctcaggtcggagctgcctcagcccctgccaaggagtcccccaggaaaggagctgccccagcgccccctgggaagacagggcctgcagttgccaaggcccaggcggggaagcgggaggaggactcgcagagcagcagcgaggaatcggacagtgaggaggaggcgcctgctcaggcgaagccttcagggaaggccccccaggtcagagccgcctcggcccctgccaaggagtcccccaggaaaggggctgccccagcacctcctaggaaaacagggcctgcagccgcccaggtccaggtggggaagcaggaggaggactcaagaagcagcagcgaggagtcagacagtgacagagaagcactggcagccatgaatgcagctcaggtgaagcccttggggaaaagcccccaggtgaaacctgcctctaccatgggcatggggcccttggggaaaggcgccggcccagtgccacctgggaaggtggggcctgcaaccccctcagcccaggtggggaagtgggaggaggactcagagagcagtagtgaggagtcatcagacagcagtgatggagaggtgcccacagctgtggccccggctcaggaaaagtccttggggaacatcctccaggccaaacccacctccagtcctgccaaggggccccctcagaaggcagggcctgtagccgtccaggtcaaggctgaaaagcccatggacaactcggagagcagcgaggagtcgtcggacagtgcggacagtgaggaggcaccagcagccatgactgcagctcaggcaaaaccagctctgaaaattcctcagaccaaggcctgcccaaagaaaaccaataccactgcatctgccaaggtcgcccctgtgcgagtgggcacccaacccccccggaaagcaggaactgcgacttctccagcaggctcatccccagctgtggctgggggcacccagagaccagcagaggattcttcaagcagtgaggaatcagatagtgaggaagagaagacaggtcttgcagtaaccgtgggacaggcaaagtctgtggggaaaggcctccaggtgaaagcagcctcagtgcctgtcaaggggtccttggggcaagggactgctccagtactccctgggaagacggggcctacagtcacccaggtgaaagctgaaaagcaggaagactctgagagcagtgaggaggaatcagacagtgaggaagcagctgcatctccagcacaggtgaaaacctcagtaaagaaaacccaggccaaagccaacccagctgccgccagagcaccttcagcaaaagggacaatttcagcccctggaaaagttgtcactgcagctgctcaagccaagcagaggtctccatccaaggtgaagccaccagtgagaaacccccagaacagtaccgtcttggcgaggggcccagcatctgtgccatctgtggggaaggccgtggctacagcagctcaggcccagacagggccagaggaggactcagggagcagtgaggaggagtcagacagtgaggaggaggcggagacgctggctcaggcgaagccttcagggaagacccaccagatcagagctgccttggctcctgccaaggagtcccccaggaaaggggctgccccaacacctcctgggaagacagggccttcggctgcccaggcagggaagcaggatgactcagggagcagcagcgaggaatcagacagtgatggggaggcaccggcagctgtgacctctgcccaggtgattaaaccccccctgatttttgtcgaccctaatcgtagtccagctggcccagctgctacacccgcacaagcccaggctgcaagcaccccgaggaaggcccgagcctcggagagcacagccaggagctcctcctccgagagcgaggatgaggacgtgatccccgctacacaatgcttgactcctggcatcagaaccaatgtggtgaccatgcccactgcccacccaagaatagcccccaaagccagcatggctggggccagcagcagcaaggagtccagtcggatatcagatggcaagaaacaggagggaccagccactcaggtgtcaaagaagaacccagcttccctcccactgacccaggctgccctgaaggtcctcgcccagaaagccagtgaggctcagcctcctgttgccaggacccagccttcaagtggggttgacagtgctgtgggaacactccctgcaacaagtccccagagcacctccgtccaggccaaagggaccaacaagctcagaaaacctaagcttcctgaggtccagcaggccaccaaagcccctgagagctcagatgacagtgaggacagcagcgacagttcttcagggagtgaggaagatggtgaagggccccagggggccaagtcagcccacacgctgggtcccaccccctccaggacagagaccctggtggaggagaccgcagcagagtccagcgaggatgatgtggtggcgccatcccagtctctcctctcaggttatatgacccctggactaaccccagccaattcccaggcctcaaaagccactcccaagctagattccagcccctcagtttcctctactctggccgccaaagatgacccagatggcaagcaggaggcaaagccccaacaggcagcaggcatgttgtcccctaaaacaggtggaaaagaggctgcttcaggcaccacacctcagaagtcccggaagcccaagaaaggggctgggaacccccaagcctcaaccctggcgctgcaaagcaacatcacccagtgcctcctgggccaaccctggcccctgaatgaggcccaggtgcaggcctcagtggtgaaggtcctgactgagctgctggaacaggaaagaaagaaggtggtggacaccaccaaggagagcagcaggaagggctgggagagccgcaagcggaagctatcgggagaccagccagctgccaggacccccaggagcaagaagaagaagaagctgggggccggggaaggtggggaggcctctgtttccccagaaaagacctccacgacttccaaggggaaagcaaagagagacaaagcaagtggtgatgtcaaggagaagaaagggaaggggtctcttggctcccaaggggccaaggacgagccagaagaggagcttcagaaggggatggggacggttgaaggtggagatcaaagcaacccaaagagcaagaaggagaagaagaaatccgacaagagaaaaaaagacaaagaaaaaaaagaaaagaagaagaaagcaaaaaaggcctcaaccaaagattctgagtcaccgtcccagaagaaaaagaagaaaaagaagaagacagcagagcagactgtatga

SEQ ID NO: 49 - DNA, 23415 bp, Mus musculus
  misc_feature (3007)..(6208): "n" at positions 3007 to 6208 can be any base
  misc_feature (9902)..(9921): "n" at positions 9902 to 9921 can be any base
  misc_feature (14785)..(14804): "n" at positions 14785 to 14804 can be any base
  misc_feature (18074)..(19126): "n" at positions 18074 to 19126 can be any base
tagggaacaccaattgagaaaacacctccataagatgcagttataagacattttctttttcttttcttttctttctcctggaaatcactttgtagaccaagctggcctcaaactcagaaatctgcctgcctctgcctcctgagtgctagtattaaaggcgtgcaccaccacactgggcaagacattttcttaattagtgattggtaggggagggtccagcctagtgggtggggctattcctgggctggtggtcctgggttctgtaattaagcaaactgaacacaccatgaagagcaagccaggaatgagaactctccatggtctctgcatcagctccttcctccaggttcctgccctgcttgagttcctgtcctgactttttgataaacaggtatgtggaaatgtaagctgaataaaccctctcttccccaagttctggccatggtggttcatccgggcaattgtaatgctaactccgagtctttctctgggttaaatatagcccaggttggcctcaaacttgctatgtatctggagacaaccttgaacccctgatcctgcatgacagacatgtgcccataaccagcttatgtggtgctgggattggaatgaaggctttgatggttccacgcctgctaggcagtattctaccaactgatttacatccccagccccaaagaattccccaaagaattatcgggacaacttcaagtctttccttctcttatggctgcactggagacttcccaccttgttaaagagccagtgctgttcccctggaatgtgagtgtatgcccccgcgctactggactttcgctgtttctttttgagttttaaggtgcacatgagatacctccaatgccctttaaagtccctagtcttagctgggcgtggtggcgcacgcctttaatcccagcgcttgggaggcagaggcaggcagatttctggaaacgccctacatagaccagaatgctccacccctgccccgcaccctgtgtggacaagaatgttccaccacctgcacacacacacacacacacacacacacacccttttaaattttgacacaggatactatgtatccctgactgtctgggaactcactatgaagttatgatgggcctggacctctcagaggtccgctgcgcctcttccttgagccctgtgattaataaacatgtgcattaccacgcctgtgccaccaaagtccctaccatttttaacatttattttcaaaggtcactttgcagcaatttattgggattaaacaaacggttcctgattccaactgaacatcttatttttgtaattttagggagaggtgtctcctctaaacccctggcccacagggctctagagtggatgccttgaagtaacacatatggtgtaatctctgcttctgagccctgctgggggaaagggcagccctgcttcctgtgtcaccctagagtatagctaactgcatgcctgggaagttgccaggtcatgtgggatgggcagctgtctgcatggtgtcattggtgggtttgaggaaatccccctgcataaaaatatcttctcccgtccagggccttggcacttaccctaaatgtatctcttaccattggttgcaaggtgatgtgggaggccaattgtttaccaagtttggccagagagtcccactagctctcagcgatgcttcttgcatccaaattcaccagccaggatgaagtgtacaggagacagttccttttaattagggacttgattcttcaatgtgagaaatctggggtgatggccactcaggggaaggaccgtgacgaggactcttaagttaccttctgactgatcacaagaccagtccaggagatggaaagagacgactgcttatgttcccaagagaattccaggctgccatgatggcctgggagtctttaatcccagcactcaggagacagaggcaggtaggtctctgtctctataaggtcaaggctagcctatagtgagttccagggttgtagtgagactttatctcaaaacatacaaacaagccgggcagtggtggcgcatacctttaatcccagcatttgggaggcagagacaggcggatttctgagttcaaggccagcctggtctacagagtgagttccaggacagccagggctacacagagaaaccctgtctggaaaaaagaaaaacaaaacaaaaccgaaacaaacaaacaaaaaactatacaaacaaaaataaaacacacataaaaataagtaaaaaacaaaaacaaaaaacaaactcaccacagaaccctaggcgtgctgaacaggtgtaagagtgtcagccaaaaccttacttgaggtgccacagcgaacaggtcggttaattaccaggctaagtcaccatgtcccaggtacctgtgatgtccttggcaattacagaattgtgtctaggagggagggagctattattagcctcaaattacaggtaaggaaactgagtcttcagagaggttcagcttgctcaacctccaaatggctgagtcaggacagaggtaaaggcagcacacatgggaaacctggcacagcctcctgctccagggctggacagacaactatgacttaccccgagtcatctcaaaaggaaaggaccttgtcctgccatagccttgatggggcctggatcagagtcaggtttgggttttgttttgttatttttctctctaaggccttgcgtgtgcttgagcaagtgatcttcctttgaatatagaaccgtctctcatttaaaaaaaaaaaaaagtattttcaactgaacaggcaggggtgctgcacaccttcagtcccagcattcagaagcagaggcaggcagatctcccagttcaagactagcctggtcgacagagcgagttctagcctggtctacagagcgaattctagcctggtcgacagagcgagtttctagcctggtctacagagcgagttctaagacagccagggctaagcagaaaaaccatgtctcacaaagccaaataaaatannnnnnnnnnnnnnnnnnnnnnnnnnnnnnnnnnnnnnnnnnnnnnnnnnnnnnnnnnnnnnnnnnnnnnnnnnnnnnnnnnnnnnnnnnnnnnnnnnnnnnnnnnnnnnnnnnnnnnnnnnnnnnnnnnnnnnnnnnnnnnnnnnnnnnnnnnnnnnnnnnnnnnnnnnnnnnnnnnnnnnnnnnnnnnnnnnnnnnnnnnnnnnnnnnnnnnnnnnnnnnnnnnnnnnnnnnnnnnnnnnnnnnnnnnnnnnnnnnnnnnnnnnnnnnnnnnnnnnnnnnnnnnnnnnnnnnnnnnnnnnnnnnnnnnnnnnnnnnnnnnnnnnnnnnnnnnnnnnnnnnnnnnnnnnnnnnnnnnnnnnnnnnnnnnnnnnnnnnnnnnnnnnnnnnnnnnnnnnnnnnnnnnnnnnnnnnnnnnnnnnnnnnnnnnnnnnnnnnnnnnnnnnnnnnnnnnnnnnnnnnnnnnnnnnnnnnnnnnnnnnnnnnnnnnnnnnnnnnnnnnnnnnnnnnnnnnnnnnnnnnnnnnnnnnnnnnnnnnnnnnnnnnnnnnnnnnnnnnnnnnnnnnnnnnnnnnnnnnnnnnnnnnnnnnnnnnnnnnnnnnnnnnnnnnnnnnnnnnnnnnnnnnnnnnnnnnnnnnnnnnnnnnnnnnnnnnnnnnnnnnnnnnnnnnnnnnnnnnnnnnnnnnnnnnnnnnnnnnnnnnnnnnnnnnnnnnnnnnnnnnnnnnnnnnnnnnnnnnnnnnnnnnnnnnnnnnnnnnnnnnnnnnnnnnnnnnnnnnnnnnnnnnnnnnnnnnnnnnnnnnnnnnnnnnnnnnnnnnnnnnnnnnnnnnnnnnnnnnnnnnnnnnnnnnnnnnnnnnnnnnnnnnnnnnnnnnnnnnnnnnnnnnnnnnnnnnnnnnnnnnnnnnnnnnnnnnnnnnnnnnnnnnnnnnnnnnnnnnnnnnnnnnnnnnnnnnnnnnnnnnnnnnnnnnnnnnnnnnnnnnnnnnnnnnnnnnnnnnnnnnnnnnnnnnnnnnnnnnnnnnnnnnnnnnnnnnnnnnnnnnnnnnnnnnnnnnnnnnnnnnnnnnnnnnnnnnnnnnnnnnnnnnnnnnnnnnnnnnnnnnnnnnnnnnnnnnnnnnnnnnnnnnnnnnnnnnnnnnnnnnnnnnnnnnnnnnnnnnnnnnnnnnnnnnnnnnnnnnnnnnnnnnnnnnnnnnnnnnnnnnnnnnnnnnnnnnnnnnnnnnnnnnnnnnnnnnnnnnnnnnnnnnnnnnnnnnnnnnnnnnnnnnnnnnnnnnnnnnnnnnnnnnnnnnnnnnnnnnnnnnnnnnnnnnnnnnnnnnnnnnnnnnnnnnnnnnnnnnnnnnnnnnnnnnnnnnnnnnnnnnnnnnnnnnnnnnnnnnnnnnnnnnnnnnnnnnnnnnnnnnnnnnnnnnnnnnnnnnnnnnnnnnnnnnnnnnnnnnnnnnnnnnnnnnnnnnnnnnnnnnnnnnnnnnnnnnnnnnnnnnnnnnnnnnnnnnnnnnnnnnnnnnnnnnnnnnnnnnnnnnnnnnnnnnnnnnnnnnnnnnnnnnnnnnnnnnnnnnnnnnnnnnnnnnnnnnnnnnnnnnnnnnnnnnnnnnnnnnnnnnnnnnnnnnnnnnnnnnnnnnnnnnnnnnnnnnnnnnnnnnnnnnnnnnnnnnnnnnnnnnnnnnnnnnnnnnnnnnnnnnnnnnnnnnnnnnnnnnnnnnnnnnnnnnnnnnnnnnnnnnnnnnnnnnnnnnnnnnnnnnnnnnnnnnnnnnnnnnnnnnnnnnnnnnnnnnnnnnnnnnnnnnnnnnnnnnnnnnnnnnnnnnnnnnnnnnnnnnnnnnnnnnnnnnnnnnnnnnnnnnnnnnnnnnnnnnnnnnnnnnnnnnnnnnnnnnnnnnnnnnnnnnnnnnnnnnnnnnnnnnnnnnnnnnnnnnnnnnnnnnnnnnnnnnnnnnnnnnnnnnnnnnnnnnnnnnnnnnnnnnnnnnnnnnnnnnnnnnnnnnnnnnnnnnnnnnnnnnnnnnnnnnnnnnnnnnnnnnnnnnnnnnnnnnnnnnnnnnnnnnnnnnnnnnnnnnnnnnnnnnnnnnnnnnnnnnnnnnnnnnnnnnnnnnnnnnnnnnnnnnnnnnnnnnnnnnnnnnnnnnnnnnnnnnnnnnnnnnnnnnnnnnnnnnnnnnnnnnnnnnnnnnnnnnnnnnnnnnnnnnnnnnnnnnnnnnnnnnnnnnnnnnnnnnnnnnnnnnnnnnnnnnnnnnnnnnnnnnnnnnnnnnnnnnnnnnnnnnnnnnnnnnnnnnnnnnnnnnnnnnnnnnnnnnnnnnnnnnnnnnnnnnnnnnnnnnnnnnnnnnnnnnnnnnnnnnnnnnnnnnnnnnnnnnnnnnnnnnnnnnnnnnnnnnnnnnnnnnnnnnnnnnnnnnnnnnnnnnnnnnnnnnnnnnnnnnnnnnnnnnnnnnnnnnnnnnnnnnnnnnnnnnnnnnnnnnnnnnnnnnnnnnnnnnnnnnnnnnnnnnnnnnnnnnnnnnnnnnnnnnnnnnnnnnnnnnnnnnnnnnnnnnnnnnnnnnnnnnnnnnnnnnnnnnnnnnnnnnnnnnnnnnnnnnnnnnnnnnnnnnnnnnnnnnnnnnnnnnnnnnnnnnnnnnnnnnnnnnnnnnnnnnnnnnnnnnnnnnnnnnnnnnnnnnnnnnnnnnnnnnnnnnnnnnnnnnnnnnnnnnnnnnnnnnnnnnnnnnnnnnnnnnnnnnnnnnnnnnnnnnnnnnnnnnnnnnnnnnnnnnnnnnnnnnnnnnnnnnnnnnnnnnnnnnnnnnnnnnnnnnnnnnnnnnnnnnnnnnnnnnnnnnnnnnnnnnnnnnnnnnnnnnnnnnnnnnnnnnnnnnnnnnnnnnnnnnnnnnnnnnnnnnnnnnnnnnnnnnnnnnnnnnnnnnnnnnnnnnnnnnnnnnnnnnnnnnnnnnnnnnnnnnnnnnnnnnnnnnnnnnnnnnnnnnnnnnnnnnnnnnnnnnnnnnnnnnnnnnnnnnnnnnnnnnnnnnnnnnnnnnnnnnnnnnnnnnnnnnnnnnnnnnnnnnnnnnnnnnnnnnnnnnnnnnnnnnnnnnnnnnnnnnnnnnnnnnnnnnnnnnnnnnnnnnnnnnnnnnnnnnnnnnnnnnnnnnnnnnnnnnnnnnnnnnnnnnnnnnnnnnnnnnnnnnnnnnnnnnnnnnnnnnnnnnnnnnnnnnnnnnnnnnnnnnnnnnnnnnnnnnaccttcttagacaaaagggtctcactgtgtagacctgactgtcctggaactcctatgtagactaggatggccttgaactcacagagatctaagagtctatgcctctctctgctgggattaaaggcattccatcctatgcctagtccaggaccagtgtatcagcctgccctatgctctattagtgcttcatcatggaggcagatctcagccctggcttcctgtgatgctcaggtgccatttctcctgggcacaacagtctgcctgttatcccacgtcctggttctcttgaagatgggcctttactgtctgtgacctgagtgtgctttctaacagacagcaacaccccaggcatctcccaggaatgaatgatggcttgcatctaagtcacctgtggtccttgggcaagttatttcattttctaggtatgctagcaattaagagaattagagaaaaatatgcacatatgggccatatggatatacatgaatatgtatgtgccatatgtgccgtagaaaaggattaattaacacacagctaatattagatagcagttggacacagccatgtatacctgtaatccaatgacagtgacaggggaggctaaggaaggaggcctgcatgcagtagcttcaagctcagcctggtctacatagtgacccccaggccagctaggaatcaggtgaaaccctgtttcaactgctcaccctccgaaaagctagattttatgtgttttatttgtttgcaatggtaagacagggtctcatgttgttcaggctgtggttgaactccctttgtagccctagataatctttttttttaaattgtctttatttgtttgttttcgagacaaggtttctctgtgtagccctggctgtcctggaactcactttgtagaccaggctggcctggaactcagaaatctgcctgcctctgtcccccaagtgctgggcttaaaggcgtgcaccactgctgttcagctagccaaagataatcttaacccccacttctcctgcctccacctctgaggcctggggtgacactcaggttccaccctgcctggcatagatattattcttcattggatcacacctcacaccttcttcactgggcctctgctttaggaaactggttatctttttattcatttatttatagctatttatttctagtgttggggaaagaatccaggactttggaaatgttatggaagagctctctgccactgagatcggcccccaggctggaatctggaaatcaatgcaaatctctctctttctctgtctgtctctgtctctgtctctgtctctgtctctgtctgtctgtctgtctctctctctctctctcttgtttgtagaccaggctattgaactcagattcacctgcctctgcctccggagtgctgggatcgaacgtaagagccttcacatctggcgaagcaccttcttgaagaaggcaaaattttgcttcaaaaatttgtttttggtgccaagaagtgaactaggcaagatctctcaccaagctacacacccagccccggaatttgcttgttttattttacttttttgagatagaatatcaatatatagttcaatgtggcctccgatcagaggtcttcctgccttgtcctcacttccttcctttttcagtcatcggagtccatggggttagaatcgtcctggccacctctgcctcgacgtttgtctttttatgagactgatcaattacgtttgtaccagtgaggcacgtatgttgtggctgtgttgtggaaaagcaaacagccatctgtcttttcattataatttatcaagacggtgactgggacagagggagagccagggagcaaccacatcgtctcgtgtgtgtggcctcagatcacatttgattctttttttagagttggcaacacagttcagcgggtaaaagtcctaccgccatgcccaccagcctcagcttagaccccaggacctgtgtggtggaaggagagagctgaccttctgcaagctgccctttgacctttatgcatacattagagagagaggaaagcatctgagctgctcatgggctctacatacacaacaggcctgcctcagccttcctaacagctgctagtaggtgtgtgccacctctagtgatgcttgctggctttttcctatttactaattggttatttatatttacatacatgtgcctgtgtgtgcacctaccctacatgtggaggccacacacacacacacacacactcttggtgctggaattataagcaccaggcccgcacccagcttttatgtaatgttctcatggtacagaactcaggctctcattcttgcttcgacaccactttgccaactgcatcatctccctcgccacccccatttttatttttttgagaccagttttccagactggtctcgaaatcaagatcctctagggtcaatatcctgagtgctagaattacagatatcagcatcccatattgacttaaataatgtggcggtttaaatagtaaatatgggccgggtggttgggcacgcctttgaactgaacacttgggagtcagaggcaagtggaattctgcgagtgtgagaccagactggtctacagagtgagttccagaatagccagggctacacagagaaaccctgtctcgaaaaaaggaaaaacaaaacaacaacaacaacaacaacaacaacaaactagtggccaggaagaagagagaaagatcaggtggcctctccagtttggaaagagacaggatgaactcaggactagctgtttgccagctcggcttccattcataagaagggtttcaggtgcggctctgacctataaaaggatgaccttctgacctagttagtgtgtgagtgtctttttctggtctttactacttagctcaggctgccctagaacggccccatttctcccgcttcagcgtgtgccacggtgccccagccaagtggttccttagtaaagtggcactgttggacacctaggcaaagaaaggtgataccagtgctgtgtgtgggcagcacagctcgctaagttcccgggatcagccagttttctatgtagacacttggggactctcacttctgagcacctggcacatactgttgaggtctgtagtctcagggagctgaggcaggtggatgattccatgagaatgaagggtttgaatcccatctcaaaaatgtagcaaagctaagactccagtctaagtccatgtttaataacaaaaagaagattggggggctggagagacaactcagcagttaagagcactggcagctcttcggaggacccacgtttgattctcagcacccatgtgggggctcacaaccatatgtaactccagctccagtctcagaggacctggcgccctcctgtggccttcacaggcactacgtacacacgtgctatacatacatacatacatacatacatacatacatacatagcacgcagacacagaaattaaattaaatggagctgggcatagtgaagaaactaaagcagaaagatccctttaagatggaagtgtctatctccgagctagagtgagttttaagccatgctgggctacagttagattctgtggaaacaaataacatcaaccagagcaataacaataataacgagcatagagagaaaacaaagcaagccaggtagggtgtacttcagcggttaggcagaagannnnnnnnnnnnnnnnnnnncctgggcgcgcgggtcgttgggacgccgggagacccccgcgtgggtcgagcgcgctgagtgtcccgtgcctctttcctaggcaaagagaaggagccccctggagtcgcagtaccaggtgggcccgctgttgggcagcggtggcttcggctcggtctactctggcatccgcgtcgccgacaacttgccggtgagtgggcaacgccgcctcggggagggcgcgcggagggatgctttgagcaggagggtctgatggagactcgggggtcttcttccaggtggccattaagcacgtggagaaggaccggatttccgattggggagaactggtgagtgagccggagccagagaccctctcatgggtgggtgggtggcgacgggcgtgccggaaccggcgcgctaaccctcgccctcactctgcagcccaatggcacccgagtgcccatggaagtggtcctgttgaagaaggtgagctcggacttctcgggcgtcattagacttctggactggttcgagaggcccgatagtttcgtgctgatcctggagaggcccgaaccggtgcaagacctcttcgactttatcaccgaacgaggagccctacaggaggacctggcccgaggattcttctggcaggtgctggaggccgtgcggcattgccacaactgcggggttctccaccgcgacatcaaggacgagaacatcttaatcgacctgagccgcggcgaaatcaaactcatcgacttcgggtcgggggcgctgctcaaggacacagtctacacggactttgatggtgagccaggccccggggagggagctgcccaaggtgccggcctggaagcctctggcggcctcggctccggccctttgtaaaggtcattgggccgcctggctcagagctggcaggggtggggcagagtcgagcttcccggcatagtacagccggggatttcgagctggttgaacgaacctgcaacatttctggcgtgattggggttttgttgttgttgttgttgttgtttttgttgttgctgctggtgtttgcttgtttttcttttcagcaggaatttattaaattccatgctttcccggtgaataagaggtcgtgggtagccggctgtagcccagatttctaaagtatgacccacttttccctccagtaggaggtggagccgttggtggcgggagacattggtgctgatttttttctttttcttttttttttttcttttgtagttttgttttgtgggggagttttaaggtagttcttagaactgcagggttttgttttgttttgttttgcttttgagggtaaaggaataagagccgcggtttcaccccacttgggggtgttgtggggtgaggaggcctggaatgaatgttgtgaaataagatctgttgctggtttgaaaattagttgggagtctccgctgggaggatgaaaacctatctaccatagggaggggcttggatcgcgttctttcagcagtggagggcaggaatagtagatcaaagcgcgagggtgggtcacgatccgagtggctcacccggacaaactatggcctttcaaaacttgtgactctggcttgtggtttgaatttctttggaggatgccgggctgggctgcgttttttgtatttaacagttaatggctggctgagtcctcccctgtgttttccccccctgggcaagtctttgctgccccctgttgagcaccacgaggctagcaccttttttttttttttttttttttactccccaaagtttgtaaacaggaatcacgtggtctgaaaccagccctgcaactgtacctttccagtctagggagtgggagagtgcagtgtctatgccttgcttgcatagaacccggaggaaagcacaccctgagttagttgtgtataaaggcccttacctgggcccggtctagatgagactggtgtggcagggccctggggtccttgtagttaaaggctaacccactgagtggggcctctagacttgagcttttcggtggctttatttgtctttgggccgatgtgtaagggatttgggtttagggtttttgggctcccagagagctaccatatcatttcttcattttctgtctggaccagagaggcagagatggagagaaaaaaaaaatatggttgttttaaagtcaaatctgcctgtctgcctcctgagagctgggattaaaggcatgtgccaccaaacccgagccaggcagtgtctttattaaaaaatatttgaaaacctagtggaggtggtggttcttgcttttaatccagcccttgggaggtagaggtaggcagatctccgagttcaaggccagcctggcctacagagtcacttccagagctacacagagaaactttggaggagaaaaaaaaaattaaaagaagcggctcagactagctgctttgttacctttttttttgctaatgctggtttctttctattccctctgctggtagggacccgagtgtacagtcctccagagtggattcgctaccatcgctaccacggcaggtcggcagctgtctggtcccttgggatcctgctctatgacatggtctgcggagatattccgtttgagcacgatgaagagatcatcaagggccaagtgttcttcaggcaaactgtctcttcaggtaacttccctcagacacccccaatccttcccaaaccctggttcagggttggtttggggattacaagagtgagagagtattcctatccacctttttatttttatttattcattttctttgggggagagtaaggccttagcctgcctctgacccccaactgctgggactcaagagatggtgggttttcactgggtcagagtactccatttgggctcaaattggaacaagttttatatacatcccaccccaacccccagaccctgtaaaatctaagtaccagcagagacccagtctctaaacaaagtttaaaaaaaaaaaaaaaaaatgaaggttccggatagtgtcagtggaaggcgtgaggtaggtaggtgaattgaatcacctcatcttgctcactggtggctcatcaaaacccttgtcatccttcctatttctagtgagtgggtgtcatgggaaaggcccgagctattgaagtctgaaaccacaggtttaagaggggaggcacttttttaactgaaagctgattgctggaggctttcggtatccgttctttcccaccgggcagtgtttggtataaaaagtaccgtgcctctttaaaaaccccagacttgtaggtctggggaagaagacctttgcattacaaaaacaagttgagtcatctttaacctctgtctgccccgccttctgcagagtgtcagcaccttattaaatggtgcctgtccctgagaccgtcagatcggccctcctttgaagaaatccggaaccatccgtggatgcagggtgacctcctgccccaggcagcttctgagatccatctgcacagtctgtcaccgggatccagcaagtagcagcctttctgctgctgtctgtcagaccctccagggagggagagcttgtcttctggcctccaacaggaccctgcgtgacgatgcagggacagcaatgacaactcattccagactccaggtccctggaggagcctcccacaagggaaagagactacttcactggtcctgggcccctctttgcgcgccccgcccccagactcagcgtctagtgttgctgggctcccctgaatccatccctggttgggggtgggagtggatcagagccctgtcaatggaactttaatcaccatggagactgggtcaccaagatgggccaggggggaggggaaaacagtctgggggggtgggataaaaactagcaccatatttaagtccctgtcacctcttccaactcctgagtgccttctgtggggactccgcctgtgctgggagaaatacttgaactttacctcttacctgctgcttctcaaactctgcctgggttttgcttccttcctctcctctcctttcccatcccccacttcctatgaaaggtgccatgggagaggctacagggccaactgctgagccacctgccccttttctgtctcctttagtaaaattcccaagcaaactggtcttccttttttgtttcgacttaactgtttcaaaaccaagacctcacacagaacgcacaaccaatgcaaaaaaaaaaaaaaaaaaaaaaaaaaaaaccagacaagctgtaaatgtgtgtatagttccggcatggtagcctgcaaaaggactgtagatgataacaattttaaagaagaaaaaaaaatgcctttaagttattttatgtgttggggggtttggtttggtttttttttttttttttttttcttttttattcttttttgcttgtttttgaaagatggcacgttctaccccggaagttttaatgtatttatttatttatttatttggttgccttcctgtccaagcttccactgactgttgcccccggtttattgtcatgttctgccttttttttttctttccttcctcctgacttggggaccttttaggggagggctgtgacgcttgctggggtgttggggctccggtgggacagctgctgtagcccccttctccaggggcccccttggctgcttgctggagtgggtctagggtctgctgactgtacataagacagttccggtgtggtgtgccttccggatcctctctggggctgtgctttgagcagcgtgcagcccgctggttttatctgagtaaagtatactgtacaggggaataaaagagatcttattttttttttttatacttggcattttttgaataaaaacctttgtcttaaaccttgagttttccattcattcatacaaagnnnnnnnnnnnnnnnnnnnnctgacgtgtcatgtcagagctagcatcgaacacttgagttccatcagacaatgtggttgcaggaattactacaggtagcacttgagagtttgatttggtttttgttttaaagattttatgtatgtgagtacactgtagctgtcatcagaacagggcatcaggtcccatcacagatggctgtgagccaccatggggttgctgggaattgaactcaggacctctggaagaagcagtcagtgctcttaaccattgagccatctctccagcaccctggttcttggtacctcatagcagggtttctcttgagctctagctgtaactagggctgtagatgaggctggcttcaagctcagacctacctgcccggcttggtgagtgaccagaagcctagtgtttttgacacaaggtttgaagtctgtgtagccttggaacttgatatgtatagaccaggctggcctgaaactcctggatctgcctgcctttgcctcctaagtgctgggattaagggcatgtatagttccactggaaaagatttgggagccacgagtcctagcatcttcctagcagagtggtgtaatcctataatcccagcacttgggaactaagaggatgagagtcaggagttcaaggtcagtctcagtctgggatactcgtgactggtctaatcagctggaaagatgcactctggtagacaggaccaaaggaattcctatacattcaaggctgagcctgggctggagttccaggtctatcctatctcgataaaaggggatgaggatgggcaggggaagtggagagatggctcagcagttaagaattcttgcagagggcctgggtacaacttccagcacccacatggtggctcacaaccatctgtaacttcagttccagaggatccaatgcgctcttctggcctccaagggcactaagcgtgcattcatacaaatacacagataacacacctattaagaaaacatttcagccgggcagtggtggcgcatgcctttaatcccagcactcgggaggcagaggcaggcagatttctgagttcaaggccagcctggtctacagagtgagttccaggacagtcagggctacacagagaaaccctgtctcaaaaaaccaaacaagaaagaaagaaagaagaaaggaataaagaaaggaagaaagaaaggaagaaaacgtttgctgttcttgcaggggacccagaattggttcccagcacctgtatgacctcacaattgtctggaagatggggcccccagtttgcctcatgtttggtctgagtatgtcctaatagttgaaccactgctgatccaggtcctaaaagtaattctttctttctttctttctttctttctttctttctttctttctttctttctttctttcttccttccttccttccttcctttctttctttctttctttctttcttttttttttttttaggcaatttctcctgtagcctaggcttaaatagcccaggagagccttgaactcccgatctgtatctaggatctggggcttgctgccaccacacccaggtgtaaacattgctttcttgttgctttctgcccattagtaacagttctaacattcttccctcctgcaggggcatcttgacctcttcctcccctcttgccataatctcttaggaacttggccccattgcattgcgcttgtggaggatccaggccacagtgccctcccttcatcgagagatctcctctaccaccacatcttggactaggtcccaaaccccagcacagcctcggtgtggctcagaaaggaaggaaggatttctcagctcttgggggctgattttctgaagttccccttttccctacccttctgtcccctcctccttcctgtatacacactgcccggcagctgggtgtctaagcacactgtgggacctttccagtcaagttgcaagtgaacaattgaaagttgctagaaactttatttatttatttcatgtatgtgagtacactgtagctgtcttcagacacaccagaagggtgcatcagatttcattgcagatggttgtgagccaccatgtggttgctaggaattgaaatcccctgctagaaatgaaatccggcagagccttgcccttcttgcctttgagatgagttggggggggcctttctgtggctgttgagactgctgggggccatacagtgtgtctgtagaaagtaggttctcaggggctagagagagggctcagtggttaagagcaccgactgcttttccagaggtcctgagttcaattcccagcaaccacatggtggctcacaaccatctgtaatgggatctgatgcccttttctggtgtgtctgaaaatagcaacagtgtactcatatacatgaagtaaataaataaatcttaaaaaaaaaagaaagaaagaaagtagggtcctcgctaagtagaagaggtcagaggttgtaggagatgcttttaggttctgtttgttttgtttgttttttgttctttatgtaaaccaggttggtcttaaagtcacagagatctacttgcctttgccttcctgagtgctagggttaaaggtctgtgccaccacaccctgcattatttattttttattttattttaatttaatttaattttattttttattttgaaatagcatctcctgcattctaagctagacttgaaccctggcatgataggtgtgtgtgagctgaaactaggcattttttgagaaggggaaaggtccttgatctctctctctctctctctctctctcttttttttttttttttttttttccagacagggtttctctgtgtagccctggctgtcctggaactcactttgtagatcaggctggcctcgaactcagaaatctgcctgcctctgcctcccgagtgctgggattaaaagcatgtgccaccaccgcccggcgtggttgtcacttctaaggagtaagaagagggttgtgatctggggagagggaccggcccagctatcttcgcattagttcccatccaagagatggagacagatctgtttatgtccctgttgatttgctttttagctgtatgacatgttgtgacattatggacagacctgtgtttccaggaggcagagatggggatggatgtccttggcggaagagattgggaaatctccccagggaaggcagcttctcactgttttgttttgttttgagtcagggtctccatacatgtagcatgggctgggttctgatgctatggtgccctgggagctcagaaaacaacttgnnnnnnnnnnnnnnnnnnnnnnnnnnnnnnnnnnnnnnnnnnnnnnnnnnnnnnnnnnnnnnnnnnnnnnnnnnnnnnnnnnnnnnnnnnnnnnnnnnnnnnnnnnnnnnnnnnnnnnnnnnnnnnnnnnnnnnnnnnnnnnnnnnnnnnnnnnnnnnnnnnnnnnnnnnnnnnnnnnnnnnnnnnnnnnnnnnnnnnnnnnnnnnnnnnnnnnnnnnnnnnnnnnnnnnnnnnnnnnnnnnnnnnnnnnnnnnnnnnnnnnnnnnnnnnnnnnnnnnnnnnnnnnnnnnnnnnnnnnnnnnnnnnnnnnnnnnnnnnnnnnnnnnnnnnnnnnnnnnnnnnnnnnnnnnnnnnnnnnnnnnnnnnnnnnnnnnnnnnnnnnnnnnnnnnnnnnnnnnnnnnnnnnnnnnnnnnnnnnnnnnnnnnnnnnnnnnnnnnnnnnnnnnnnnnnnnnnnnnnnnnnnnnnnnnnnnnnnnnnnnnnnnnnnnnnnnnnnnnnnnnnnnnnnnnnnnnnnnnnnnnnnnnnnnnnnnnnnnnnnnnnnnnnnnnnnnnnnnnnnnnnnnnnnnnnnnnnnnnnnnnnnnnnnnnnnnnnnnnnnnnnnnnnnnnnnnnnnnnnnnnnnnnnnnnnnnnnnnnnnnnnnnnnnnnnnnnnnnnnnnnnnnnnnnnnnnnnnnnnnnnnnnnnnnnnnnnnnnnnnnnnnnnnnnnnnnnnnnnnnnnnnnnnnnnnnnnnnnnnnnnnnnnnnnnnnnnnnnnnnnnnnnnnnnnnnnnnnnnnnnnnnnnnnnnnnnnnnnnnnnnnnnnnnnnnnnnnnnnnnnnnnnnnnnnnnnnnnnnnnnnnnnnnnnnnnnnnnnnnnnnnnnnnnnnnnnnnnnnnnnnnnnnnnnnnnnnnnnnnnnnnnnnnnnnnnnnnnnnnnnnnnnnnnnnnnnnnnnnnnnnnnnnnnnnnnnnnnnnnnnnnnnnnnnnnnnnnnnnnnnnnnnnnnnnnnnnnnnnnnnnnnnnnnnnnnnnnnnnnnnnnnnnnnnnnnnnnnnnnnnnnnnnnnnnnnngccgggcacgtttctcgtaagtgttgctcagctcctttaactgctccgctggttcttggaaaccctcaccacaaggacctatcgagagcagtgttggagcagatatggcatagccctccccccccaaccccccccagttcatttccgcaatggcctgtgctactaaccccgattgccaacagcgaggttgcagtgacccctccagtggtggtgtgagggagtggaaacgaagcagaactcaggccaagatgaggagaccccgtattattttaatttacagtaataggacttccaatgtgcagaattcttggtgaccttaggtctgggatacagtacaagaccggctgttattgaattgtatcctgttgtttggcgagtctaacaccaatagcaagcaagttggtggtgtggctcagtgggtagaacgcttaccaggcatgcacgaagccctgggtagggtgttttttttttgttttgttttgtttttttacttattatatgtaagtacactgtagctgtcttcagacacaccagaagagggcatccgatttcattacaggtggttgtgagccaccatgtggttgctgggattttgaactcaggacctccggaagagcagtcagtgctcttaacccctgagccatctctccagccccctgggtagggtttgtaatccctgtgctggggaggtagaagcaggaggcccagatgttcaaggtcatgctcagcctgcattataggccaccctggactacaggcaggacagtaacagtcacgtctatgtgacccgatggttttcttagtttgtgtcccgatgcccccagatagaccctgctgtcctgaatgccaggtgtagctttttttttaccttaaaataaatgctttgccaggcagtagtggcccacgcctttaatcccagcacttgggaggcagaggcaggtggatttctgagtttgaggccagcctggtctacagagtgagttccaggacagccagggctgcacagagtaaccctgttttgaaaacaacaacaacaaagaaataaatgcttttacattcatttactttgatgttgttggttttaagatttattttcagtttgtaattatttgtgcacttgtgtgtgtctgtgcgggggtgtgcctacagtcgggcacaagtacttgcagaaatcagaaggggacactggaccctctggaattggagttgcaggcagttgtgagctgtcagatctgaatggtgggaaccaaacttggaccttctgtaagactggtatgtatcttaagccctggactatctctactgaccccatccgtgatcatgatcgtgtcaccatcaccatcatcagcaccaccatcatcatcaccatctctggctagccttgaattttttttttttcttttgagacagggtttctctgtgtagccctgactgtctttgaactcactctgtagaccaagctggactcaaatagtgctggggacagaacccagggttcctgcaatgctaggtaaaccctcttatcaactgagccacattgccgccagcccatgagttttgaataaacaattaattttgtgttttccaaagttttgtcattgtatataaaatacccttttaatctaactccctggaaccatgagggcccacatgaaatcaggggcagtagcagcgtggtgtgtaagggacccttccttgacttggagacatattgtcacagttgaattccgctccaactttggtcttcacgtgaccttggcagatatttagtttctgagttttgttttttttcttctcatccacgacagagaaatggtccggagtttgtgaagcctgtgccacccagccaacggtcattggtacaaatgaggcacagcttaaacaggacaccgtcgaaaggagattttagaatgagctagtctgaatctcggtgacctggagctagtggggtccagagatagactgaaaagggcgccaggaacttcaggggagggagtgcggacttgtttttcaagtatggtaatgtttattcggctgtgaaaggctgtcagaaacacaccctactgagctaatgcttaaaatgcatgcagtgtcttatgtgtataaattacccctgggtaaaatgacttaaaaaaaaaaaagttaatttcttttccttttccccatcaatgaaaacacgtccctgagccaaatataccacggaagtctcctttccggttagattattcatgtgagtgcgaacattctccccgtggattgatataaataaatgagaattggcttaatttcccaccttactttctgactgtagtgcaaaattagagagatgtgtcatcagggggtggagggggccgacgctgcgaccacgctacgacggagataaacttaaacgccgcatttttttttttcttcaaagtcataaacttaaagggaaaagttttgttttttgttttttttttcctggcgaagcactaaagcaaagtgatggttgctcgcggtggcggaacatgtctgggaacctcgcaccttgggaggtagaggcaggaaggtcaggcagccaacacttggtgagttccacgccagcctgggctatgtgagacccagttgctaaacagcaaagcgagatggtgcggtgcggcacaggctgacagctctgcagtagccaaaggaatcacgtgatccatctggttctatctcccatcatccctcatttctttcccctttggggtgaaatgtacacatgtatctttgaaggaatttttttctttaatatctactattaacatttttgcttacaactccttggcttttattgtctccacacctagtcaaagagaaactagacattttaatctatttttcaggtagccacgtaactagagatgagaagatgagaacggattttgctgtagatgtctatccatctctgtgtctttgggttttttaagatttactttattatatatacacagtgttctgcctgcatgtatgcctgcaggccagaagagggcggcagatcaccttatagatggttgtgagccaccatgtgggtgctggggattgaactcaggaccactggaagagcagccagagcgcttaacctctgagacatctctccagcgcagtccatccatctctatgcatatgtaggttaggagtagtgcaaggtcagagctcaaggtcctaagcaggtggtgcacacttgtcagcctaactctagggaaaaggaggcacgagaatcaggagttcaaggttaaccttggctatgtaacaagtctgcagccagtttgggctccaagagaccctgtcttggtaaaatgaagctgataagcacacttgctgctcatccagaggacccaagttcaagtcccagcacccacacaaattggagggcaaattggtatttaattatttactatctgtttgtgctattgggatttagaactgagctaggcaagtgctctactcctgagctccacccgttgctgcagtcttacatatccaggtgagcacgtggaggtcaaaggacaactggagaattgctcagaagtaaagagcactggatgctcttccagaggtctcaagttcaattccctcacccatatagtggctcacaaccatttgtaatgtgagccaggtctctcctggctcaggggtgcagggtgcaggaggtctaacttagccctctcgtttactttgtgccacagggtcagttgtccttgtcacttggctcttcaaacagttacatctttttgatcacctgggattccttcaggctgggttctgtgctctttattttaagaatattgttatattttaagggggtgggctgtggatcaggggagtgggagtcatttcttctaatcattttggtcccggggatgtaattcaggtcctcatctctctctctctctctctctctctctctctctgtctgtctctgtctctctctgtgtctgtctctctgtgtctgtctctctgtttctctgtctctctgtttctctgtctctctctctttgagacaaggtatccctgggtgatgtgaaacttgctgtgtaaaccagactggcctcaagctcatagggatcacctgccttagcttcccagtgctggggttcaagatgtacaaggcctggctggagagatggctcagtggttaaaagcactgactgctctcccagaggtcctgagttcaagtcccagcaaccacatggtggctcacaaccatctgtaatgggctctgatgccctcttctggtgtgtctgaagacagctacagtgtactcatat

SEQ ID NO: 50 - DNA, 9261 bp, Mus musculus
tctagagtcgacctgcagcccaagcttccttaatggaatcttctggtttatttatttctcacctttggccttattttttcctgtgctcacttaatatcctggttgctgttgttgttgttgttttgtctgcttggttttttttttttcttcccttgttgatcatgaaccccaggcatgctagatgactatctgatcattgagctacatcctcagccataaggcttttccttttgacatatggtcttggttacaccactgtctggcttcactatactgctcagtttggcagtcctcctgtttcagccttccaaatattagaatgacaaggatgacccactacatcaggttcatgaattgctgttaagtgttctttacgttgggtcatctcccatcagaaacggttggataaagggtggttgtgcttgcagtgtgggcaagagggaaggcagaagcaaacgatccatgaatttgagaactgtcctggctttggcatgcacagtgagattgtatattaagaagcagaaaaaggaaacaaagcaggtagacagtataaatcaacgaagagatagcatacagaaagtcttcttgttttaaggcaggatcttttgtgtctctgactgactttgaactttgacctgactctacctctttgtcctgggatcaaaagtaccatttatgcagtgcccagggatcaaacctaggattttcttctgtatgccaagcaaggaccctaccaaccgagcagcatccccagcccagaaagattttttttctttgtaagaaccccacatgaccatcagatgggcggcagtgaacgaaggcttagaatttgttcagcaaaaaaatgtggaaatacacgcgccttgttcagaacgcaaggctttgaataagcgacaggactggagtgtatgtaggttggtgacagggtgcatgtgtaagaccctggatttcccaacatcagacacattccgagaagaggacagggcactttggacaggtggacttagttttcagaggcacaaagtctggaatgtgctgggagattgaaaacaagtggaaatagtcctgtttggacagagctgagggcctgatagggaactggaggtagttgtactggtgtttaacacatatttatttatagacagagtttctctttgtagacaaggctggcctggttagaatgttgtggttttaacgttgggcaccactctaggcatacctgttttctgattgcctgctcaataccagtgccatagatgtttttaggctgattaaagggagagctctgaaccctcaggagcagaatttgggccattctctctgctgtcgtatgaccctgtgtcatcccagtgacgagtcattttcctatctgcaaaaaaggaagtaattctccttcccctgggtttttctcctttcgtcatcagaaatgaatgagttagtccacagaacacaaacaaagggaaatatgtaatgttttgtaagaggcatccataaaagttatggagtctctgggcatctttataagcagcatggaaaacttgtaaaggaagcatttaaacgcgtgcgctaatgactacatccacaacaggctcgttcctcctttaaagatctctcagacctaagaacaacaacaaaaataacgaacaaggggtgtagctggctgtccatgactctggccaccagtatctcagtttatatggattacacagaatgagagtttacccatttccacacgtcgttatcaactctccatgaagttcaaaaggacaaaagatgaaagcggactcggctagctttccgtggtatttccacgtgcatgtggggactttcctttgagacaaggctggggtgggggccaataatatctggtatcgcctgactgctaataccaagctgatgagaaggtaactaccgcaacaacctctgattaaacccagcggcaccctcccaccctcgcccgcgatcaggaattttcctgctcctcccgccctctcagaaggggctgaggcagcatttggcaagagaaagctaacgtttgtgtcgtgatttcctctctcaggcgctcggacatggaccgaggggatcaggtaccccgggtcccttctaattctctctgcatttctaaattgagaatctttgtcaccggctcctcgcatcccaggtctcccccacttttcctcgcaggcctgtgactggcctcggtgtgcaaaatgccggtgactcacgtcttgcacagccttcgcccccaaaaacacaatcatcacccccaggatctagcccacatagcatcgtcaacccgccccagcagccttggaggtctccgggctgagtcacaccagaggaccaccctggtcggcatccacacacacgcggtccctactcatggcttccgcgcccgccacaccaacgcccttccatttctcacaacttgctacgctccagctccaatcctcgacccccctccacaacccaaatctccgggaaacacagagccggcggagctggcctcgggcggcctttgatggctttgttattgtttgggtttgaatcgataccccctccccatccttccacccccgcccgcgcgcgccacccagctcccgcctccctgcacgcccaggcccctccccctccgttttggcgccttttccttcccgccagtcggcttagaccattctgaccgcgaggcgagaggcggggcccgcaacgccttatgcaaatagggcgtcttctggttggctgaagcgcgcccgagggcggggccggggagaggggtgtagccgcgagggggcggagcggagggggagggccctggtcccgccgcctccccgccccctctccgccctccgcgccgagccagcccggctccccacctcgctcccggagaggccccgccccgtccccgcccgccgccgccctccccagcggcgcgtccgcccctttactcctggcggcggggcgagccgggcgtctgcagcagcggccgtggcggcggaggaggctggaggggagtcggcagtgccggcggcgggatcggcagtagcagcagcagcagcagtcacagtcagcagcagccctgggtcccgcagcgcctctcgccctgccgcctcccgcactgcctgacccagccggcgaacccgcccgcggccagccccgccagcgccctcagtcgtcctccgactcgccctcggccttgcgcgccagccgcagccagagccgcaacgccacccgcagtctgagtcccggccgtcgctcagccccagctcgctccgccgccgctgctgctcgtcccggcaccggcgccgcaccgacaccctggaggtggggatgctcctgtccaagatcaactccctggcccacctgcgcgcccgcccctgcaacgacctgcacgccaccaagctggcgccgggtgagtgtccccaccccaccctgggcgcgcgggtcgttgggacgccgggagacccccgcgtgggtcgagcgcgctgagtgtcccgtgcctctttcctaggcaaagagaaggagcccctggagtcgcagtaccaggtgggcccgctgttgggcagcggtggcttcggctcggtctactctggcatccgcgtcgccgacaacttgccggtgagtgggcaacgccgcctcggggagggcgcgcggagggatgctttgagcaggagggtctgatggagactcgggggtcttcttccaggtggccattaagcacgtggagaaggaccggatttccgattggggagaactggtgagtgagccggagccagagaccctctcatgggtgggtgggtggcgacgggcgtgccggaaccggcgcgctaaccctcgccctcactctgcagcccaatggcacccgagtgcccatggaagtggtcctgttgaagaaggtgagctcggacttctcgggcgtcattagacttctggactggttcgagaggcccgatagtttcgtgctgatcctggagaggcccgaaccggtgcaagacctcttcgactttatcaccgaacgaggagccctacaggaggacctggcccgaggattcttctggcaggtgctggaggccgtgcggcattgccacaactgcggggttctccaccgcgacatcaaggacgagaacatcttaatcgacctgagccgcggcgaaatcaaactcatcgacttcgggtcgggggcgctgctcaaggacacagtctacacggactttgatggtgagccaggccccggggagggagctgcccaaggtgccggcctggaagcctctggcggcctcggctccggccctttgtaaaggtcattgggccgcctggctcagagctggcaggggtggggcagaggcgagcttcccggcatagtacagccggggatttcgagctggttgaacgaacctgcaacatttctggcgtgattggggttttgttgttgttgttgttgtttttgttgttgctgctggtgtttgcttgtttttcttttcagcaggaatttattaaattccatgctttcccggtgaataagaggtcgtgggtagccggctgtagcccagatttctaaagtatgacccacttttccctccagtaggaggtggagccgttggtggcgggagacattggtgctgatttttttctttttctttttcttttttttttttttttcttttgtagttttgttttgtgggggagttttaaggtagttcttagaactgcagggttttgttttgttttgttttgcttttgagggtaaaggaataagagccgcggtttcaccccacttgggggtgttgtggggtgaggaggcctggaatgaatgttgtgaaataagatctgttgctggtttgaaaattagttgggagtctccgctgggaggatgaaaacctatctaccatagggaggggcttggatcgcgttctttcagcagtggagggcaggaatagtagatcaaagcgcgagggtgggtcacgatccgagtggctcacccggacaaactatggcctttcaaaacttgtgactctggcttgtggtttgaatttctttggaggatgccgggctgggctgcgttttttgtatttaacagttaatggctggctgagtcctcccctgtgttttccccccctgggcaagtctttgctgccccctgttgagcaccacgaggctagcaccttttttttttttttttttttttactccccaaagtttgtaaacaggaatcacgtggtctgaaaccagccctgcaactgtacctttccagtctagggagtgggagagtgcagtgtctatgccttgcttgcatagaacccggaggaaagcacaccctgagttagttgtgtataaaggcccttacctgggcccggtctagatgagactggtgtggcagggcctggggtccttgtagttaaaggctaacccactgagtggcctctagacttgagcttttcggtggctttatttgtctttgggccgatgtgtaagggatttgggtttagggtttttgggctcccagagagctaccatatcatttcttcattttctgtctggaccagagaggcagagatggagagaaaaaaaaatatggttgttttaaagtcaaatctgcctgtctgcctcctgagagctgggattaaaggcatgtgccaccaaacccgagccaggcagtgtctttattaaaaaatatttgaaaacctagtggaggtggtggttcttgcttttaatccagcccttgggaggtagaggtaggcagatctccgagttcaaggccagcctggcctacagagtcacttccagagctacacagagaaactttggaggagaaaaaaaaaattaaaagaagcggctcagactagctgctttgttaactttttttttgctaatgctggtttctttctattccctctgctggtagggacccgagtgtacagtcctccagagtggattcgctaccatcgctaccacggcaggtcggcagctgtctggtcccttgggatcctgctctatgacatggtctgcggagatattccgtttgagcacgatgaagagatcatcaagggccaagtgttcttcaggcaaactgtctcttcaggtaacttccctcagacacccccaatccttcccaaaccctggttcagggttggtttggggattacaagagtgagagagtattcctatccacctttttatttttatttattcattttctttgggggagagtaaggccttagcctgcctctgacccccaactgctgggactcaagagatggtgggttttcactgggtcagagtactccatttgggctcaaattggaacaagttttatatacatcccaccccaacccccagaccctgtaaaatctaagtaccagcagagacccagtctctaaacaaagtttaaaaaaaaaaaaaaaaaatgaaggttccggatagtgtcagtggaaggcgtgaggtaggtaggtgaattgaatcacctcatcttgctcactggtggctcatcaaaacccttgtcatccttcctatttctagtgagtgggtgtcatgggaaaggcccgagctattgaagtctgaaaccacaggtttaagaggggaggcacttttttaactgaaagctgattgctggaggctttcggtatccgttctttcccaccgggcagtgtttggtataaaaagtaccgtgcctctttaaaaaccccagactttgtaggtctggggaagaagacctttgcattacaaaaacaagttgagtcatctttaacctctgtctgccccgccttctgcagagtgtcagcaccttattaaatggtgcctgtccctgagaccgtcagatcggccctcctttgaagaaatccggaaccatccgtggatgcagggtgacctcctgccccaggcagcttctgagatccatctgcacagtctgtcaccgggatccagcaagtagcagcctttctgctgctgtctgtcagaccctccagggagggagagcttgtcttctggcctccaacaggaccctgcgtgacgatgcagggacagcaatgacaactcattccagactccaggtccctggaggagcctcccacaagggaaagagactacttcactggtcctgggcccctctttgcgcgccccgcccccagactcagcgtctagtgttgctgggctcccctgaatccatccctggttgggggtgggagtggatcagagccctgtcgatggaactttagtcaccatggagactgggtcaccaagatgggccgggggggagaggaaaacagtctggggggtgggataaaaactagcaccatatttaagtccctgtcacctcttccaactcctgagtgccttctgtggggactccgcctgtgctgggagaaatacttgaactttacctcttacctgctgcttctcaaactctgcctgggttttgcttccttcctctcctctcctttcccatcccccacttcctatgaaaggtgccatgggagaggctacagggccaactgctgagccacctgccccttttctgtctcctttagtaaaattcccaagcaaactggtcttcctctttggtttcgacttaactgtttcaaaaccaagacctcacacagaacgcacaaccaatgcaaaacaaaaaacaaaaaaaacaaaaaaaaaaccagacaagctgtaaatgtgtgtatagttccggcatggtagcctgcaaaaggactgtagatgataacaattttaaagaagaaaaaaaaatgcctttaagttattttatgtgttgggggtttggtttggttttttgtttttgtttttttttttcttttttattcttttttgcttgtttttgaaagatggcacgttctagcccggaagttttaatgtatttatttatttatttatttggttgccttcctgtccaagcttccactgactgttgcccccggtttattgtcatgttctgccttttttttttctttccttcctcctgacttggggaccttttaggggagggctgtgacgcttgctggggtgttggggctccggtgggacagctgctgtagcccccttctccaggggcccccttggctgcttgctggagtgggtctagggtctgctgactgtacataagacagttccggtgtggtgtgccttccggatcctctctggggctgtgctttgagcagcgtgcagcccgctggttttatctgagtaaagtatactgtacaggggaataaaagagatcttattttttttttttatacttggcattttttgaataaaaaccttttgtcttaaacctttgagttttccattcattcatacaaagatgtatgcttggtacagagccaggtagactgggcactttcagactagatctgatttcctgctggggcacagagaagtaccaggctttctgaacaaaccatgctggataaaacccaggccttccgtgcccactctaccaaggaaactccctgactatgaccaattccctttaacaaaagtttagggattgtcaccttttcaaagcaggtgcaaccaaattacagcaccaggaacatggggacaagacttggctaggactaaatttttctgacgtgtcatgtcagagctagcatcgaacatttgagttccatcagacaatgtggttgcaggaattactacaggtagcatttgatttggtttttgttttaaagattttatgtatgtgagtacactgtagctgtcatcagaacagggcatcaggtcccatcacagatggctgtgagccaccatggggttgctgggaattgaactcaggacctctggaagaagcagtcagtgctcttaaccattgagccatctctccagcaccctggtcttggtacctcatagcagggttctcttgagctctagctgtactagggctgtagatgaggctggcttcagctcagacctaccgcccggcttggtgagtgaccagaagcctagtgtttttgacacaaggtttgaagtctgtgtagccttggaacttgatatgtatagaccaggctggcctgaaactcctggatctgcctgcctttgcctcctaagtgctgggattaagggcatgtatagttccactggaaaagatttgggagccacgagtcctagcatcttcctagcagagtggtgtaatcctataatcccagcacttgggaactaagaggatgagagtcaggagttcaaggtcagtctcagtctgggatactcgtgactggtctaatcagctggaaagatgcactctggtagacaggaccaaaggaattc

SEQ ID NO: 51 - DNA, 942 bp, Mus musculus
atgctcctgtccaagatcaactccctggcccacctgcgcgcccgcccctgcaacgacctgcacgccaccaagctggcgccgggcaaagagaaggagcccctggagtcgcagtaccaggtgggcccgctgttgggcagcggtggcttcggctcggtctactctggcatccgcgtcgccgacaacttgccggtggccattaagcacgtggagaaggaccggatttccgattggggagaactgcccaatggcacccgagtgcccatggaagtggtcctgttgaagaaggtgagctcggacttctcgggcgtcattagacttctggactggttcgagaggcccgatagtttcgtgctgatcctggagaggcccgaaccggtgcaagacctcttcgactttatcaccgaacgaggagccctacaggaggacctggcccgaggattcttctggcaggtgctggaggccgtgcggcattgccacaactgcggggttctccaccgcgacatcaaggacgagaacatcttaatcgacctgagccgcggcgaaatcaaactcatcgacttcgggtcgggggcgctgctcaaggacacagtctacacggactttgatgggacccgagtgtacagtcctccagagtggattcgctaccatcgctaccacggcaggtcggcagctgtctggtcccttgggatcctgctctatgacatggtctgcggagatattccgtttgagcacgatgaagagatcatcaagggccaagtgttcttcaggcaaactgtctcttcagagtgtcagcaccttattaaatggtgcctgtccctgagaccgtcagatcggccctcctttgaagaaatccggaaccatccgtggatgcagggtgacctcctgccccaggcagcttctgagatccatctgcacagtctgtcaccgggatccagcaagtag

SEQ ID NO: 52 - DNA, 25221 bp, Homo sapiens
ggctaattttgtatttttagtagagatggggtttctccacattggtcaggctggtctcgatctcccgacctcagatgatctgcccgcctcggcctcccaaagtgctgggattacaggcatgagccaccgtgccttgccaacccgtctctttaaaaaaaattttttttacggccaggcacggtggctcacgcctgtaatcccagcactttggaaggccgaagcaagtggatcacttgaggtcaggcgttcgaggccagcctggccaacgtggtgaaaccctgtctctactaaaaatacaaaaattagccaggtgtggtggtatgcgcctgtaatctcagctactcgggaggctgaggcagaagaattgcttgaaccagggaggcgggggttgcagtgagccaagatcatgccattgcactccagcctgggcgacagagaagactccatctgaaaaaaaaaattttttttttttacaatatgatctctgcacttgaagagctgatggtctcattggggaaacatgagtcctttcaaagtgggtattaaattaatgcttgctgctccttaaaatgatgctataatgacagtaactacttagataacaaaagaatatgattgtatcagattagtattacaagtaactgctgtgagtttaaaaactattggctggagtggtcagggaaagctgtaagaagtccaaatggccttcagttggtctgaaaggacagacagaatttggggatgtgtgtgcaatttgggttaaagaatgtaatctgtgttgtctttaagccctgcatcagaggaccagctatttgccaacataactcccatttacaagagtaacttcagataaaaccctgatgactgccaagtctgactttctcatctagtgagtgggtgtctctctaataaagtagcatcactgaacacagaagcaagcttaacctatccagggaaaagtgacaccatttctataaagggaacagcacagctccctagttctccagagtgagcaagattgtatttagacatgcaaagaatctctgacaaagtaatacattgaaggccataaaaaacagctctgtatctgtagtatagttgttctagttctggctgtggtgagctgtcatgtttgttttagcagcatgccacctaaaaagagaagtaaaacagagttggaaaagaggaagtatatgttgaaaatgtaagtttctccaaattattgagtagatttcgtccaataatgttactacatgtcttttttatcatttggaacttggaacactctgtgtattaaccacgatataagcaaatattcctaaactataagcttcaaaggattatttgaatagagaatcttcctagtttcttcttcagtagactgaaatagccaggcacagtggctgacgcctgtaatcccagcacttttggaggccgaggtgggcagatcacgaggtcaggagttcgagaccagcctggccaacatagtgaaaccctgtctctactaaaatcacaaaaagtagctgggcatggtggcgcgtgcctgtagtcccagcaactggggaggctgaggcaggagaatcgcttgaacctgagaggtggaggttgtggtgagccgtgatcgtgccactgcactccagcctgggcaacagagggagactctgtctcaaaaaaaaaaaaaaaagactgaaataaaatatctgtcatcttttgcaacatgacatcaggagctcctactaattctctctggcttcttgcttttgatttaaaaacttttgaggccgggagcggtggctcacgcctgtaatcccagcattttgggaggctgaggtgggtggatcacaaagtgaggagttcaagaccagcctggccaagatggtgaaaccctgtctctaccaaaaatacaacaattagctgggtgtggtggtgcacacctgtaatcccagctactcgggaggctgaagcagaagaatcgcttgaacccatgaggcagatgttgcagtgagccgagatcgcgccactgcactccagcctgggtgacagagcgagactccgtctcaaaaaaaaaaaaaaaaaaaaagaaacttttattcattcatttcatgcgtattggggaatacaaaaaaacaacacaaagcatcttttgcttcacttcctgactctactcaccgtgttctctctctccttcctacttactcgtattttactcattaagacctgagttaagatctacatcctccatggagcctccccggacctcttcagcctcctctgaaccttgactttgtggatgatgctatcagaacttaatcacagaagaccttgttaaatctctttttttgtttgtatgttagagacagggtctgactctgtcgccctggttggagtgtagtggcacgatcaaggctcacagcaacctctgctacctgggctcaagcagatcctcctcccgagctcagcctcccgagcagctgggactacaggtatatgccatcacatccagctaatttttgtattttttgtagagacggggtttcaccatattggcccacctggtctttaactcctgggctcaagtgatccaccagcctcagcctcccaaagtgctgggattacagtcatgagccactgtgcccggccgttaaatctcttaaactcattttgtgttccttggaaaggcagaatggcatggtgggtaggagattgctctgccacttaacagtgtagccttgggcaaattacttatctctgttccgtttatttatctgtaaaccaatgaagatagtaaaaatgcccacctcataggatttatatggggatataaatagaacaatgcctagcacatcattgatgctcaatattggcttttagtaccctatctcttttgcccctcccgccaatgattttcatttcttagcctttatgttcaattaaaggatgatggtttctgccttcaatatatttatagtctagttgtagagatgagacaaatacagaaaaataagactatatactattagatgacaaattagatacacaataaagaaatgttttcatcactttctttgtagtgcttacaaggatgttccatgaaatcttttttgcactttttttattttaccttgatgaactttgtggcttttccaaagtcttacatcagcaattttattttacttttaaaagatggtagacaatcccctcaccagctcctagatagaagacattctctctctctccctcacacacacacacacacacacacacacacacacacgcacagacacgatggcccttttctttgttagttagacatgcagcgtttttgttcatgtgtctgcctggttgttctgatctgagggatacattttcttagtcttctaataaggtattttataacagtctccaggcttcctgtagcctttatatgttctaagctactcctttttatattcatctatccagcaatactcaggaactataaaatctttgtgtataatgccttcagtaaatattatttttactcaaattgtcagtatctaatgtgcaaaattccaaaaataaatctagattacttttatttcctctgaaaaacaaaacaaatgaattggtaataatttaaatatactttattgtaaaatagccctttcttttcccaaccttgctggctaaaatagatttataaaactgaaataggccaggcgcagtggctcatgcctgtgatcccagaactttgggaggccgaggcgagcggatcacgaggtcaagagatcgagaccatcctggccaacatggtgaaaccccgtctctactaaaaatacaaaaattagctgggcgtggtggcgcatgcctgcagtcccagctactccggaggctgaggcaggaaaatcccttgagcccaggggccagaggttgcagtgagctgagatcgcacaaccgcactccagcctggcgatagagactccgtcttaaaaaaaaaatgaaataaatatcatatccttatcaaggacaagaactagctaggcatggtgcctcacacctgtaatcccagcactttgggaggccaaggcggatggatcacgaggtcaggagctcgacaccatcctggctaacacggtgaaaccctgtctctactaaaaatacaaaaaattggctgggcttggtgacacacgcctatagtcccagctacttgggaggctgaggcaggagaattgcttgaacccgggaggtggacgttgcagtgagccgagatcgcaccactacactccagcttgggcgatagggtgagactctgtctaaaaaaaaaaaaaaaaaaaaaaaaaaaaaggccaagaactagttctagtgactacatagattccttgatcattctgaaattgggacatggtggatttcctaagtgtctcccactatcacaatgatttcaatttaaaaaggttttcagctgggtttagtggcttatgcctgtaataccagcattttcggccgggcgcggcggttcacgcctgtaatctctgtaatctcagcactttggaggcctaggcgggtgaatcacctgaggtcaggagtttgagggcagcctgaccaacatggtgaaaacccgtctatactaaaaatacaaaaattagccgggtgtggcggcaggctccagtaatcccagctactctggaggctaaggcagggagaatggcttgcatccgggaggcagaggttgcagtgagccaagattgcgccactgcactccagcctggtagacagagcaagactccatctcagacaacaacaacaacaaaagaaacgcattttgggaggccaagactgatggatcacttgaacccaggagtttgggaccagccttggcaaaatggtaaacctcatctctacaaaaaatgtgaaaattatcggccgggtgcggtggctcaggcctgtaatcccagcactttgggaggccgaggcgggcggatcacgaggtcaggagatcgagaccatcctggctaacatggtgaaaccccgtctctactaaaaatacaaaaaattagctgggcgtggtggtgggcgcctgtagtcccagctactcgggaggccgaggcaggagaatggcgtgaacccgggaggcggagcttgcagtgagccgagatcactccactgcactccagcctcggtagcagagcgaaaccccgtcacacacacaaaaaaagaacaagtgaaaattagcccggcgtggtggctcacccctgtaattccagctaggtgggaggctcaggcagcaggatcgcttgggcgcaggtctaggctgcagtgcgccgtgatccattgtgccactgcactccggaccctcggtgaccagagtgagactttgtctcaaaaataaataaataaaaattaaaacaaaaaaagaaatattcagtttttgttttgtaaagacagggtttccctatgttgcccaggctgctctcctgagctcaagcaatccgcctgcctcggcctcccaaagtgctgggattacaggcgtgagccaccatgcctggtctttttaaatttagaatgtttcctgtctggccaggcgcggtggctcatgcctgtaatcccagcactttgggaggctgaggccgccggatcacttgaggtcaggagtttgagaccagcctggccaacctgatgaaacccgtctctactaaaaatacaaaaattagtcgggtgttgtggcggacgcctgtaatcccagctacttgggaggctgaggcaggagaatcgcttgaacccgggaaggggaggctgcagtgacccgagatcatgccactgcactccagcctgggcgagagtgggactctgtctcaaaaacaaataaactaaataaaataaataaaaaactgagtaaattttttttaggagataaatgagtgatgcagattcaatacgtctctacctgattaattataaatagcgtatagagtcttagttatacaatcctagttatataaatgcattgactagacttacagacactttaaaaaattgtgtaccgatatcactttcaaactttcttctaaacttgttttttaaaaaaatttcgtgactacagaacttgctgaagtcattgtttttttgttttttttttttgcataagcatatagtccctggatgaagtcattcctttgacaatgacttgattaaacccatatcaggcagaatatgaaaaccacctaaggattaatttggatattgttcaaattaatattaataaatgctcctcttcccagagaactgttagcataattgtggccttttatccttccaaaagcacttgtcatttaattattagggtgatttttctgattctttgttagattctttgagatagcacaaatagtgctaattttattaagactatatttcgataaatcaaaacatcaagttccctactctcgaggagtaacttttgacccacaacacatctgaatgtttactaattatcttttaaagcagttttaagtaaatcaaagctgtttgccaagcaaggtccatgttttgtaacttccagctgtgaagcccccactatacaaagtagatatattaaatgttaatcactttagctctaattaaatatttagtccttcaaagacctagaaaaagtgaaaaaggttgaagttgatacatatttttttttctaaaaggcctaaaagatctactagaaacaactattttaaatcacatctctccccaaatggttaaaaatcgaactattaatccagtagtttacctttggtaccttctaggtgtaagaccgtttgggctgggcgcggtggctcacgcctgtaatcccagcactctgggaggccaaggcaggtggatcacaaggtcaggagatcgggaccaccatggctaacacggtgaaaccccgtctctactaaaaatataaaaaattagccaggcgtggtggcaggcgcctgtagtcccagctactcgggaggctgaggcaggagaatggcgtgaacctgggaggcagagcttgcagtgagccaagattgcgccactgtactccagcctgggagacagagcgagactccgtctcaaaaaaaaaaaaaaaaaaaaaaaggccgttttaaaaaacatcatcatcataaccacgatcaacattattgccatcatcattgctaatatttattagaagtttactctgtactgggttatatgctttacaaacaagagttttatttgctccttacaacaaccctatgaggtagatgctgttattatctccattctgtctaaagcttaataaggttaagtaacttgaccaatgcctaactagtagctgccagatcccggaattgaaaccaggctaacttagtttaaagcccttgctcccaacttttatgttcccgaagcccacttaattcatttaaatttggtataaattgactttaattatggcctttttgttagaatccattatagtcttctcttttatcaacaaatgttggataaagtatgcattcagggaggctgggcatggtggctcacacctgtaatccaaggaggctgggcatggtggttcacacctgtaatcccagcactttgggaggccgaggcaggcggatcataaggtcaggagttcgagaccagcctggccaacatggtgaaactccgtctctactaaaaatacaaaaattagctgggcatggtggcgggcgcttgtaatcccagctacttgggaggctgaggcaggagaaccaattgtttgaacccgggagatggaggttgcagtgagccgagatagtgccattgcactctagcctgggtaacagggcgagattccgtctcaaaaaaaaaaaaaaaaaagggcattcaaggaataggaagacaaagtataatggaaaagtaaatgaacaaaaaggatttaaaaaaacaaatcccaactgtcagattagtggacagtgaaccaatgctctgagtttgttcatcaatctgtggtagaactacaattgtttcctaaagagtggaaaggctttgaataaaagtggagaggtagagagggctctcccaggacaggttgattgcttccgcaaaggcaaagggtctgtaaagtgctaggcgagtgggaacaagtgggaatagttctgtttgactacatttgagggtttgagaaaggaaagggagggtagaagggatggaagtgggaatcacatatgtttaatgatgtcttgttcggtgccaaggacagttttagaccctgataagcggaaagctttgaatactcaggaggtgaatttgggtcatttcatctcctctcttagctgctgtatgaccctgtgccatcctatttatgtttcattttcctatctgcaaaaagggagtaattcttgttcccttgggttttctcctagtcataaaaaatgaatgagttcggccacagtacacaaacaaaaggaaaatatgtaatattttgtaggataaattcataaaagttgtggaggatctgggcacttttataaagcaagcactgtagaaaactttcaaaggaaacatttaaattcactaatgacagctatagggatcctgatttttcctttaaatggcaggcacttcaaaaaattaaaatagaatgtagttagctttcaattacttaggccactgacaattcaatttatggattatatagtattttaatttactcatttcacacgtcgttatcaactctacatgaagtttaaaaggacaaaggatgcaagtggaattggtcagtgttccgggttatttccaagggaggcagagggtggggggtttcctttgagacaagacttggggttggccaataattgctggtattgcctgcctggtaataacaggctgatgaaaaggtgactacaacgtgaaaactggttaaatcaagcgcaccctcccaccctcgttttagatgaggaattttccgccctcacagaaggggctgaggcagcatctggcatcacaacactaacatttgcttcgtgatttcctctttacccggccctttgacacacatcccttcccagaaatcaggattcgctggtgcttttgcatttctaaaatgggaatcccgtggctgagcttttagccggccggaacgactgagggctgcatccctttcccgcaggagcggggctcccgcctccagttctgttccaggcctgactcctccactccctccgtgactcatgtcctgcggatccttcgcccccgacgcgccccccaacacacaaacccccagaatccgcccccagcctacagcgcgacgtcagcccgccccagccgacttggaggtctcgggtctgagtcacacagaaagaccaccctcgtcggcatccccacacacagtccgacacccggcgcgccggcctccccgcctgacacactaacgcccgtcgtctccgcgcaacttgttatgctccggctcgagcccttgacccaaaaacctcagcgaaacggagagccgcagagccggcctcgggcggcctttgatggctttgttattgtttgggtttgaatcgatacgcccctccccatccttcctccctcgcggccctacacccagctcccgcctcccctcacgccccgcgcccctccccctccattttggcgccttttccttcccgccacgtcgtggcggcgtagagaccattctgaccgcgagagctgggcggggcgggggcggggcgcgccgagttatgcagatcaatcggcctctggttggctggagtagcgctggcaggggcggggccggggcgcggccacagagcgcgcggggcgggggccgaggggagtcgcccagtcccgccgcttccccaccccctctcctccctcggccggcccggcagccctgctccccgccttggcctcccggagaggccccgccccgtccccgcccgccgcgccctccccgcgcgccctccccgccggcgcgctcctcccctttactcctggctgcggggcgagccgggcgtctgctgcagcggccgcggtggctgaggaggcccgagaggagtcggtggcagcggcggcggcgggaccggcagcagcagcagcagcagcagcagcaaccactagcctcctgccccgcggcgctgccgcacgagccccacgagccgctcaccccgccgttctcagcgctgcccgaccccgctggcgcgccctcccgccgccagtcccggcagcgccctcagttgtcctccgactcgccctcggccttccgcgccagccgcagccacagccgcaacgccacccgcagccacagccacagccacagccccaggcatagccttcggcacagccccggctccggctcctgcggcagctcctctgggcaccgtccctgcgccgacatcctggaggttgggatgctcttgtccaaaatcaactcgcttgcccacctgcgcgccgcgccctgcaacgacctgcacgccaccaagctggcgcccggtgagagcaccccccgcctccggcccggggatgcggggcggcggcgggatctcctgggtggggagctggcggctcgcgggccggcactgagtccccgtgcttccccctttcctaggcaaggagaaggagcccctggagtcgcagtaccaggtgggcccgctactgggcagcggcggcttcggctcggtctactcaggcatccgcgtctccgacaacttgccggtgagtgggcgccccgcggtggggagggcgcgccgggcggggggcgcacgggcgtgctttagcccggacgagggaacctgacggagaccctgggcttccaggtggccatcaaacacgtggagaaggaccggatttccgactggggagagctggtgagtgccctgcaggagcgacccccaggatgagtgggtggggtgaggggcgcccccgactcccgccctaacgcggccccctcgcccctgcagcctaatggcactcgagtgcccatggaagtggtcctgctgaagaaggtgagctcgggtttctccggcgtcattaggctcctggactggttcgagaggcccgacagtttcgtcctgatcctggagaggcccgagccggtgcaagatctcttcgacttcatcacggaaaggggagccctgcaagaggagctggcccgcagcttcttctggcaggtgctggaggccgtgcggcactgccacaactgcggggtgctccaccgcgacatcaaggacgaaaacatccttatcgacctcaatcgcggcgagctcaagctcatcgacttcgggtcgggggcgctgctcaaggacaccgtctacacggacttcgatggtgagccaggcccgggagggagctgcccaggtgactcggcccggcccggcccagtccggaggcctcggccagtctcccgcgccagccttttgtaaaggtcattgggccgcctggctcgatgctagccggggtgggacgcaggagagcctcccagcgtagtaaagccggggattttcagccagctgaacctgtaatgtttctggcatgattttattcttcaagtggaattcagttagttccaggctttcccgatgaataagaggttgtgggcaaccggcggtagcccagatttttctaaagtctgacccagtttccccgccagtaaaaggatgggggcgggggaagaggtggaaattgatgccggttttgtaatttttgttttattttataagggagttagttttctgtatggtagttttagagctgcagttcttaactcctttctgatctagggaaggttaaggaataggaactatattattactggtggcttttttttttctttagtgttaaggggagagagagtcaggaatgaatgttgtgaaataagatctgtcgctggtttgaaaattagttgggtgtctccgcagagaggatgaaaacctatcctagggaggggcttggagcgggttctttcagaaaagaaggaatggagagcctgagatcaaagctgcggagggtgggtcatcatctgagcggcttaacctaacaaacgacagcctttcaaaacttgtgactcgggcttgtggtttatgtttatttgcccttggaggacgctgggttgggctgcattttttgtatttaacagttaatggctggccgggtcctcccatgttttttctttcaagtctttgctgccccctggtgagcaccagcggcatggcccctcctttttcttttactacccaaagtttgtaaacaggaatcacgtggtctgaaaccaaccctgcagctctgtctacctttccagtctagggaggaaagggtgtgggtgtctgctcctgcttgcatcgggtggggaggaaggcctcccaaagggcaccctgacttaggatgttgtgcaagcatccttgcttggatcctgtcggccatgagaatctcacccgggctcctgggcagtggtgaatgcaatttaaggatagtctatgagatacctttcttggttgtgcagacatgcatcccttcatccttcgcaggcggtcctgcctcacagggcctcaagttttgggtctgcggccagctgtgtttgtttcttggagcagttcataaagaatttcagtttatggtttgggctagcagagaggtgggtaatgctttgggttggagagatgccgtaaggtgcgcctccactctccttagcccagagggaaaaatggagttcacctagctcctgagagaagggattttttttttttttaaaagaaagagttatatataccacccagcttctttgtgcttgtttttgctaaaagtgtgttttctcttctattcccttggctcacagggacccgagtgtatagccctccagagtggatccgctaccatcgctaccatggcaggtcggcggcagtctggtccctggggatcctgctgtatgatatggtgtgtggagatattcctttcgagcatgacgaagagatcatcaggggccaggttttcttcaggcagagggtctcttcaggtaactgatggaaacccctggccatggggttattggtcttaatggggctattagtcttcatgggacagtctttgaaattctggagagcttcactctccagtagattctgtcacccttggcttagaattgtaggtgagtgatttacacttgagctggcctcataaatcacatggtttgcacttgagctttccttgggaggtcagaggaaggcatgtgtgagcatattaagaagaaaagacaatctggcttctccaaaaacttttttaaaggtaccaacagaaacctgataattcctggctgttttgccagggagtaaaaagttaaaagctcttttagcatcttctttaaggcagcagctccaaatattttggtaccagtgacctcactgtgggtggtgttcgtgtttgtaagttggtaggtgaattgaatcatttcatcatgctcagtggtgtctcatcaaaatctcttgtcatcatccttcctatttctggtgagtgggtgttgtgggaaaggcccccactattgaagtttgaaaaccacaggtttaagaggggagtcagtttttagctgaaagcagactggaggacccagatattagtcaataccttcctattgaagggtacccagcacagtgttctagaaaatgcttggcctccctgggaccccagacttgtgggcctctgagaagcaaatggggaagacctttgcagtgtaaaaacaagttgagtcattcataacctcgtctatcctcctttctgcagaatgtcagcatctcattagatggtgcttggccctgagaccatcagataggccaaccttcgaagaaatccagaaccatccatggatgcaagatgttctcctgccccaggaaactgctgagatccacctccacagcctgtcgccggggcccagcaaatagcagcctttctggcaggtcctcccctctcttgtcagatgcccgagggaggggaagcttctgtctccagcttcccgagtaccagtgacacgtctcgccaagcaggacagtgcttgatacaggaacaacatttacaactcattccagatcccaggcccctggaggctgcctcccaacagtggggaagagtgactctccaggggtcctaggcctcaactcctcccatagatactctcttcttctcataggtgtccagcattgctggactctgaaatatcccgggggtggggggtgggggtgggtcagaaccctgccatggaactgtttccttcatcatgagttctgctgaatgccgcgatgggtcaggtaggggggaaacaggttgggatgggataggactagcaccattttaagtccctgtcacctcttccgactctttctgagtgccttctgtggggactccggctgtgctgggagaaatacttgaacttgcctcttttacctgctgcttctccaaaaatctgcctgggttttgttccctatttttctctcctgtcctccctcaccccctccttcatatgaaaggtgccatggaagaggctacagggccaaacgctgagccacctgcccttttttctgcctcctttagtaaaactccgagtgaactggtcttcctttttggtttttacttaactgtttcaaagccaagacctcacacacacaaaaaatgcacaaacaatgcaatcaacagaaaagctgtaaatgtgtgtacagttggcatggtagtatacaaaaagattgtagtggatctaatttttaagaaattttgcctttaagttattttacctgtttttgtttcttgttttgaaagatgcgcattctaacctggaggtcaatgttatgtatttatttatttatttatttggttcccttcctattccaagcttccatagctgctgccctagttttctttcctcctttcctcctctgacttggggaccttttgggggagggctgcgacgcttgctctgtttgtggggtgacgggactcaggcgggacagtgctgcagctccctggcttctgtggggcccctcacctacttacccaggtgggtcccggctctgtgggtgatggggaggggcattgctgactgtgtatataggataattatgaaaagcagttctggatggtgtgccttccagatcctctctggggctgtgttttgagcagcaggtagcctgctggttttatctgagtgaaatactgtacaggggaataaaagagatcttatttttttttttatacttggcgttttttgaataaaaaccttttgtcttaactcgtggcttctaatcgtctgtgcggaggcattgctaacctgcatttattgagcatttggtaagtgccaaagaattgtaggagaaaggaattctcagcctaaatctggcttccttcaacattgggatttctaggatagtcatcttcctgaaacgaatgtatggtcaaggggtaggaccagtattgtcaaaatttgggcaatatctggcatgggaggcctaataaaataaccttttccagattacaattttaaagctatgcaaataggatagatgtgacaattttcaagtgttcaatagccatttatggctagtggccacctcatataaaacatcattgcagaaagttctattggatggggctgatctagagataacaaatacatacctattaccaaactaacccttgaagcttttatcagttgtctgccactgatagtaaaacattttgagcatgtccccttggtacacgtgaagtttattgaaaaactattgcctctattactctcggttcctgattcaagtttccttcacctttagtgtgaggtttagtttcttttcgagactgagtctctgtcaaccaggctggaccagctggcgtgccactgccagtggcacgatctcggctcactgcaactttcacttcccgggttcaagcagttctacctcagcctcctgagtagctgggattacaggcgcccgctgccacgcccagctaatttttgtattttagtagagacagggttttaccatgttggccaggctggtctcgagctccttgaccttatgatccgcctgcttcagccacccaaagtgctaggattacaggtgtgagccatcgtgctccgcagcctttttttttttttttttgagatggagtgtcgctctgttgcccaggctggggtgcagtggtgcaatctaggctcatcgcaagctccgcctcccgggttttaagtgattatcctgtctcagcctcccgagaagttgggattacaggcatgtgccaccaggccagctaattttgtattagtagatacggggtttcgccatgttggccaggctggtttggaactcctgacttcaagtgatctgcctgccttggcctcccaaagtgctgggattacaggcgtgggccaccgcgcctggcctagtctttaacaatagtataatttattatgcagcatagaaaaaataatagaacggtgtggtgacactaaagtcgtgaccagataagacccagtctacaaaaaataagtgaaaattagctgagcgtggtggcatacacctgtagtcctacctatgcaggaggctgaggcaggaggatcgcttgaacccaggagctccaaggttgcagtgagttatgatcacgctattgcactccagcctgggcaacaggtaaccccacttaaaacacacacacacacacacacacacacacacaatagtggatgggtagaaatgtgagtttgacttaaggtttccccctctgatgtgtttgacaaagggctaatattgggagtaggtgaaatgttagctctgccattttcttactgcttattcttgaataattagtatttttagtccatggtttctttgcagggatctgtttaataggccctttgtccattttgtgtgagtttagttaaactggatggcaagacccatgaatccactttgtacgtgtggcctgaatacatcctgatattttgaaagcacactggagtgccattgtcaattcatatattaagtattggtaaatgttggtttcttgtttctttataaatatccacagttataatactccctccctgggggtcatcatgctcccaaccctcaatgcatccacacaccctttggacactggcccatatgcaccctcgaggttgctggagggtgcagactataatacccctcactcctcattgggttctggtgtatgtctacccttaagcttagactagatcccatacctcagctcagcccccatgtggctataaagaggaaggaaggatgtcttggttctggggggctgattttctgaggttccccttttctctaatctctcccatcccccacacaacatacacacactaccaacatcttggagcctgagggttgcatgcttcgtcctttccagtaaagctgacacttggataattaaaagttgccgcaaactattaacgaaatcaggcaaagccccacccttctctttctcgaagtgagtttctggcagtttccccatctaatgagactgctgcgggggaatagaagaaagtatctctgaataaagacagatcgtgctcctgttggatgcaagagattaagagttttagggggagggtgaaaggtcatatttaatctcttctcaggggcagtttgacatctagcgtggaaagggaatcagataaccaataagtctgcgggggatcaatgtcatggccagaggaatatagagagcaatggttaaaagcattgacttgggaatcagccttgagcttacttatctagaaaccttgggcaagttattacaccctctaaaactaatctctaaacagagatactcctggattggattattaggagactgggttaaataacagatatacttacatacagaaaaactactatctcccgcttacggatgcatacacatgtagcaaaagtacaaagaagtacagggtggggtagggtgtggtagttcacacccataatcccagcactttgggaagacaaggagggatgatcacttgagcccaggagtttgagactagcctggccaacatgacaaaaccccatctctacaaaaaaatagaagcattagccggacgtggtggtgcgtgccggtagtcccagctacttgggaggctgaggtgggaggatcaattgagtccgggagatggaggctgcagtgaaccaagatggcaccacaacattctagcttgggtgaaagagcgagaccctgtctcaaaaaaacaaaacaaaacaaaacaaacaaaaaagtacagggtgataataagtttccagagtcagggaagtggttattacctttggggagaagggagggaggttgtgatttgtggaaagagaccttcaactattttggcaatgctttattccataaactagatggtatgagtaaggtgtttgtattattcttttcaacttttgggttgttttaaatgttttatgataaactttatttttaaaaatttttctctggctgggcgcggtggctcacacctgtaatcccagcactttgggaggccgaggcaggcggatcacaaggtcaggagatcgacaccatcctggctaacacagtgaaaccccatctctactaaaaatacaaaaacttagccaggcatggtggcatgtgcccatagtcccagctacccaggaggctgaggcaagagaatcgcttgaacccaggaggcggaggttgcagtgagccaagatagctagccactgcactccagcctgggcgacagagtgagactccgtctcaaaaacaaaaaaaattttttttctttgttctttctttttaaacatttatttatttattttagctgggagtggtggctcacgcctgtaatcccagcactttaggaggctgaggcgggtggatcatctgaggtcagcagttcaagaccagcctgaccaacatggtgaaacccagtctctaccaaaaatacaaaattagctgggcatggtggtgcatgtctatagtcccagctactcaggaggctgaggcaggagaatcacttgaatccaggaggtggaggctgcagtgagccacgatcacgtatagcctgggcgacagagcgaaactctgtctcaaaaaaaatatatatatttatatatataatatataatatatattatatattatattatatattatacataaattatatattatatatataatatataatatataatatatattatatattatatattatatattatacataaaatatatataatatatattatatattatattatatattatatataaaatatatatataatatatataatattatttatttattttgagacagggtctcactctgtcacccagactggagtgcagtggcataatctcggttcactgcaacctccacttcctgagttcaagcaattctcgtgcctcagcctcccaagtagctgagactacaagcgtgtgctaccacacctgtctactttttgtattgttagtagagatggggtttcaccatgtttgccaggctagtcttgaactcctgatctcaagtaatccacctgccttggcttcccaaagtgctgggattacaggtgtgagccactgcgcccggtccattttttttttttcttttgagagacagatttttgctctgtatcccaggctggagtgcagaggcatgaacttggctcacggcacccaggttcaagcgattcccctgcctcagcctcccaagtagctgggattacagggacctgccgccatgcttggctaatttttgtatttttagtagagatggggtttcatcttcttggccaggctggtgtcaaactcctgacctcaggtgatccgtccacctcggcctcccaaagtgctgggattacaggcacgagccactgtcctcagcctttcactttttcttttaattgagacagggtctcactacgttgctcaggctaatctttaattcctggcctcaagtgatcctccctccttggcctcccaaagtgctgtgattacaggtgtggaatatcatgcccagcctatgataagcttttaaaagtgatgaatatatttgtgcgtatcatgtaggaggcagcagatggagttattactgcccttggctgaggggatctgggaaggcttcaaagaggaggtggcatttcacctggattttgaaggatggagccttagcctgcttccctgtaaaataggcaccaaacatgcagatggagcagagaaatctggatgtgctaaatgtttttcccccactagaccaggaatcagcaaactatggcctgctgcctgaactggtccctgtacagtttttgtacggcttgcaagctaagcctagattttacatttttaagtagttgaaaatcaatcaaatgaagaataatatgttgtgatatgtaaaaattatataatacttggctgggtatagtggctcatgcttataatcccagcactttgggaggccgaggtgggaggattgcttgaggccaggagttctggaccagcttgggcaacctagcaagacttccatctctacaaaaaataaataaaaattagtcaggcatgatggcctagctacttgggaggctgagacaggaggatcacgtgagcccaggagtttgaggttacagtgagctatgatctcaccactgcgctccagcactccagcctggttgacagagcaagactctatctctaaaagaaaaagaaaaaaaaagaggccaggtatggtggctcatacctgtaatcccagcactttgggaggcttaggtgggcggatcacctgagatcaggagtttgagaccagcctggccaacatggtgagaccctgtatctacaaaatacaaaaattagcccagtgtgttggtgcctgcctgtaatcccagctaccagggaggctgaggcaggagaattgcttaaacccataaggtggagcttgcagtgagccaagatttctccattgcacgccagcctgggcaacagagtgagactgcatctcacaaaaaaaaaaaaaaaaaaatatatatatatatatatatatatacacacacacacacatttgtacacacatatgcaactcaattgtctgtgttcataaataaatcttgtccatttacatattgtctatggctgcatttgtgatacgatggcagagttgagtagttaagacactcagtatggctggcgaagctgaaaacatttactatcttgtcctttacagagaaatttgctaatctctacactagattatggtcccattgactcattttttgttgttgttgtttttttggggtttttttttttgagacagggtcttactccgtcatccaggctggagtgcagtggctcgatcagggctcactgcagccttgactttccaggcttaagcaatcctcccacctcagtctcctgagtagctgtgactacaggtgggccccactgtgcccagctaatttgtttttttgtttgtttgtctgtttgtcttgagacagggtcttgcaatgttgcccaggctggagtgcagtggtgcgatcacgacacactgcaacctcaacctcctgagctcaagtaatcctcttgccactgcctcccaaagtgctgggattacaggcatgagccattgtgcctggtctgaactacatctttgataactctttttttttttctttttgagatggagtctcgctctgtccccaggctggagtgcagtggcatgatctcggctccacctcctggttcaaacattctcctgcctcagcctcccaagtagctgggattacaggcgcctgccaccacgcctggctaatttttgtttttgttttgttttgttttgttttgagatggagtctcactctgtcacccaggttggagtgcagtggcaccatctcggctcactgcaagttcagcctcccgggttcatgccattctcctgcctcagcctcccaagtagctgggactacaggcacccaccaccacgcccggctaattttttttttttttttttttggtatttttagtagagacggagtttcaccatgttgtccaggatggtctcaatcttttgatcttgtgatctgcccgccttggcctcccaaagtgctgggattacaggcatgagccaccacgcccggcctgataactcttaacctagtgccaggcatgtagtagttccttagtgataatagctaacatacagtacctactatgtgcccagcactattctgcatgctttgcatgcattaacttatttatccttaaaacaactctatgacactattggaaagtacagggggaaacactgttatttgttttattttattttattttattttgtatttttatttatttatttttttttgagacagtctcgctgtattgcccaggctggagtgtaatggcgcgatctcagctcactgaaatttctgcctcctgggttcaagcgattctcctgcctcagccttctgagtggctgggattacaggtatgtgctatcacgcccagctaatttttgtatttttttttagtagagactgggttttgccatgttggccaggctggtctcaaactcctgacctcgggtgatccacccgcctcagcctcccaaagtgctaggattacaggcatgagccactccgctctgcctattttattgttttagagatgagggtcttgtcatgttgcccaggctggcctcaaaatcttggcctcaagcaatactcctgcctcagcctcctgagtagctgactgtacaggtacatgccacctagcccggcttgatgcagttatgtatccacatttcacagatggggataacagatgtgcagagcagtaaatttcatgtcaaaggccacatattaggtagtggtcaggtcagaatttggacctaggccatctgtggttctatggtcatccagactccgcgatcttggctcactgcaaacatttgtgtggattagccacctcaaggtcccttcagggcccaggatctggaggtgagaatggttcttccccagactccagagttgggtaagccattctgttctgtggaaatagtcattatgaactcctgtaaactatctttcacttgggcctggctggggaggaagagttggaggctgaaaagggagaagaaaggggacccgggggggttggggtggggcaggggcacatttcttgtaaatgttgctcagctccttcaactgctgtgctggttcttggaaaccttcaccacaaaagacctatcaagaacagtgttaaaaaagatatggcctcatcccccagttcatttcctgcccagccttgcactactaaccccgattgccaagagcaaggttgcagtgtcccctcagcagtgctgtgggaggaagtgcaaaaataagcagaactaggggcaagaccagaggactgtctttatttttatttattataacaggacatccgatgtacagaagtggattcatcataatccttggctcatcgtatattctcatccttggtccaagaatggtcttttgtttatatatatatatatatatatatatatatatatatatatatatatatatatatatatatatatatttttaaatcggagtcttgtcacccaggctggtatgcaatgacgtgatctcggctcactgtaaccttcacctcccaggttcaagtaattctcctggttcagccttccaagtagctgggattacaggcgcctgccaccacgcccggctaattttttgtatttttagtagagacaggtttcgcaatgttggccaggctgatctcgaactcctgacctcaggtgatccacctgcctcggcctcccaaagtgctgggattacaggcgttagccaccgcatctggcccgttattattatattttatcatactgggtagtgaatccaccacccagctcaaaaaacagaatattaacaatgacatccatctatctatatgatcctctcttagtccatttcttacctcccccagatacaacccactgtcctaaattttgtgtttggcattctcttactttatattttatttatttattttgagacagagtctcactcttgcccaggctggagtgcagtggcatgatcttggctcactgcaccctcatcttcctgggttcaagcgattctcctgcctcggtctccgaagtagctgagattacaggcatgtgccaccatgatttttgtatgtttagtagagacagggtttcaccatgttggtcaggctggtcttgaactcctgtcctcaggtgatctgctcgcctcagcctcccaaattgctgggattacaggcataagccaccatgcccggcttatttatttatttactttgagcttgtcacccaggctggggtagtcgcgcaattgaggctcactgcagcctcaaattcctgggctcaagtgatcctcctgcctcagcctcccaagaagctgagacacagacatgttgccaccacaccttgctaatttttttttttttgagatggagtcttgctctgtcgcctcggctggagtgcagtggcacaatctaggctcactgcaagctccacctcctgggttcacgccattctcctgcctcagcctcccgagtagctgggactacaggtgcccaccaccacgcctggctaatttttttgtattttctagtacagacagggtttcaccatgttagccaggatggtctcgatctcctgacctcgtgatccgcccgcctcagcctcccaaagtgctgggattacaggcgtgagccaccgtgcccagcccaccttactaatatttaaattttttgtagagatgggtgtctcactatgttgaccaagttggtcttgaattcctggcctcaagcaatcctccaaactcagcctcccaaagtgctgggattacaggcgtgaccactgtgcccggctaacttttaaaattttttatagaaataggattttgcaatgttgcccaggctggtctcaaatttctgggctcaagtgattcacccgcctcggcctcccaaattgttgggattacggatgtgaggtactgcacctggctaacagcatagcagcattctttcactttaaaataacattttattttataggtatgtatccctaaattatggagtatttagtatttttattttgtcttattttatttcatttcatttttagatggagtctcgttctgtcggccaggttggagtgcagtggtgcgatctcggctcactgcaaactctgcctcccgggttcaagtgatt

SEQ ID NO: 53 - DNA, 2623 bp, Homo sapiens
gaggaggcccgagaggagtcggtggcagcggcggcggcgggaccggcagcagcagcagcagcagcagcagcaaccactagcctcctgccccgcggcgttgcgacgagccccacgagccgctcaccccgccgttctcagcgctgcccgaccccgctggcgcgcctcccgccgcagtcccggcagcgcctcagttgtcctccgactcgccctcggccttcgcgcagcgcagcacagccgcacgcaccgcagcacagcacagcacagcccaggcatagcttcggcacagccccggctccggctcctgcggcagctcctctggcacgtccctgcgccgacattctggaggttggatgctcttgtccaaaatcaactcgcttgcccacctgcgcgccgcgccctgcaacgacctgcacgccaccaagctggcgcccggcaaggagaaggagcccctggagtcgcagtaccaggtgggcccgctactgggcagcggcggcttcggctcggtctactcaggcatccgcgtctccgacaacttgccggtggccatcaaacacgtggagaaggaccggatttccgactggggagagctgcctaatggcactcgagtgcccatggaagtggtcctgctgaagaaggtgagctcgggtttctccggcgtcattaggctcctggactggttcgagaggcccgacagtttcgtcctgatcctggagaggcccgagccggtgcaagatctcttcgacttcatcacggaaaggggagccctgcaagaggagctggcccgcagcttcttctggcaggtgctggaggccgtgcggcactgccacaactgcggggtgctacaccgcgacatcaaggacgaaaacatccttatcgacctcaatcgcggcgagctcaagctcatcgacttcgggtcgggggcgctgctcaaggacaccgtctacacggacttcgatgggacccgagtgtatagccctccagagtggatccgctaccatcgctaccatggcaggtcggcggcagtctggtccctggggatcctgctgtatgatatggtgtgtggagatattcctttcgagcatgacgaagagatcatcaggggccaggttttcttcaggcagagggtctcttcagaatgtcagcatctcattagatggtgcttggccctgagaccatcagataggccaaccttcgaagaaatccagaaccatccatggatgcaagatgttctcctgccccaggaaactgctgagatccacctccacagcctgtcgccggggcccagcaaatagcagcctttctggcaggtcctcccctctcttgtcagatgcccgagggaggggaagcttctgtctccagcttcccgagtaccagtgacacgtctcgccaagcaggacagtgcttgatacaggaacaacatttacaactcattccagatcccaggcccctggaggctgcctcccaacagtggggaagagtgactctccaggggtcctaggcctcaactcctcccatagatactctcttcttctcataggtgtccagcattgctggactctgaaatatcccgggggtggggggtgggggtgggcagaaccctgccaatggaactctttcttcatcatgagttctgctgaatgccgcgatgggtcaggtaggggggaaacaggttgggatgggataggactagcacattttaagtccctgtcacctcttccgactctttctgagtgccttctgtggggactccggctgtgctgggagaaatacttgaacttgcctcttttacctgctgcttctccaaaaatctgcctgggttttgttccctatttttctctcctgtcctccctcaccccctccttcatatgaaaggtgccatggaagaggctacagggccaaacgctgagccacctgcccttttttctgcctcctttagtaaaactccgagtgaactggtcttcctttttggtttttacttaactgtttcaaagccaagacctcacacacacaaaaaaatgcacaaaccaagcaatcaacagaaaagctgtaaatgtgtgtacagttggcatggtagtatacaaaaagattgtagtggatctaatttttaagaaattttgcctttaagttattttacctgtttttgtttcttgttttgaaagatgcgcattctaacctggaggtcaatgttatgtatttatttatttatttatttggttcccttcctattccaagcttccatagctgctgccctagttttctttcctcctttcctcctctgacttggggaccttttgggggagggctgcgacgcttgctctgtttgtggggtgacgggactcaggcgggacagtgctgcagctccctggcttctgtggggcccctcacctacttacccaggtgggtcccggctctgtgggtgatgggaggggccattgctgactgtgtatataggataattatgaaacacagttctggatggtgtgccttccagatcctctctggggctgtgttttgagcagcaggtagcctgctggttttatctgagtgaaatactgtacaggggaataaaagagatcttattttttttttatacttgcgtttggaataaaaaccctttggcttt

SEQ ID NO: 54 - DNA, 942 bp, Homo sapiens
atgctcttgtccaaaatcaactcgcttgcccacctgcgcgccgcgccctgcaacgacctgcacgccaccaagctggcgcccggcaaggagaaggagcccctggagtcgcagtaccaggtgggcccgctactgggcagcggcggcttcggctcggtctactcaggcatccgcgtctccgacaacttgccggtggccatcaaacacgtggagaaggaccggatttccgactggggagagctgcctaatggcactcgagtgcccatggaagtggtcctgctgaagaaggtgagctcgggtttctccggcgtcattaggctcctggactggttcgagaggcccgacagtttcgtcctgatcctggagaggcccgagccggtgcaagatctcttcgacttcatcacggaaaggggagccctgcaagaggagctggcccgcagcttcttctggcaggtgctggaggccgtgcggcactgccacaactgcggggtgctacaccgcgacatcaaggacgaaaacatccttatcgacctcaatcgcggcgagctcaagctcatcgacttcgggtcgggggcgctgctcaaggacaccgtctacacggacttcgatgggacccgagtgtatagccctccagagtggatccgctaccatcgctaccatggcaggtcggcggcagtctggtccctggggatcctgctgtatgatatggtgtgtggagatattcctttcgagcatgacgaagagatcatcaggggccaggttttcttcaggcagagggtctcttcagaatgtcagcatctcattagatggtgcttggccctgagaccatcagataggccaaccttcgaagaaatccagaaccatccatggatgcaagatgttctcctgccccaggaaactgctgagatccacctccacagcctgtcgccggggcccagcaaatag

SEQ ID NO: 55 - DNA, 47493 bp, Mus musculus
  misc_feature (1241)..(1975): "n" at positions 1241 to 1975 can be any base
  misc_feature (13629)..(13648): "n" at positions 13629 to 13648 can be any base
  misc_feature (15882)..(16151): "n" at positions 15882 to 16151 can be any base
  misc_feature (22065)..(22084): "n" at positions 22065 to 22084 can be any base
  misc_feature (26226)..(26285): "n" at positions 26226 to 26285 can be any base
  misc_feature (30454)..(30473): "n" at positions 30454 to 30473 can be any base
  misc_feature (31687)..(32259): "n" at positions 31687 to 32259 can be any base
  misc_feature (40899)..(41095): "n" at positions 40899 to 41095 can be any base
  misc_feature (42909)..(43118): "n" at positions 42909 to 43118 can be any base
tgagctgttgatcacatgctgcatttagagagagttctgggactaaagctcagagagaagacacaggcccatggccagagaggccttagctatgtgggccttgccacctgtacccaggagcacaccactccctttggaaagagcacccttctaacacctatcatcaaagtcaagcagacccagtcagtacagcttcctttctctcccctggccttgctcttttgccctttgcagccaaccagtgggttgagttgagtggatgcccgaacagagtctttccagtggacaataggcgctgtactgaagcatggtggacgcggggacatgtttgaatatttctgatactttcccccatcccaccatgtgacaaccttccagctctgagacctagaggaacctggcctctgcctctacctaggtctccctccagggctccccaggtgacaccctcgaggtgtctgatacattagtgcttccacattccttcaccagcagaacgtgccgctgccgcccagagaggctggcaaacacatggccgccggcgcgggagcctcccgcctgccaggactcgttcaaagtatgtgtcagtaatcctgctggcccggcggggcaggacaggcgctggctgggaaggcttcaggcagggccctgtgctgactggagtaaggacttgggacccctccccaactcagaaagtgctggatcctcaaggagggcttccattttctggggatgctgtccattcgtgggaaggcagcggattgttggggatctcaggaacacaggtaccgtggggacagctctccatctgaatggttcctggacagccccattcaaaagaggacagtgtgctttgtccatgaacagagtgagtcccataccctgggtctcaggtatgagtgtggaagcctggtgatgtcactgagaggcccagtgctccagagagaaaggcctgagtgggacccacagcattctggcccaggacccttatcaacagagacttctctactcatgatcctccttgttccctctgggcctgggcagagccttaggaaccctacctgctaggatccaactcagtgcttactgtgcctgattccatgccagcagcggataagagaagtcaggcaagcaaggcacttcctgcaccagatatagatgcagggagaggtggacagacacagtcccagacaggcaggtagcgctcgcacacacacacaaacacacacacacacacacannnnnnnnnnnnnnnnnnnnnnnnnnnnnnnnnnnnnnnnnnnnnnnnnnnnnnnnnnnnnnnnnnnnnnnnnnnnnnnnnnnnnnnnnnnnnnnnnnnnnnnnnnnnnnnnnnnnnnnnnnnnnnnnnnnnnnnnnnnnnnnnnnnnnnnnnnnnnnnnnnnnnnnnnnnnnnnnnnnnnnnnnnnnnnnnnnnnnnnnnnnnnnnnnnnnnnnnnnnnnnnnnnnnnnnnnnnnnnnnnnnnnnnnnnnnnnnnnnnnnnnnnnnnnnnnnnnnnnnnnnnnnnnnnnnnnnnnnnnnnnnnnnnnnnnnnnnnnnnnnnnnnnnnnnnnnnnnnnnnnnnnnnnnnnnnnnnnnnnnnnnnnnnnnnnnnnnnnnnnnnnnnnnnnnnnnnnnnnnnnnnnnnnnnnnnnnnnnnnnnnnnnnnnnnnnnnnnnnnnnnnnnnnnnnnnnnnnnnnnnnnnnnnnnnnnnnnnnnnnnnnnnnnnnnnnnnnnnnnnnnnnnnnnnnnnnnnnnnnnnnnnnnnnnnnnnnnnnnnnnnnnnnnnnnnnnnnnnnnnnnnnnnnnnnnnnnnnnnnnnnnnnnnnnnnnnnnnnnnnnnnnnnnnnnnnnnnnnnnnnnnnnnnnnnnnnnnnnnnnnnnnnnnnnnnnnnnnnnnnnnnnnnnnnnnnnnnnnnnnnnnnnnnnnnnnnnnnnnnnnnnnnnnnnnnnnnnnnnnnnnnnnnnnnnnnnnngggagccttggcccagggaggccagtgctggcccaggctgggctggcctgctgcccatctcccagtcctggaccagcctccttcctctactgcatgtcacagccagcgtctctgctatatccctggccaggtgcccggcctttcaacaggagcaagggaaggaggagggagaaaaaccattagtgtttgccggctgcaggcgtggctcacgtggctgcagccacaggatgaaactcctagtctaaggatggggctatgttccaaaacatagcgagctctaagtagacggcgatgcctacccctttaaagacaaactaggaacaagtaataaaaaattaacagcattagtgaaaatgaaagcaagaggagtctgagatctgattggcataacacgggcattttcactggtgtggcttgttcttgtttgacacacacacacacacacacacacacacacacacacacgctcgcgcgcgtgcgcgcgcatgcttttgtaaggataaaaagtttcagcctcactttctaaggcatagtttaaacatctgcattttgggatcattttgagggcggcctcagcagttacctgaggtctgaagtgcttagggtccactgcctaactttggctgccagtccttctgctaggacccaagaaaaggcttggggtggggtggggtggctggacctttcagagaaggaatggcaggagaacactaattttatttggtgggggtttgtccagaggaccttacaatgtgatgtcaagttggacagttaaaattctagctgaaagtaagattgtaggcttctcccaagaggctgtcctccaccctggttggcagagagaggggaaatggaatgaattcctcccaccgtgaatcacaaaggccaggtgcagagaaatgggtgcagcgagggtgtgcctcctcccagcttctccccaggcccaggcagggccctcctgccctagctgtttccatcaccccaaggcagggttcagaccttacggtgacctcacaactggaggagctggatgtggattggaagtgactggttacagggtcttccattcttaatgctcttcctgggcaaaagataagggctcagcctaagtcaggacacggggtcctttgagtaacctgagggttctctgtctttgtctgcacatgggtttacacacgttagagggattctgtgtgaaaggggagggaagagttcatacaacactcctggaggctcagggcgggcccaggggctcaggaaagactaggtgcgttctggatgggatgaagacccccgtttgtctggctggtagctgtctcttgggccttgtaagcaggcaagggcgactggctaactgccagggctcaggtcccactggtccctgtcccttctccaactcctgatatctcttgggggttggatctgataaatattggcctttaagagagagcaatggctcaagagggcagtggaatttcagatgtctaggggaaattatgtctatcattaagttctgggagaatcaggtggagaaagcagaaaaggcaggtggcaaaggccaggtcagggcccaggaaggcactcaggtgtttcgagtttggactcaagccttagcaaaatgcttgtctttggagtatctttacagttatggaatgtcaggctagaagagacctcagatcagcagcttaaaactgtgtttctgtcactatgctccaaccctacggttggtcacctacggttcagctagggacactgaggctccaagagtctcagagggcagaccagaatagaccagcacagtgatgagatgatgagatgagtcctcacagttaagatcattgctctcatctcccttggtgactctcccttgatggaagtggtcctgtaagtgaagcctgcctcttttgtaacactgtctcattttgatgtgctagctgcacagttcggcttgatgcatttctctgtattggactcattcatgaatgttactttgcttaatacattttaagactattacagtgtatcagggccaagaggatggctcagtcagtagattatgtatctgttacacaagcacaaagacctgtgtttgatccttaggacacacataaaaaaattatctggtagtatagttttgaaataccagtgttgaggatggaaagacaggcaggcccccgaagttcactgaccagccagcctagcctaaaataagctataggttccaatgaaagaccctataacaagacatagttcctaaggaacaacatacaggattgatccctgcccatctagtgcatgtgttcacacctgaacaggaatgcgtgagggggtgcccttgggagccagtgtgccttggggaccattgtttttgccatatcaacctgaagtcttgatataggctccactcaccaagccttggtttcttgtcccaggtggtcttgggtcgcacctgtcctagtttgtcacatacagggtctgtgaacatatcactcgtgagctccacccagggcaactggagctgagggtgggcagatatgggaatgggacaatgatgagagatctgaagggacacacacagcaagagatgatctgtggaaaggtcctgagtagcatcaggaaggggcagctgtccacaggctaagccaacaagcttgtggcatgtcgttgtgtcatgtgcccctggagcttggacacaaggtgcctaaaaggtggcatctcccagagatgcctttttgttctgggtgttgggactcaggtaggggtagaagaatccagtgcagtgagaaggacagtgctgtgccccttggttcttgtcagagcagagcagatgccccagatttaagaacttttgcagctcaaggtgtcagccagaccaggaagccacttctaacctcactcgcattgttggggctcattttgtgtttttgtaggactgagttctccaggactgggtggctgtggcttagggtagcccctgagagtccctctgtggtctcagagccagaaactcggaggcaaactccatgctttggatccaacttctgaaagcacacatgagtagcataaacttagaactccagactcagtgtatgccccaaagtcctgacattctgggcatagttttggacctcagaactctgggaatacctcagaatttgaggtgctgctagattctgggcttggagaggcttctggggataggggatggagtcaggcagctgtgtgtgctagagagcagctgtactcagcctaagctgtagaaacctggtgggcatagggaccgctgaatcatactcctgtgcagtgtctcagtgctaatctcgtgcccatgctcccaatgggacaagaaataacattctcacccccagctctgctcattgccatgggacctcaccctggatcacaaaaggagatgacacgctgctgttacagccacatcactgagggaagacagctatcatcatagtgggtgagaactggagaagaagttacagatgctgttgctgtttagcgtagcctatagaagtctagcacacacaatagcaggacctccccccgcccctaaaaaattccaccttgctcgccttcctatagctcagctgatttggttcctcatagctgtgctgtctccactttccttctgggctgttttgtttagtttttcattttaaatatattttatttatttattgtatgtgttcatttgcacttgtgcacaggccacagcatgcttggggtggggggttggaggacaacttcaggaatctgttctctccgtccacagtgtagattctagggaatcaatgatgtttgtcaggcttggcaataggcacctttagtcactgaaatctctctcccaccctggaatgtgtcttgatgactgtacaaagggctcctggcactcaccttggagacagtgtcccctcattctgatgttaagaaagagtaaaccagtacatacttgtggtccccggtgagggaggttgagtctaaagaatcatgagtttgaggctagtctgagctacctagcccgggctagcctgagctaggctgagcttgttgcttagtagtagttgcctggctggggcaagtctcattagtggagaaggaggaggagggagagagccaggaaatggtaagttagccagaagtttaggagaacacttgagaaagtcctggggagggtcagaaattcattggctacatgaagaattagagactgggatatatgggactctgtctcaaaaacagaaaaataaataaatgaataaatgtttgactttgtacagctttccttctgtattctgtaggcacaggcttagccagctgaaaattgaacatgtttggaaaaactgggcatggtagcacatgccttcaattccagcactctggaggaggcagaggcaggtggatctctgtgagtttgaggctagcctggtctagagagtgagttccagggtggagtttagttagtagaatgcttgcctcacacacacttgggaagtagagacagggggaggaggattttaaggtcatctttagcaacttagcaaactggaagttagtctgcactacatgagagacagacaggcaggcaggcagacagacagacagaactaaacaaactaatacaaacctaagctgaccatcacagcccagctgaagtccagaagtttatcgaacctcctcaaccctgcctgcccgtctccatcgtatgacagccaccctgttcagtcttcagcattccttcccacaaggcctctgtgcctgggctttcctgatggtccagctctcagggaacaagaaatgatccaggctgcgattcaaggcacttcagaggctcttgggtccagagaatgttctcttccacctttctaagtccatgagagagagcaggagggatcctgctggtgctgcccacaccctggcctcctagctaggggaggtggcgagcagggacctgcccagaggaagggaagcagagaaggctgactcagcatctccagaggaagggggctggggcgctgccatggacctgggaagtcccttctctgccttccttgggggccactcccagcaaggtgggtggggagctgaggtctgaccactccatgccattggaaggagccccctcttcagcagcatcctcttcttccgaacccacatcatcagcacccaggatgagtgctggtttctggcatctaacaaaggagaccacctactcttgggaactggccactggcctaggcagttcctcctgggaagacagaaatggccaggttctggccaggttctctttttctgctatttgagaatggtcatgctttccattgtctctaagtctcctagttaactgcattcacagagtgaagattgtcttctttttggatggatagacagatgcccttaccctctttctgggagctatgaatgtggctcagtgggtagaatgaatgcctagcatctgtgaagtcctatgtttgatccctggcactgcagaggcagatggatctctgtgaatttgaggccagcctgatctacatagtgagctccaaaacagccagggctatgtagagaaaacttgtttccaaaaaaccacaagaggctgggcgatggtggcacacacctttaatcccagcacttgggaggcagaggcaggcggatttctgagttcgaggccagtctggtctacaaagtgagttccaggacagctagggctacacagagaaactctgtctcaaaaaacgaaaacaaacaaacaaacaaaaatagaggaggaagaggaggaggagaaggaagacgaggaggaaaggagtaaggtagggggaggggggacattgcccaggccaaaggaaaatcttgctttgccacaggtaggagagtcttggtgagtgtgggtgcagtgggcagtggggttcatgggtgctgaaagaaggagagctgaagtacttctggatgtgggtaacaggcagagagcagatgagcctgatgggacatgatgggacctctggttttagggtgactagccaaaagtgacaaggtacagcagtggctttccaccttggtctagtttcttcctctctactcagagcacctagccaggcccctcctctctgccatccttgagggcaaggagcacagatcccagtccactccatatggacgtgtctcagctctcaagccaggaccttggacagtgatttcttcatttcccaccaagtgtctgctctccccatactcagaagtgcctctgtggcccatctagtgccaccagggacacacagacagccatggtggtctgtacctagagaagaaagtgctgattccgcctgcaggcagggaggagggcatctctgagccagactaaccatggaggtcaggggcctggagaggagagacagctgctgagagtggaagcaatccccagcctacacagggctggacttcttatgaacgtggggcaaagagaggaaggataaaggagcaaagagcaggctctgtcatggtgtgcacagggatgcacgctgcacctaggccaggcatgtgatgatgtgtgacgcaggtctctggagtatttcaggagataagagaggccagctctatgggaagtagaccacaaggatggatgtgctggggacagccaaatctctgcatgtgagggttctacagtcacagacttagctccagaaaagtcctaagtgtttggaaaagccgtgtacagcaacacagacctgtaatcccaggatgctgagactacacagtgagaaccaggtcagccagtggtacataacaagaccttgtctcaaagaaaggaaagaggagagatgggtgttggaagccaggcccaggggctcgtgcctgtaactccagccagaggctcagaagatcaaggtcggcactggctacacagcaagtttgaagctagtctaggctacatgagaccctgtctcaaaaataagaaaaacaagggctggagagatgactcagcagttaaagatcgctaactgctcttccagaggtcctgagttcagttccaggcaaccacatggtggctcacaaccatctgtaatgggatctgatgccctcttctggtgtgtctgaagagagcaatggtgtactcatgtacataaaacaaataagtaaatctctttaaaaaaaataagaaaaacatgaaaatgaacatggtggggggagagggagagagagaaacactatttgggaaggttgctgcatgtgtactgaccgactgaccgtgtgtgggcttccggtgctggctttccctgcagtgtagtgtgacagtctgtggccttagaatccttgtcatctaggtttggcatggacagaaaggtgtgtggactatgtgcaaataccatgctacttaatacaaaagatccaaatgtctgctgtgagcgtgtgggtacgtgtgtgtgtgtgtaggccaaaagttgatgttggatgtcttccgtcactccccactttgattttcggtacagggtctgtcactgaacccagaactcccctggctgcctttgctccccacctcagtgctatggctgcagacatttgccaacctggtttttacatgggtgctaaggattgtatctcaggtcctcacactcacctggcaggcatttgaccaacaccttcctccccatcccctcctcacatgtttttttagaggacatttgcttctccccctcccccacgcctgagttggctagtgccccactccactgagacacctcagcagccatcctcatcctatgttctccgtcagtgtctgtatcctccaatgcctatagaggtcttagccacaagctgagggtcccaggaatgcaggtctggttcttacacaccgtgagtcatgacagtgtgacatgtggtctacatcctgggtacatggtcaacatgctgtctctaggtgcccttcctgtcggaagcagctccgggccgatcacatgcacatagcccagagtctgtccgtttccagagatggtctcaatcacctccttgtctttccaccaggtccttggctgtgggaccccagtactcctctctgagcactcagcccattctctgtgccagcatcccaggcctggtgcccaagcagctgcgcttctgcaggaactacgtggagatcatgcccagcgtggctgagggtgtcaaagcgggcatccaggagtgccagcaccagttccgaggcccggcgttggaactgcaccaccgtcagcaacagcctggccatctttggccctgttctggacaaaggtaccctggggtggttagggtcatctctatatggacatcataaggccttccaaactctaacctggctgggcttgctcctcccgaccaatggagggccttggagaagaaagggggaggggaagggaaccgtaagcccaccaggcgggcgggagaggcttggagtatgttggggaggtggttcaccagccagcacccctgggctggtttggaaaggagagaccggcaggagagctaggtgttagttagctgctggcaaagagcaaattatcctaaagtgtagtggttaaggcagtaattaccatgtgttgacctcctgctgccgggggtcaggggctgggttggctctgcttcccatccacagggagggaggtccatgggaggctgtctcagcaccagttgctagagagggctctgaagtggggcaaaggcttctttctgtggtctctgggacccaggtctgagacagagagggagacagagatagaggaggcagaatcagagaggcagagaaatagaagagagacaaagatggcagagactgggtgggggggagggggccgaaaggagagagaacacacaccaaatgaaagctttcatgccttgaacaagaagggaaaatcatataatttaaatcactttagaacatacaatctcagcacacttagcacacccacagaattgcgacactaccactcctaattccaaaatattttcatcctctcgaaaggaaatcccaaacccattatgcagtgcccctggcaaccactggtttgcttcctacccctgtggttttcttattctggacatttcctctctgtgtaattatgcactctgtggccctttgtagctggctcctttcactgagtgtgaggtttacaaagttcatctatgttgccacacatatcaatgcttcattccttttgatgactgaatactattccatttcagtgtgtgtgtgtgtgtgtgtgcacgtactcgtgtgcaccttaaattttacatgtcaaaaaaagaattttatatgtaaaagatgatgccatctgtggatttcatttcttttattggtatatgtttattgtattgggttttatgtatatcttcatacacatatagaatgtattttgacctgacttaattctgctgcccaggacatcagtcccctgtgggaccaaagtggagagagtgggtcaaaactctaagcagtggatgtccgtgtttcctgagtcacccagcctttgtgtttgctgcagaggtcaaaatacagcacctgtggctttgcaagcctggctaggaagcatggacactgaactgtccccaaggagaacagcattgtggagaagaggctggggctgggttcctgcagtggtcttcctgtgaccctgaaggtgtttaaattctttcttctggtgaggtcaaagcagatgacctcatgagcctttggggtggaagtaactctgttccctgcagtctgaccctcccctgactttcacttccagcagtccactgtcggcatggctccacccagtcccatcagcctccattcacaagccagctcttcacttcatataatgacatcatgccaccagtcctgaccctatggttcctctgaccccctttcacctaacgtcatgacccaccattgattgtccttcctggtggcattcaccagctcacttccaggggtgttagcgtccctatctataaaatgggaaagtaattgcagcttgcaacttgagagctgtgagtcaggctaattacacagttgctccccacagaacagcactgctgtatacaggggaggatcaagtccctaggccggtacagtttaccaagcatgccttatagtatgtgcacgggtggtccatcctgtgtcttcatgggaatgtgatgtgtgtacgtgcagcagtaaaaatgctagtgtgtacacatgttttcctacatgaccacatatgagcagcacacgtgtattctgttgctttttgtttttgtttttgtctatttgtgttttgttgctattacaatgtacctgatactaataatttgaagagggaagatcgattttggctcttggtttccgagggttcagcccatggttagaagacttcactgccttaggcaaggcagtcacaaggtaactggaatgtgttaccaaaggtttcttccttcactggaaccagaaagcacagaaagcaacaggaaggagccagaggtgaatatctttctaggacataccccaagcacgcttctaccttcttcccccatgagctccctgtctcttaatgataccacgatatcctcactctgtcaagtctgctcattagttccaagctcaggttccaatcacctcaacagtccttcccagacaacactccatttcaaaacatagcagcacgtgtggttatggtatgtacatacgtgtgcacacatggcttcagagtggggctgcactcacatgtgaatctgtgtgcacaggtgtgggaggagctgagagttctacatcttcatctgaaggctgtcagcagaatactcacttccaggcagctaggacaagggtcttaaatccacgcccacagtgacacacctactccaacaaggccggccatgccttctaatagtgtcactgcccaggccaagcatattcaaaccacgacagttgaggagcctttagagatcctgagaagctggcctttgaaggtttctgcctgaagtctgtgctgcagtgaacaagcctgactcccattaccacagacagagcccctccaacctcctgcttctctgtgattgactgaaatgagccaaacattacttctgttgggtattttatcacagcaattataactaatacatccacctccatgggggagtctgtgggagcatgcacacacaccacctccctcacaatgctaaagtgagtctctcacaggagcaaggagggcaccccatgattcgccaactatgtttagagctgaggaaggggcaggcttttatatcctgtcatgctaacagagcgggtagcgctcagtttctcctcttcaccagcactcggtattgttattttcttgcagctgtcttcatgggcgtgagcattttttcttgaatttatcagttatgtgtgccctttataaaaaaatctatctattcagttcttctattcatgttttaataaggttatttctatttagtttgagttttgattatttgtgttttccttaatcatagttttagtttctctctctctctctctctctctctctctctctctgtgtgtgtgtgtgtatgtgaatgcttatgtctgccttggtgaatatgtgaaagtcagacagtccgaatctggttctcttcctaacctgtggatcccagggattgaactcagatcgaattgggttcannnnnnnnnnnnnnnnnnnncaagcctccacaacatggagacaaaaacatgcagacatttaaagtatttttttatttttacttttaaaaaatgtaaaaattcttttagtgtatagcctgtgtatggtttagtgtacctgtgtgaaggtgcccttggaggccaaacagggtccagaccctccctgagctggagttactggcagttgtagctgtccagtatgggtgctgggaactggacttggtcctctgcgagagcagcccatctatcaactgctgactggtctctctagcctcctacaggagtctttaactttgatgacaagtccccaactctctctttggctttttagcgctaagaaaatctggctgaacccaaggtcacagatgtttgctcctccctgagccccccacgcccgagacagggtttttctgtgtagctctgtctgtcctagaactcactttgtagaccaggctggcgtcgaactcacaaagatccacctgcctctgcccctcgagtgatgggattaaagcggtgcaccaccatatcagctacagaaagcctgctttttctgtttcctcgaaagagtcttatagcttcaagccagaagtgatggcatgtggctctattcctactcagcagtcagaaacctgagctctatacatttgagaacaacctggtctatatcctggtctgtatggtgacttccagaccagtcagggctcagctcacagtgcttttacatcaaaaaaaaaaaaaaagaaaagtcctatagcttttaatctgacattaggtctatgattttgttttaatattttgattaaatttatattttgtgtgtatgggtgtttgcatacatgtatgtttatgtaccacatgcctggtgctcacagaggttagaagatcccctgggactggagttatatacagttgttgccatgtggctgctgaaaattgaacccaggtgctctgggagatcagccagtgtttttaacccctgaaccatctctccagccctgcttgatatatatatatatattatgttatttttatttgtggtatgagaatgggatccaacttcatctttttttcttttttaactttggcttgtttgtttcttttttcaaaataaagtttctttgtgaagacccggtcgtcctggaactcaccatgtagaccaggctggactccaacttaaaagagatccatctgcctctgccacgtgctggaatttaaagcttgtaccaccaccacccacctccaacttcattcttttttttattttcatttttatttttttctttttagtatagaatagagtttatttagggcatggggaggggagctaagagagtagtagaggcagagaaaggcggagagaaggagagagtagagaagtggaggccagccatgaccacgtggagagaggggggacaaggggacaagaggcaagagcataagcaagcaaagctccaacttcattctttactgtgttgaaatgcagttattcaaacagcgtttgttataaagagtattgttccttcttgaatggccttagctcactcattgaaaatcacctggctttgtatgtttgcattgatgaacatataggctgtttgctccattccactggtcactgagtattatcatagcagtgtcatgcagttttcctgtctatagctttgtcctgtgttttttttttaaactcaaagttgctttggtatctgaggccgtttatgtatgttatcatatgtatgttaggatccactggtaatgtccgtttttttagacttattatttttagtgtgtacgagtattttgcctacatgtgtgtatgtgtaccatgtgtgttcttggtgctcacagagatcaaaagagaacattggatctgctggaactagagttatagatagtggtgagctgccatgtggtactggaaactgaacccaggtcctctggaaaagcagccagtgctctcgattcctaaaccatctcttcagctcccagttggataaaatcttggagatcttagggactgtgtgggagaaggggggggggagaagaagggggaagaaggagaaggggaaggaagagggagaggaggaagaagaggaggaggaagatgaggaggaagggaaagaggaggaagagaaagaaaaggaggaggaagaggaggaagaggagggagaggagaaaggggagaggagaaggaggaagaggaagcaggagaaagaagagaggagaaggaggaagaggnnnnnnnnnnnnnnnnnnnnnnnnnnnnnnnnnnnnnnnnnnnnnnnnnnnnnnnnnnnnnnnnnnnnnnnnnnnnnnnnnnnnnnnnnnnnnnnnnnnnnnnnnnnnnnnnnnnnnnnnnnnnnnnnnnnnnnnnnnnnnnnnnnnnnnnnnnnnnnnnnnnnnnnnnnnnnnnnnnnnnnnnnnnnnnnnnnnnnnnnnnnnnnnnnnnnnnnnnnnnnnnnnnnnnnnnnnnnnnnnnnnnnnnnnnnnnnnnnnnnnnnnnnnnnntcacagccctactgcatcagtgacacttggcggctcccatctctgagtcttgtacattgttttctaaattgttcccgagcatttcttccattgttatctaccgtgacattcttttctttttaaaaattaattaattttatgtccctgagtgcttttgggcaccactgtcatgcctagtgccaaggagatcagaagaaggtgtcggttttcccggaactggagttacagatagttgtgaactgccacgtgggtgctgggaactgaacctgggtcctctccaggagcaactagtctctctcctgggataaccatctcttagccccatcttgcttttcttactctgtagaccaggctaacttctaactcacagagatcacctgcctctgtcatccaagtgctgggattaaaggagcacacaaggcttcctgctcatcattgttttatttccgttttgtattgtgtttggattgtttgttgctaggaggcagagatttgttgagctcaatgaggtgcagtacaattgaccagctgctccgtgacctggctgaagctattgataggctccaacaggttgtttgttgtctactattggttccttgggctgctctacgcatagggtgatctcacctcttcctcccatgctggatgctctttattcctttacttgatatccagggtgagagcatccatattttcccaaccttgaagtgactgctttctgccttccccatagacagtgatagctgtgggtccatccaggttttaattttgtagattcagaagtaagaaccctttactcgtgtataagtagataaaggatttttttaaaaaaatattttatttatttttattttgtgcatatgggtgttttgcctatatatacacctatgtgccacattcatgcagtgttcacagtgtccagaagagggcgttgagtccctggagctagcgttaaagatggttgtgagacaccatgtgggtgctgggaatagaacctggggcctctggaagagaggccagtgctctttaatggctgagacatcgctctagcccttaaagttagcagtgttttaaattttatttgttttacacacacacactcatgcactcacacatgtgcgcacacacatgattgtgtgcacatgtgtgaacatgtatgcaagtgtctatggagaccagaaaggatcattggatcctctggaactggagttacagatggtcatgaagagccatttgggtgttggatcttctacaagagaaatacacactcttactggctaagctatctttctagccctgagagtttgttttcaataatccattcttttgatcttttggaattataccaacattttaatgacaatctattatcaaaaggtttatagatggggcatagtggtatacatctttaatcccagtacttggaagtcagaaatagatggatctttgtgagttcgaggccagtctggtctacatagccatgtctccaaaataaaacaagttctccaaattcatgagcacacaactcaacttcattttatttatttgtttccttgcttagagatagcatcttactatgttgtcttggttcttattgaatgccccagttcaatgaatcctactgcctcaaccctctgagtagctgaggctacaggcatgggccacccattcattttcctttcttaagttccacggcaaacataactggaggtgagcagaatttcacaaggtgctgtaactagcggcaagcacctctttcttgatttctaggacaaattctctggggctaagcacattctagaaagatcgagaaatcgtccagaaccagagctgggacacgagaggctctccagtggatatgtatatgatggcaagcgctccatcccacgctgcagatgcacacaacctatgtgctttcagtcagcactctgctgggcagccccggtgctctagcctatgcattttgctctgtgaatgtgtcagatgactgaaagacaaggggctggtgcctgggaatatcttggaaggcttccttggggaagcggctccaaactctttgggcagacagtagtatggttgtggggagcccaggggtgagagaaaaaggagcaggggaaggcagtggggctcagcagtctgactaaactggagcctgaggcaccgtggaggaagagagaggatggctgtgcctgaggctagagccccgtcacataattttgggcgaggttaggggagctgcagaatgttgagggtctcccagtatgctcttgggcaaacacaggctgtctagggacaagcagctgccacaggtcctgccctagagagcagatagtcacatcagccttggggctgagggccgcgcctgcccacattcctctgcctacacccttgcctcctagaagccacctgcaggacagagagaacctaggctgtctggcctcagcatcccatccctctttcccatggcagcactggaggatttcctgccagacggcagcctgcacccctgcaactgtcctccctgcaaacatgacttaggcctctctcagtttgctgctcccttcttcactctgtcccctccggtccccaaaagccccatcctcctcctcctgcttatgctcccctcctcagtccttgttctccttctcttctggtggccaggggagaaaggagccctccgtgtgcccccagaaaggctggctccagaagtccttgtgccccccaccccctgctgcctgctggcctcgaagtaatcaatctgattggattagggtcagggcaaccctaatcatgtcaaaggttaccctaggctttgtggcaaggaccacaggggtgcctggccacccctgccgaggtggcctctgttgaacagagtttaacatctaccagccagctgggaggaagggagccagcctcttgcgtgcatgtgtgcatgtatgtgagcttgtgcagccatgtgttatagaaaagcgtgtgtgcatgtgttttatatatgcatgtgcgcatgaatgtcttacgtgggcctgcgcacttgtgaatatgaatgtgtttgtgcccatgttagtgaatatgtctgtccgaatgtgtgtcatgcatgggcatatttcagtgtgcatttgtgtggatgtgccttacgtgggtatgtgtgtaagtatatgactgcatgtgctgtgtatggatatgtggagatgtgtgcacgtgtcagtgcacatatacatttgtgcacctgtgtatgtactcacaggtattgattatatatgtatagatgtgtgaatggtagctacacacaaatgctcgtacatgtgtgctcaggtgtctgtctctgtgtgggtgtgaccatgtacacggtacaggcgtgtgtgcatatgtatatgcattgagcatgcatgtgtgaatgggtgcctgtgtgtatacaaggcaagtgtttgctcatatctaatcccaaaaccatctgccctgtgtcagcctaaaactcaggatgctaacctgagcgtgaggaagctctagcccttgaatgcagaacgaggtcctagagggctctgctcttgcacccaaaagtagcagggagcgacctacctacctactcgggatcagaaagcatttgaagaattttgagtacaggatgattgtgaaccgtttatatcccttgaggcaagcctcagacacttggaggcaggtactaggtgactcccctgtattgacctctggcaagatgaaatgggtggggtggttgcagggccagcctgggccagaggtaggggtcacaggacgaaggtcaataaaacagctggtcaggctggaaggggacaagtgggaggctcacaggattggggggtgggggcagagtccaggaagcaggttattaaacactatgtgtccttgtgaggggacagctttcttttggctgtgtgtgacatttgcatgtaagacataaaggcacatggtctggagcccacagccatggaaactggggtctctacctgcctgtgtacgggggtggctgtgcctggagtcctcagaagctcctagctggcttccctatgagggaggagcatcttctacccaccttgcaacactccaccccacttgggggtggtctccccaagtccctaaggactcctgggggctcactgcttgtacaggcaacctttattcactgcgaagtcttcatttgggccttgctggcctggacagtgtctccagccagagcatcttacctcgtgttgggtgtggtcccttcctccagcctgtgacatacctccaggccagccataccctcaacccatagtggctggactttgttgggtcccccaaacctctgccacaactattagcagagttggttgcttttgaacatcagactctcagtatctgctgaactcaccccaagccctacttggcttctgggcagggaacaacagcttggcctcttcccctcccccaggcaaaaccccttcctgatgactggcctcagcttcgtggctcctcagggggtggtcctccacctctctgtgtgctcagcctatggaaggatcgactccaatgagactagcctgcaagacagccggagcttaggggttccggagggacagaaagggcagctttttagggaagcagagtccccaaatccaggttgcgacccctgacccccccatccgaaagtgttaccatttacgatgcgttgggggtgggggggctcccctggctccgggggcctctccggtatatcattaactctccgctgtgggaggggggaccccggccgatatcccactgcgctcggctcggagcacaatgtccctgcgaggacgacaagattaagcacaagggaaaagtgaaaatgctgttggcgattcacacgcccttcggggtgttgaattaaagcgtctgaaagaggatttcccctcgcgcccgacggcgcggcgggcagcgcatacttccaggttgctatgactggccggcgatcgcctaatcaccggccagggggaaattcatataaaatatcgctggccattgtggggctaacgcggcgtgacagtgtcgcacaaagccggattcatcagccccagcaggtcagccaggcgcccggccgcgcgggcccgggcggtgtcaggggccgcggccacggtggggcaccggcgcattccgctctcaggtggctccggggccttttgtgcctccgtgtgattaccaaatgccaccgcgacaccccctcccggccgcccggctcctcgaggccaggaaaagggcctggggaaggagggacggtgggcagccttggaggggaggcgccagggcggggcctgggctgcaagctaccagctggggctgctcggttctctcgtctgccctctgcctgctgtgctgaacacgggtgggggaagggatgcccacccactgaatgtgttatggaagcactttcagacatcgggatgggaatgggatagatagatggtttgtctttcctcagcgtgacaggagagtgacactcccaagggaggtgatgccccatgacctgcaggctctggccagtctgagcaattatggctatgccatagttgggccttcttcccaccagtggtcggatagtgatctcccagttggagtctggaaattgagaggacagagaccatctggaggttgttgcctgacaaactcagcccaggctgccaaccctaagccttctgtggtctccaggagggtgtggtggatgtaatgtgcagacataggtaagggtgaaccttctgtctgctgggattccctggttctagtcctgtgcagggaagcttcaacagagatagagggtcctaaataaacgcatacatagcatatgatcctaaaggttcatgcaccaaactttggtgcacccaatttcaaaaataaataaataaataaataaataaaaatataaaannnnnnnnnnnnnnnnnnnnccaatttaaaaataataataataaaaatataaaaataaaaataaaaataaaaaggtactactggatttaaaggcacagattaacctcaactcattaatagtaggcaatttcaataagcccacacacacatgcacacacggacacgcacacagctcgtacctggttctggagagtagacaccttccatatgattcatttcacttctagttctgagcctagtgcctagctcattatggactctcatattctggataggtgatggacggatggacagatgaatggatgagtgggtggatggatgataaatgggtagtagatggataatgagtgcgtgatagatggacagtagacagataattgagtgggtggtattttggtggaggatgggcgtatgataaataatgaactagatgaagggaaaggaaggaagcccagatagtgatactttccttaaacccagtaagagcgcagcaaagctgagattgtttctgcagggggactttgctccccacctcccaggatctgggtgaagagacagtggcctcaattcataatcctcccacgtcagccttcctggtgctggaattacaggcctgagccatgacaccgtttttggaatttgcttcttttatagaacaacttcttcaggtagtttcttttctttatctttacctgtatctgataaatagacagtatctccagccctccaaaagctcttcttagctctgcccccagatgactggcccagatgggcaacactagtctgtaagagtcctgtgctcaggcacccaccccctcctcatttgatgatcaatagccatttgaagggtctgatgtcatgcacttgttttctggagggaggtgtgctcttggaagccctcacctttatgctggccatttctgctgagtcaacagaaactgaaaggtgctgtgtgtgccaggaactttgctgtggtgtgccccattcccattcactctctgcaaaagagatagctctgggagagtgcttcatagctctggtagagtggttcattcaccatggttgtcctaaaaccctatgggactctgatggaagcaaagggtttcctctctgagaaaatgtgtttgttcccaagatccacgttttgcctctgactcctgggtagacccaatcttgttggattaaaatccctgccatcctaggatgtcacctaaacattctggagcctttcctttctaggtctcctgcagacatgttctcagttattattaagtatcttaagtatagcgaagcattgcaggaatggtgtggaatctcaggtccctgtcttcctctccacacacacagccttgcacactgctgtggtacatggtaattgatcatgaaagccaacctgacttggataacccaggtctttgtgcctccatgtcccttgagttccaccatccttcccttttgtactgcccaaatcatcaccatttataggaaggaccttaatctggctttagcagctgcctccaattcatttaagtagagactatacatttttagcaagaaaacattgaaaacgatacaatctttcctaggaggtagatggtatctattcactgctaggaatgtgaactccactccttgcatagtgtgtgatggtgatatcttgggaggtggggttggggtggggaactgcttaagacttttggctgcagcttgcctccatccttcttttccaagcatgttccatttcacattcacctagccaaatgtgggtttgcagcccacagttcctcccctggcttctcagatggagtttctggactacttggactttcttacttctggcctttatttcttccccagcctgttgaaagccagctccagaacttgccctgccttgacttgatcgggagcccccacctcctcatttgacagtagaggaaactgaggttcaacagaaagggaggacttcccagcctgctggtgacagagctgagcaagaatgaactcttgcctacttcaagttctatgttgttctctccttctcccaaggacccttcccctcgagtgtgcctaccagctccaggctgtttgcgtgtgtcttgataagcagggagcctgaaggccttgttctgggcagggcaaggcctagagtgctgggcccccttatcttttggagccaagaaggatgggggaggagcgtttgggtgacacttgagctggataaggtaaccaaggctgccttgagacttggaatgtgagggtgtaggcagagaagtagacttctgagtcgcacccaagagaaggtagctcaaggcctctggccccagactcaggttctatgcagaaagaaagaagactggagtcttaggggcacgaggaggagtgccttggctccttcaaagatcaaataggggttagagatgtagctcagttggaagaatctttgcctggcatggacaaaatccccaggtttcatttccaacactacgcaaagctaggcgtggtagcacacagctgtaatgttaacacctggtggagttcaaggtccttctaggctacacagtaagctccaggcaagcttgggctgaagtccctgccaaaaagaaaacaagaaagaaaaaagaaaaatgacggctcgaaggggtagcctgtgctctggaatggaaataaacagtgaacaagatgcagatcccacccgtggggaggatctggactggaagtggattccagaagacaagtcttcccgaggaataggcacagctgacatgttgggtagatagtgcccaggaccttggctgccatgctacagagtgaagctggtaacactgaggctggggtagagcttgagcccagggaagaatgaaggctgagtgtgaccagaggccagtgagtgctgagaagaggaggaagacaaggctggcggcaggaaacctttagagaactttaggaaggctgtgtatcacactggctctgggcacggagctgggcctgcagtgggtggctgtgtgcttggccagtggaggctactgaatactgggtgacagttcaattgagagcttctctgtggttctggtagttccttgtccatcgtaatgtgggaagagtgggaagcagctggactcctagatacctgcagaagttgtccaggctctgacagtgccccaggttgcgggcagaacagctggagtctgctcagagatgagagtaaatgtgtgttctttgattctatgtgtggacgctgactgaactttgtgggtcagtctgagtgtgagtgtagttgtttgcagtttctctgtccctgtttgggctttgggacacacagagtcccgagagtctaacctcttagatgcagcttgaggaaatatggaaagctagtgtgtgcaggaggggtgaagaggccacaactttttatgaaaagtctcacaatcccaagagggtcacccggcccaagaaatcctgcgcaggcaggcctgcgaggctttctgtctggaatggtttctagccgggtgtgtaaaatctctgctagtcaacaagtcagatttgtatccatcttactcagaacaccgtgcttatcatacagcaagcacttggcacacctttatctggtgtcaagtagacgagggagtgtcttctcttaggaagaaactcctatgcacaattggtgtgtgtgtggtggggggtgtgaatcaatgcaaccactatagaaatgtttgtggattcttaaaaaatgaaaaatggaactaccacaagactctatttcacttctggacctatatccagagaactctatactctatcataaggatatttgtacctccgtgtataatgctgctttattcactatagcaaagaattggaattaacctagttgtccattagcagatgaatcgatagtgaacattttgcatatatataaaaatggatactattcatctcttgatttattttttgctgccttttgtagtcaatattatatttcgttatcacaatattatcatttcaagatccgtccacatgatttgccctctcaatctgaggcccctggtctagacctacagtggatgcctactgccgggaataatgcaaagtctggactgttgtttttcctgtttatgcagaccggtgataaaatatcagatatgttagacacagtcagatttaatgaccaatctccaaacagaacagttacagtacagctgtggtannnnnnnnnnnnnnnnnnnnctagtctacttggcttgcagcaagctaggtagttctgggaccttaatgtagtcctccttgggactctccaggaagacagaagggatagagtgaatcactctccatacaaaaaggatttagtagagtggcttacaagctgtgatctggatagtacaatggctgtcttccaacagaaagctcaagaatccggtgttgtccatagactggatgtctcagcagctcttcagtatacactggaatcccaagaaatgggctctaaactcagtgaaggaataaacttaccagggagagtgagggcaagcaggccaaaagcagaggtgcttccatgtcctttgcataggctgtcaccagcaggcatggcccagatttagggtaggttttctgacctcaaatgatccaatcaagaaaaatccctctcagtgtgtgctttgcacaccgttgatcccatcgctcaggaggcagagacaggcagatctctgtgtgacctaaggtagcttggtctacatagtgagttgcaggccagccagggctatgtaaaggctctgtcttaaagcaaaaaagccagacaatgttgacacacacctttaattcgagcacttgggaggcagagacaggcagatctctgagttcaaggacaaccagagctacatagagaaaccctgactcaaaacaaaaacaaacaaatccctcacagacataccctgcaggttcccctttaattaactctagatatactcaagttgacaaccaagaatagctgtcctggttggacttgaactcaaagcaatcctcttgcctcagttttccacatgcaggtattacaggtgtgtaacataagttctggtttaaaaatctctcgttaccttaatttttaatgtttatttatagatctaattttatgtcaaagatctaattttccttttgttgttctgagatggggtatcatgtagcacaggttagccttgagctgtctcaagctaaagatgaacctgaagctctgctcttcagcttccacctctggagtgatgggatttcattataggccttcacaagctcacttcaggcagggctggggtttgatctctattcctttggcatgtctctacccattgagccatatccctagcacactcattttatttgtttttttgagacagcctcatgtagcccaagctggcctctatgaccttgaattttttatcttcccgcttcctcctccctgatgctggaattacagagtgtacagctatgccccagttcatgtgctgccagggatgtgaacacagggctccattcatgccaggcaagcacgctagcagctgagctgcacccaaggccctacttctgttagcataattgtaagtatttttaaggtgctgtgcaatatttcagtataggattatgttttttaaatgacccaataagggttcttaacatgtccatcaagaacattcaaaatccttttcaagtgatttttaaaaatacgatcacttgtccactgtcctcacatgactgttcagtggcacaccaagaccccttaaccatcatctgaaattcagacccactgatcatcttccctccaccaccgtcccaggccctgcctccgtaagtaacccattccacttcctgctaggaacggagtgcttttagattccacacctgaattagaacatgaagttcttgtcttcctgtgcctggctcattcacttatgtcctctgggtctgtcaatcctgctgcaagtgacagggtctcattcttttgtagtgtagccttggctgccctggaactcactctggagaccaggctggcctcaaactcagaaatccacctacctctgcctcccaagtgctggaattaaaggcatgcaccaccactgcctggctagggtctcgttcttatttatgactaaataacatttcgctgtgcacactacagagctatcgtaacaaagcacatacatacagtgctggcataaagggacacacacaagctgacgactcaggacagcagttcgagagctaactccacatagtcccgcccaattgttttttcagcaaaaggtatgaacgtacattggagaaaaaagtctctctgacgaatggagctgggaaattggatatctctatctacgtaagaacaaattcagtccctcctgtttcctatgcacaaaacccaactccgtgtaagacctgaaactactgggacaaaaagcataggcctgggcatggtgatgatgcctttgatcccttttgtgagttcgaggccaggctggtctgcatagagcatcccaggccagcttgagagatagaatgattccctacctcaataacaacaacaacaacagcaacaacaacacacacacacacacacacacacacacacacacacacacacacacacacacacacactcactcactcacttaggaaaaacacttgggtcatttgggtcaatattcttcataaaagatcctcagaagagcagtggtgagaccctgtgagcactgagttctcctctcttggccctggttttggattcctgccttttggactacaaccctcctcacctggcctccataaccccctatctccttcctctgcagccacccgggagtcagcctttgtccatgccatcgcctccgctggagtagctttcgcagtgacacgctcctgtgcagagggatcagctgctatctgtgggtgcagcagccgcctccagggctccccaggcgagggctggaagtggggcggctgtagtgaggacattgaatttggaggaatggtctctcgggagtttgccgatgccagggagaaccggccggatgcccgctctgccatgaaccgtcacaacaatgaggctgggcgccaggtatgtgcacagaagcccagggctgtagagcaagggctgctttttcaccgggatgtccagtggggcaggacaaggggtagaggggaggtgctcttggtgaccaggctgctctgcttgccttctatcaagggacattgtgcccagctgtacctcaagtgtccagtgtgctcccagagaatgccagactcacctgtggacatagggttcctggaagtagacaggtggcagaagtagctgcagagcacatagtctctgaggattccgcgatgaggagatgtccatgagaggacaagacgtgaagggaggagaagagggatggagggcagacacgtatagtaggtacagattgaactgagatagagggttagagtgatagagatgattgatacaggctactgaaacagacgagagggtgagagaggggaggggaggggagagagaggcagacagacagacagacagacagagagagaggagagagacagagacagacaaatagagagatagagagatacagagagatagaaagagacagtcaggcagacagagagagagagaagggagacagagatagacagaaagacagagacagacacagagagacagacaaagatataggaagacagagagagaggagggagagagacagagacagaaagacagacagagaaaggcagacagagagacactcacagagagagattatcacaaggatctggaaatacagaagggagccatgctaacagaacactgttgaaggttccctccctctgaccaggttatacctggatctcaggagctaacactgggatttcaggagaagcaaaggtctgaactttcatgcacagacagtgttttaccacagcagctcatcttcaaatacgcttagcctccctcacccagagagccctgcttcccttctctgagagtccagataggtagtgctcagcagcatagcagagccaagaactgagtaatgggctggagagcgacctcgaaccactcaggaatgcatatcatcaggtgtcaggtatggagagaaacagagctgactgtgggggtcaaaacagagagacttcttcacagtgtattttaaaggcattttaagctaggtatgatggtgcaggcctgtaatccggacgcacaacaaaggcagggcaggaggatgagaagttcaaagtcaacctcactatgtgtttgaagccagtctcatacttaagacctagtctcaaaaataaagaagagaaagaaaaggaaagaaaaggaaaggaaaggaaaggaaaggaaaggaaaggaaagnnnnnnnnnnnnnnnnnnnngaaaggaaaggaaaggaaaggaaaggaaagatactgtagccaggcacctgcctatctttctctgtagcagacattcagagatgtgcttttctgaggacaaactgtcacagtgaaacttacttccatacataacgaacttcagacctttgacctcttcctaaagcccaacactagctcaaaggctctgacccttcagacaaagaacaggatactctctctggaaaacccagctcttccagcatgaacagaggggtgcctagaacagggatcactttacagtgagtgtgttgggagtgacaactgcctcccacctgcaggaatttccagaaagcaatgtggggtgcaggggtagtggtgcaagtctttaatcttagcactccagaggcagactagtggttttctgggttcaaggccagcctggcctatctagagagttctaggacagccaggatctctgaatttgagtctagcctggtctacagaatgagttccaggacagctgggcacaaatttaataatgtaaatacataataacaacatttcatcaggagttttgaagggtatgttcacgagagacaagggaggacatgaggagaaaggcaaagacataaggcaggagctttcctagaactgatgttttagaccacacaggccggactgcaaggatggggatagagagagagatgacttgggtcaagagctcttgatgtgctttttagaggaacagcatttggttctcagcatctacaccaagggactcataactgattgtaactccagctcctgctaccttctggcacatgcacacacatggcagcaccttaacacacacacacacacacataaaacatttttaatctacaaaaatagggaagccatcttccccaagatgtattatgaaattcagagcacaacctaaagaaaccctccaaccttcaaagagaccacttgatgtccctgcaaaggttgagggtgggaggaggagagcaacaagagcatcattggaagctagaagaaatttgagcaacactttgggattccgagtgataaaacgattttaatccaagaattttattcccagccagagtatgaaagatttgcttttctactacattagaaaaggtttgactttagacagtatcatttcccaaggtttaccaggtggctgtgagtacgtaggggtgtgtgtgtgtgtgtgtgtgtgtgtgtgtgtnnnnnnnnnnnnnnnnnnnnnnnnnnnnnnnnnnnnnnnnnnnnnnnnnnnnnnnnnnnnnnnnnnnnnnnnnnnnnnnnnnnnnnnnnnnnnnnnnnnnnnnnnnnnnnnnnnnnnnnnnnnnnnnnnnnnnnnnnnnnnnnnnnnnnnnnnnnnnnnnnnnnnnnnnnnnnnnnnnnnnnnnnnnnnnnnnnnnnnnnnnnnnnnnnnnnnnnnnnnnnnnnnnnnnnnnnnnnnnnnnnnnnnnnnnnnnnnnnnnnnnnnnnnnnnnnnnnnnnnnnnnnnnnnnnnnnnnnnnnnnnnnnnnnnnnnnnnnnnnnnnnnnnnnnnnnnnnnnnnnnnnnnnnnnnnnnnnnnnnnnnnnnnnnnnnnnnnnnnnnnnnnnnnnnnnnnnnnnnnnnnnnnnnnnnnnnnnnnnnnnnnnnnnnnnnnnnnnnnnnnnnnnnnnnnnnnnnnnnnnnnnnnnnnnnnnnnnnnnnnnnnnnnnnnnnnnnnnnnnnnnnnnnnnnnnnnnnnnnnnnnnnnnnnnnnnnnnnnnnnnnnnnnnnnnnnnnnnnnnnnnnnnnnnnnnnngtttctctgtatagccctggctgtcctggaactcactctgtagaccaggctggcctcgaactcataaatctgcctgcctctgcctcccaagtgctgggattaaaggcgtgcgccaccaccgccctgcaaaagttgcttttcttatttgaccatggacttcctgtgataggacacgggtaactagcttagtggtagatctttacccactgagccaccttaccatccctttaaaatttttttttcttttttgagacaaggtttcatgtcttccaagctgacttgaattttcaatgtagccatcttccaacctcttgcttccacctcccaagtgctgggactgcagacatgtactaccacttttagcttatgagatgctggggatccagtccaggcctccatgcccagcacgcagggaccccatcaactgagcttcatctccaaccctggcgattggacatcttaaagattggattgcttagagaggagaaaatacagggctgacccataacgagtgtgttaatcacataacagaaagttgtatgggaaaggaaatgtcaccttagagtaagcctgctaacacagccagaaccgtgggcagtgagtactgaagggagagatcacgctactgttttcagggcgggaacggggagggtttggctgtatagtgggaggtaagagggcgtaataattttcacacttcatggtaagaaagcaacagaaaatacctcccattcaaaaatcaagacacagcaagacaagtgctgtgacagcccgcataccacaaggcacttccttgcgtggtcaggaaacacaccacacaggcaagcaccggccccatccctgttttaacagcaggtctcagtggctattgagattcttgaccaagtaaaacaaaaccaagagagactgaaaaaggagagatggcaagagtctcctctcagaaagcctggctgcaagagagagggatgtgggcgctggactagctggataagccaggcatggtgttattcttccatgcccatgggccagtttgataggcaggaagggtaaagaagcagtggaaagtcaggtgaggtgcaagcagggccgaagccagaatgatcagagcattaagcccatgctgtccaatatgaatccttgcaagccacaacctgagctgcttggatagttactagctctcaggtagttatagtgaaaggatagctagagctggacggtggtggcacttgcctttcatcccagcactctgagacagaggcaggtggatctcagtgagttagaggccagtggtctacaaagttctgagacagccagggctgttacacagggagaccctgtcttgaaaaacaaaacaacaaaaaagaatacactgagagtttggagagatggctcagtggttaagagcactgactgatcttccagaggtcctgagttcaattcccagcaaccacatggtggctcacaaccatctgtaatgggatctgatgcctacttctggtgtgtctgaagtcagctacagtgaactcatatacatagaataaaaaaaatctttttaaaaaaagaatacacagttaaaatacacttggagtcctttgaaaggcagtcttacggtgtagctcagactggcctccagccctcagtaccccagccttagcatctccagtgccactgtgattgttcatagtcatgctcctccagcacgctgggctggctttgatctttcatcactctctcctccttctgtccattttatgacaaatgacctgtcaccatagggaaggcagtggccagtgacacgtggatataacccatgtctcagactcatggtagttttacagagcaggtgggaagcaggcaaggtccttgagaaggaagcttctagcaacctaatagtttcctgcctcggtttaaaatgttttagctgtcatggtaatggaacagacttactgggtaaaatgagaccttcaatatgtgaacataatgcactgtggccaagcaggctaggaagcatccttatcgcctgaaaaatcatttcaactaggcatgatgatgcttatctgccattccagcacttggaggcacagacaggagaactgccacaagttcaaggctagcctgggctatgtcactgagttccagaccatccaggggctacatagtgagaacctgtctcaaaatgaatttttttttctgtttgaatgttcaaaacctactcgtcattttgaagcagtactttgtctactgtggtggacgctttgtgctatagaataccaacagatatctattcctcccttccaatgatgacctcttcaagctcctactacttcttagcattgccacacttgggacccagcatccagcatgagaaccttggccacagccagatctaaacaatagctaaccccatggccagcttgttatttcagtagtgcagtggatgttgaaattatgaatgcagtatcctgcatgtgtttcctactttggggcttaaaagactcagtgtgtgctttgcacataacggtgcttgttggaatgtaagaggaaagacaccaggagctgtccagagcagatgcttacagcctgggcaggaaggctacatgtctggagcagaggaactgggatggtccctgtggtggagggggcttggaatctgagggcaatggacaaggcccccttgtccccacgcatttccctacagaaaaggaggtaggagtccctacttcttgaaacacctatttccttccctgtaaagggagcaaggtctacattgttcatagggaaagctgctgtccatcccggccctgtgagtatagggagcactctaagcagcccagctcagtcttcacaccgtagcatctgctctccacattgtccctccagcatccccaacctgaagctccttgcttcctgtactccgtcctagacactcctgcaaagagaattagctagacccacagggagaaagcagctcccaggctcctgagggcttggatctggcagagaagacccaggtcaccatagagaagatagtagcactaggtgaccaaagagaggagtctgggggcgggggcttatggagaaggtgggctgcagagagcagaccccctggttgagccgcgctagggaccagtgcagacacacttctgtgcttgcctcctcaggccatcgccagtcacatgcacctcaagtgcaaatgccacgggctatctggcagctgtgaagtgaagacctgctggtggtcgcagccggacttccgcaccatcggggatttcctcaaggacaagtatgacagcgcctcggagatggtggtagagaaacaccgagagtctcgtggctgggtggagaccctgaggccacgttacacgtacttcaaggtgccgacagagcgcgacctggtctactacgaggcctcacccaacttctgcgagcctaaccccgaaaccggctccttcgggacgcgtgaccgcacctgcaatgtgagctcgcatggcatagatgggtgcgacctgttgtgctgcgggcgcgggcataacgcgcgcactgagcgacggagggagaaatgccactgtgttttccattggtgctgctacgtcagctgccaggagtgcacacgtgtctatgacgtgcacacctgcaagtaggagagctcctaacacgggagcagggttcattccgaggggcaaggttcctacctgggggcggggttcctacttggaggggtctcttacttggggactcggttcttactagagggcggagatcctacctgtgagggtctcatacctaaggacccggtttctgccttcagcctgggctcctatttgggatctgggttcctttttaggggagaagctcctgtctgggatacgggtttctgcccgagggtggggctccacttggggatggaattccaatttgggccggaagtcctacctcaatggcttggactcctctcttgacccgacagggctcaaatggagacaggtaagctactccctcaactaggtggggttcgtgtggatgggtgggaggggagagattagggtccctcctcccagaggcactgctctatctagatacatgagagggtgcttcagggtgggccctatttgggcttgaggatccagtgggggcggggcttcaccccgactgggtggaacttttggagatccccttccactggggcaaggcttcactgaagactcatgggatggagctccacggaaggaggagttcctgagcgagcctgggctctgagcaggccatccagctcccatctggcccctttccagtcctggtgtaaggttcaacctgcaagcctcatctgcacagagcaggatctcctggcagaatgaggcatggagaagaactcaggggtgataccaagacctaacaaaccccgtgcctgggtacctcttttaaagctctgcaccccttctgcaagggctttcctagtctccttggcagagctttcctgaggaagatttgcagtcccccagagttcaagtgaacacccatagaacagaacagactctatcctgagtagagagggttctctaggaacctctatgggggctgctaggaaggatcctgggcatgacaccctcctacgatagcctgcatccgctctgacacttaatactcagatctcccgggaaacccagctcatccggtccgtgatgtccatgccccaaatgcctcagagatgttgcctcactttgagttgtatgaacttcggagacatggggacacagtcaagccgcagagccagggttgtttcaggacccatctgattccccagagcctgctgttgaggcaatggtcaccagatccgttggccaccagcctgtcccgagcttctctagtgtctgtctggcctggaagtgaggtgctacatacaggtcatctgccacaagagcttcctgattgctaccactgtgaaccgtccctcccccctccagacaggggaggggatgtggccatacaggagtgtgcctggagagcgcggaaagaggaagagaggctgcaaatgcgtggtgactgactgtcttctgcctggaactttgcgttcgcgcttgtaactttattttcaatgctgctatatccacccaccactggatttagacaaaagtgattttcttttttttttcttttctttctatgaaagaaattattttagtttatagtatgtttgtttcaaataatggggaaagtaaaaagagagaaaaaaataagtttgtggtttgttctagattttcccttttattaacaagcattaggtgtgcatactaatggagtttggtatggaattcttcgatgatcctccccacccccaagggtaattcacacctccctgtcccttatcacttgtgggtctgcactatgctgagaacctaaacatgccaactcaggttcagggtcccagagccaagtagagactgtcgacaagcctccagggagggaggtggggtcagaattccaagaaaagagaattgaaatagctaagtcaagaaaagagccggtcaactgtagaaaaatctggaacagggtagatctgagagcttgaatagaggggtgcaggtgggttaagtttaagcaagtatgggagcggggtaagcatacagtagttaggatactttggtagttccagtgaacagatgaaaagtcacaggagaagaggcttaaccaagaccccctcacacgctggggatgcagaggagacgtggagcagatcgcctccctgtgacttcatgttctcacagcccattccccagaatcatgtatttagggtggacagcccttggtatttgaggacagtggcctggcttgctgctgctggcttcttatgtgtaaagtcaacagatcttagactttagtcctcagaccctgtcaccaggaatgtttcagattctcacccaaagaaagcaatgggagggaggggtctttgcctcaggagctgccatgttcccacttgctttcacaggggcgccagggcctcagtcaagacaggcaaggctaatcatcctgttggcaaaccaaatgatggggcaggtgtcagggcgccctgggagtgaggctagagatctctcacaaagccatacttcttttaaggccacacatctgcccaagcaagcctaccatgtctctgctcctctccctggtcccccatctccatccccatactgtccccacctctgagtcctattctgatgtccagatgtcagggcaaaggatgccctgcaaagctgagagcagcagtcccagtcctacctctcaaaacccaagctgaagccgagtatagcagtgcacgcctttaatcccagcactcgggaggcagaggcaggtggatctctgagttacaggacagcctggtctacagagtgagttccaggacagccagggctacacagagaaaccttgtcttgaaaaaccccaagaaataaaaaaattaaaattaaaattaaaaaaaaacagggggaaaaaagcccaagttgagcacagtcattgttcttgtgtcccatttatatcccaacccagatccaagtgatttgaaagccagttagaagatggccataagaataagcctaggaagtgtcttatgatgtccaaggtcctttagctgtcgtgatacatcatgacctcatgaaccttagaactaggaaaccctgctggcctctagaggaccaagggaaaggatctgaaatatagtcactgttgacataggggaatgctggttaggacaaccaggaagatcattaagtgtcctctcaaccctcccaggggacagtgggactgcctgtcccagaagaggggaagataattcccagaccctaagagctgggaagagaggcagtgaagtgagaggagaaacaggcaaggcccttctagacccatttgattcaacactgtagagttggtcggtgatgacagctaaagccgaggctgctgtccacatgccctgtgaatttgtccacaggcctggtaacagaatactatgtcacactgcctgaaactctgaatgccacttgtcagagcaggctgccactggttttatggcaggaccacttaagggggtccttaaaccttcaaagcaatcacaagcaggcctaagaccatactagactcacctgtatccttaaagaagaatattgaggagcctccaggtcttgggacataaagatgagaccaggcatggctccactgcatgctccaggcacatcttttgttcaccaacccactggctaagctttctgatcttccagaacacagattcaacctgtagctgctgatccatggtctgagtcagctcagtctaccacactaagattctagaccctccgtggtcacactgtcatacctaaacaccaatgtgcccagagtccaagtagggtacaaaaggaatagccagcctggcttgaaggtattggcctataatccaagctgccccagaagctaaggcagaaggaccacaaactcatgattgcctgggatacagaacaaggtgaagatcagctaaagcgattgagtgagaccctgtcaccaaatgaaaagtgataaagaactggggtgtacctcagtgacagaggactttcctaatgtgtgaggctctggactccaccaaagcactgaaaagaaaagaaaaaaaaaaatcacagactgtgagggatgctgacagctaagtggccttgggaaaggagtgccatcctggggctctctggcctctggccaggtctgtttggggtttgtggaggaagaggcccaggttctggattctcagtacctcttctttagccttctgattccctgactcctggcaggcaggcaggcactccaatgacatctatgccttcacacggctccctcttctcattctcagggctgcaggtgtatgtacaccaggccctgacctactattggcaggactacctaggatttcccagtaagggcaagggtcagtgggggggtagggagggcaactagctgcaggtggacactccaaaaagaggatgccatggtccagggccagccaaggcagaaggatgggcgcccattctcccctcagggcagtgaatcatcaggtgagtgggcaggttcaggaagagtccaattagcccgctgggccatcttgggtgctaacaataatagagccatcagtccctagggcagtgatgagagtcctcagttaagcctgtccgacagatgagtagtccctctaagttggcaccctgggcaggagccaccctaattgctacctgctgccctagtgcccagatgaaagggacagactcgactgggaggcggcagggcagtggcaaaaccagcatgtcacgagggcctggaaagtcagaggccaatgggtatggggtgccaggctgtctcaagaccccagtagggtctaatgtcacatggcttttggggatgcagagcccatatgcccaggcagaagacagatcactttagaaggtcaaaggctaggaagcatatagcctacagaggaggcagcattggcctgagggcttgtcagggacacaggtgggctctggtgtctggtgtcagtttctgagcagcagcccctacaagtccaggatgaaagactaccctagagattgtcttggctatccacaggagatacacgactannnnnnnnnnnnnnnnnnnnnnnnnnnnnnnnnnnnnnnnnnnnnnnnnnnnnnnnnnnnnnnnnnnnnnnnnnnnnnnnnnnnnnnnnnnnnnnnnnnnnnnnnnnnnnnnnnnnnnnnnnnnnnnnnnnnnnnnnnnnnnnnnnnnnnnnnnnnnnnnnnnnnnnnnnnnnnnnnnnnnnnnnnnnnnnnnnnnnacccccccagtccgaggagtgggaaatcccaggccccactcagacccaagctcgcagctgtgggcctcagaagcagcctctctggtgagtttacagcccctcccgctgccctggagaaggaggaaatgagcgggaggcctgttcacaggtagttgagacagcccccgaataaccatataaaagggccggaggctgggggccccacccagccaggacaggcttggccatccccttgcaaatctcacactcagtagctttgaagtactggaaagggtgtggccaacccccaccttagggccccactgaccctccctttttctgtcaccccctcccctggatgcccactttctgggtcctggggctcagtttcctctcttcagagacagactggaggctgtcaccatggcctggcctccaggaaaacctactcttggtcagctggggtgcagccagctgtggttcccacccctggcttgggactgagaaaatggacctgaggactagctttccatgatgtgggcaagtgtatgaccagaagccagagtccccagcccaagcagtcttggtagtaggatctagcactgccttttccagggaacactggggacaacagggcagccaggagacaattttgagaagtccctaggaccttcctgaaagctgaccacccactgttggggtgagagaaaactatgatgttctgttgctgtgtagctggtgatcaatagctgggccaactctgagtcctagcaaacctggcccagccataatgatctaccttgaagggactttgggatacattactgccctggagtccagcgagcgtcctgggacagattcttctccccctggctttaccctgcaccatgccacaggccccaggtcccacctctcttcaccagtcgctcaccttccacagcctagtcctttcaggggttcccaaatttcttttcagaaactctcttggaggggggggtacccagaacaacacactctgagattatagccttttaggatcatcatcctctctaaggacctctgacttccagagccagagtagaaaccaggtatacacacttactatccctacagccctaaggggccagcgtgccatcctactggagtctagtattggacagatatatgagtctgggatagtccagttggctagagtctttcatagatttgaattgaactgtactctcaatgctactcttgggctatgtgggaaggcttccaacaaggtgctgcttctgccttctgatgtttgttaattctgagataccatacagatgccaagacaaatagtgcagggcagctaggaagccctggaaagggcccccaactccaggagcttgggcactgcctacccttcctaccctgccctgctttgcctggtcgggcagctgggacggagctgcaagctgtcagaaggtgctaattgttgtttagctctaagccggctccttgctctggtcttttttccaccctctctctcttttttatttgagcgtctagaactcatggtaaatagtcatttggctctcagagccctgcaaattggtgtttatggtgtgaagatgaggaggacccaggactagtccaccaaaacacaggccagtgaagagggaggagagagggaaggaggcataggcccagctgggactgggcatcctccacgtcccatccaggcctagctctctgctgcttgatccaggagagcttccaggaagaggctcctccgtcatccttatcagtggggagactggagattgaagaactagagcaggacccatatttagcataggagatannnnnnnnnnnnnnnnnnnnnnnnnnnnnnnnnnnnnnnnnnnnnnnnnnnnnnnnnnnnnnnnnnnnnnnnnnnnnnnnnnnnnnnnnnnnnnnnnnnnnnnnnnnnnnnnnnnnnnnnnnnnnnnnnnnnnnnnnnnnnnnnnnnnnnnnnnnnnnnnnnnnnnnnnnnnnnnnnnnnnnnnnnnnnnnnnnnnnnnnnnnnnnnnnngaaggaaggaaggaagaaagggaggtgaatggggagggagggagggagagaaagagagagacagaaaaatccaagtacatgggcccttcttacccagtggcctcccagatttgagacaggaatgtatggcttctgtatgatgcttgtggggtgcagggtgtggaaggcaggtgccagaggaattccaagcccgagcagatggctgggagggcttctcaggagaaggggacttccccagttgttcgcctctcagtgcagagagcaggcaggcctgtgcagaaccctcagactccttggcagtggtggctcagcagcctcccttccccatcccccaggctcctcagctccctctactgcaggaagcccagggtgttcccacagcctcactctgtcccttctccattcctggcacaagcttgagacactctgccaccccacagtgccagactttataaagcaagctggcttctaagcagcccaccagacacacagccctggaggggcgagtcccaaagctctaagaaggccatttgacgtctgtagcttggagtagactccagggattacacatgcttcttccccgactgtttttattgtccaggtctgggttggggcaataaagtgaagtgccagcttgcacctcggggaccagggactaatctggtgggagtcgtgacccaggcaacagtccatatgccatggacctgatcctacacctcctctgcttaaggatattccatggtttccctgtgtccaccaggtgaagtttaacttctcaagcctacgtacctggcaatctatccccttaaaagagtcctgatgtatggcgtgagagactgagaaactgtcctgcacaggaggtgtatacggacattactcttcagactgcaacggacgcccgcctctatcactcattccctcagatgctctcggacctccatgccagccttctcaccagttctaaaagaagtctctctcgggtctctagccttctctctcccaggtcctgaactttcaatgggttcttctgactctggaactggttgcaattccttgaccttctctggtcacattcaggagcccccatcactgtctctggggggacactggaagtaccagcttgacctcagggacctgtatggcaataaagggggggaggggattctgatgtcagtgtaaccttgatcattcctggggcttggaagcatacccagctgaaccaagagcttgagcttccaagtgacccatcaaccagaggaccccacacctgtgagagcagggagggcggcctcagaaccgaggccttgtctggtccttgctgttgtatgatgggaggttgtttgacagatgcaatggatgaaccatgcagaatccaagcatgacagggatgaggccacagcgcaggtggcgaagggccatgtgaggtctgggaaggtggaaaggatgcaggagaggaccttacaggggaggaggatgccagtggagatggttcaggagaggacctcgtgggcgggcctgaggagacagtgcagatgaggtgtcagtaaggaggatgcaagcaagaaagatgcaggagatgatggagaagctgaagaaggcactgaagaaggcacagggaagaagagtgcatgttaggatgttcaagcagagacggtgcagtggtgagggtgaaggtggaggagattcagatgaggatggtacaggtgggatcctgcatatgctatcaggcaggtggcccagaacaatgagcctggccatggtctatgagggacgcacacactgggaatggtacctacaaggttctgaaagtgcaggcttttggagaccaccctccccccaaagaaaggggtttctaccccttctccagttcttcccttgtgctttaaccaaaagcaagtcttgtgcactgtgcccaaccaaccctgcactctgctgaacctgaggcaagagtagaaaggctgctgtcttttctaacctgtaccctgagccaactaggtcagagtcagaggcctcacatacgtgagtagccctggttggagggatctctaaaccccaccacagtcctgggacagcctgctgtttcctggggtcaggggtcttccatgggcccactgccgtcctagtcagctttgcttctgttacttggggattttttccagtctttcccttccgtttagaaatccttttcaggacagatccctgacagaggtgctgacatcattaggcctcctcaagggcacaggcccacccttctgctctggctacccctatccctaacccacagcccagctctgccagggtccaggcctggctggcagcccgcagactacccagaccaatgtgttggctctaggcaggcaggcatcctgaagggtctaacagtgtcctttgccaactctccactgaagccgatgctggcctgtgcctttccctctgcctcttatcttctttccctcgctgccaccacactcaggaatcatgggaccctctggtctttgagctacagctctgtgcaggtagcacagcctcctccttcccttccctccctcatacatgtggctgtcgacccctgtctctgcaataagctctgggtgcctctgactacgcctctgacagtcctaactagtgtgggctggaacacagtggccaacatatgtaaatgctggaaacccctctcataatagagatggcaggtgtggagctccgttgagcctgaaggtagagggcagagtagtgatggtctacgggccacatctggtccctaatggtgggagtcaggacctgcctggtttcctcagagccagagtgggaatacagaggcatctggtatcttaggtcaagggatttctccagcccttacaatgtgagcaggatgttgctgtcaaggctactggacagctccaggctctggagaccacctgaggagatatggacgggccagcccctggcacagtccagattttaccacggacccagcctggggcacaggtgttaggggtggggctcatgttggcgggagtgctggctgcggatgcttcagctgggctttttaattaacctctgctggctgctccaaagggccccaattaagtgcagaatgcgatggcagagtggggtcaaagagaggagctggttttaattaaagtgcagtggcctgggcaggagcgcccccgcctgaccgcctcctcaacaggccctgctcagctcaaaggcggtcacatgacgggtagatgacagagaactctgcagtcctgtctggctgagatcccaccagataacagcaggaccaagggctgccttgtctagcctgtgtgtccactgccaggcagcccctcttcgagccactttgtcctctctgacctcttctcatttgtcacctgacctggaatagccatctgctaccctctcaataagcaggtccctggtataataagcatctgtggtatgtctacttcagaagcagcaaaaggaataaaacaaacaattccatcagatgtgcatgggcaatgggattaagcaaaatggggggggggcgggggagggggaaggccagtggagagctgtttaacctggtaaaggagcagatagcagcaggaaggggagggagctcacctggagaggtaagggcctggtaaaagccagagcaggatctggccagggctgagttgctgaggtaccagcaaggccaaagcctgcaagcaaaaataagagagaaagccaggcttttctccaaatggccagaagactactgaggactctcaacataattagctttccaggaaatgtaatgaaaaaccctgggcgagggccggtgagctaccaccaagcccggaacccacacagtaaaagacacagctgacttctgcacacacacaaatgcttgtataagcatatacttatacacatgcatgcatgcacttggaagtggaggcagcagcattagaagttcaaggttaccctcagttacatagggattctgggcctgcctgagctacatgaggtcttgtttcaaaacaacatcagcaacaacaaaattggatcctaaggtgacagtagagtgccagcctccctcctgctgcaaattccaggcaggtgttccccacctattacaatggtcccaagtaattttttttaatgttatgggcattttaacacacacacacacacacacacacacacacacacacacacacacacacacagagagagagagagagagagagcatgcgtgcaaggggataaggcctttgtgcttcacttgggaagaacaggtgtttcatgagtttcttgtgaggagaaacatttgctaggcatcatagccctctaggaatctcactggctaggaagacaggatgtcttccagcatcttgaccca

SEQ ID NO: 56 - DNA, 2814 bp, Mus musculus
gaattcatgtcttacggtcaaggcagagggcccagcgccactgcagccgcgccacctcccagggccgggccagcccaggcgtccgcgctctcggggtggactccccccgctgcgcgctcaagccggcgatggctcctctcggatacctcttagtgctctgcagcctgaagcaggctctgggcagctacccgatctggtggtccttggctgtgggaccccagtactcctctctgagcactcagcccattctctgtgccagcatcccaggcctggtaccgaagcagctgcgcttctgcaggaactacgtggagatcatgcccagcgtggctgagggtgtcaaagcgggcatccaggagtgccagcaccagttccgaggccggcgttggaactgcaccaccgtcagcaacagcctggccatctttggccctgttctggacaaagccacccgggagtcagcctttgtccatgccatcgcctccgctggagtagctttcgcagtgacacgctcctgtgcagagggatcagctgctatctgtgggtgcagcagccgcctccagggctccccaggcgagggctggaagtggggcggctgtagtgaggacattgaatttggaggaatggtctctcgggagtttgccgatgccagggagaaccggccggatgcccgctctgccatgaaccgtcacaacaatgaggctgggcgccaggccatcgccagtcacatgcacctcaagtgcaaatgccacgggctatctggcagctgtgaagtgaagacctgctggtggtcgcagccggacttccgcaccatcggggatttcctcaaggacaagtatgacagtgcctcggagatggtggtagagaaacaccgagagtctcgtggctgggtggagaccctgaggccacgttacacgtacttcaaggtgccgacagaacgcgacctggtctactacgaggcctcacccaacttctgcgaacctaaccccgaaaccggctccttcgggacgcgtgaccgcacctgcaatgtgagctcgcatggcatagatgggtgcgacctgttgtgctgcgggcgcgggcataacgcgcgcactgagcgacggagggagaaatgccactgtgttttccattggtgctgctacgtcagctgccaggagtgcacacgtgtctatgacgtgcacacctgcaagtaggagagctcctaacacgggagcagggttcattccgaggggcaaggttcctacctgggggcggggttcctacttggaggggtctcttacttggggactcggttcttacttgagggcggagatcctacctgtgagggtctcatacctaaggacccggtttctgccttcagcctgggctcctatttgggatctgggttcctttttaggggagaagctcctgtctgggatacgggtttctgcccgagggtggggctccacttggggatggaattccaatttgggccggaagtcctacctcaatggcttggactcctctcttgacccgacagggctcaaatggagacaggtaagctactccctcaactaggtggggttcgtgcggatgggtgggaggggagagattagggtccctcctcccagaggcactgctctatctagatacatgagagggtgcttcagggtgggccctatttgggcttgaggatcccgtgggggcggggcttcaccccgactgggtggaacttttggagacccccttccactggggcaaggcttcactgaagactcatgggatggagctccacggaaggaggagttcctgagcgagcctgggctctgagcaggccatccagctcccatctggcccctttccagtcctggtgtaaggttcaacctgcaagcctcatctgcgcagagcaggatctcctggcagaatgaggcatggagaagaactcaggggtgataccaagacctaacaaaccccgtgcctgggtacctcttttaaagctctgcaccccttcttcaagggctttcctagtctccttggcagagctttcctgaggaagatttgcagtcccccagagttcaagtgaacacccatagaacagaacagactctatcctgagtagagagggttctctaggaatctctatggggactgctaggaaggatcctgggcatgacagcctcgtatgatagcctgcatccgctctgacacttaatactcagatctcccgggaaacccagctcatccggtccgtgatgtccatgccccaaatgcctcagagatgttgcctcactttgagttgtatgaacttcggagacatggggacacagtcaagccgcagagccagggttgtttcaggacccatctgattccccagagcctgctgttgaggcaatggtcaccagatccgttggccaccaccctgtcccgagcttctctagtgtctgtctggcctggaagtgaggtgctacatacagcccatctgccacaagagcttcctgattggtaccactgtgaaccgtccctccccctccagacaggggaggggatgtggccatacaggagtgtgcccggagagcgcggaaagaggaagagaggctgcacacgcgtggtgactgactgtcttctgcctggaactttgcgttcgcgcttgtaactttattttcaatgctgctatatccacccaccactggatttagacaaaagtgattttctttttttttttttcttttctttctatgaaagaaattattttagtttatagtatgtttgtttcaaataatggggaaagtaaaaagagagaaaaaaaaaaaaaaaaaaaaaaaaaaaaaaaaaaaaaaaaaa

SEQ ID NO: 57 - DNA, 1059 bp, Mus musculus
atggctcctctcggatacctcttagtgctctgcagcctgaagcaggctctgggcagctacccgatctggtggtccttggctgtgggaccccagtactcctctctgagcactcagcccattctctgtgccagcatcccaggcctggtaccgaagcagctgcgcttctgcaggaactacgtggagatcatgcccagcgtggctgagggtgtcaaagcgggcatccaggagtgccagcaccagttccgaggccggcgttggaactgcaccaccgtcagcaacagcctggccatctttggccctgttctggacaaagccacccgggagtcagcctttgtccatgccatcgcctccgctggagtagctttcgcagtgacacgctcctgtgcagagggatcagctgctatctgtgggtgcagcagccgcctccagggctccccaggcgagggctggaagtggggcggctgtagtgaggacattgaatttggaggaatggtctctcgggagtttgccgatgccagggagaaccggccggatgcccgctctgccatgaaccgtcacaacaatgaggctgggcgccaggccatcgccagtcacatgcacctcaagtgcaaatgccacgggctatctggcagctgtgaagtgaagacctgctggtggtcgcagccggacttccgcaccatcggggatttcctcaaggacaagtatgacagtgcctcggagatggtggtagagaaacaccgagagtctcgtggctgggtggagaccctgaggccacgttacacgtacttcaaggtgccgacagaacgcgacctggtctactacgaggcctcacccaacttctgcgaacctaaccccgaaaccggctccttcgggacgcgtgaccgcacctgcaatgtgagctcgcatggcatagatgggtgcgacctgttgtgctgcgggcgcgggcataacgcgcgcactgagcgacggagggagaaatgccactgtgttttccattggtgctgctacgtcagctgccaggagtgcacacgtgtctatgacgtgcacacctgcaagtag

SEQ ID NO: 58 - DNA, 72332 bp, Homo sapiens
  misc_feature (70768)..(71491): "n" at positions 70768 to 71491 can be any base
ctatgggaaaacttcaagcagcccaacatagatgtaagtggagtccctgaaggcaggacagagttatcacaaggaagtgccttatgcatttgtagaggctgaacatgtccaaaattcataggccaggaactcaggaagaccatagacaggctcaacccatgggctttctgtctctatccagacaacccaggaaaaagagagaggacaatgactaatctcaataattagaaaggtgacatctctacagattctatagatattaaaaaataaacaggaataaacatctacatgtgtataaattcaacttctgtaaaatgaacaaattccttgaaagacatcaactaccaaagctcgcacaagaaataaataaacaaaatggttctatagctatttaaagaactgaattgtggttacaagccttcctacaaagaaacttaaaggccagatggcttcattggtgaattctaccaaacatttaagcaagacataataacaatttccacaaactcttccagaaaattaaagagttggaaatactcatgagtatctcatgaggccagaattaccctaatgcccaaatcagacaaagacattataaggaaaaaaaattctagatcagtacttctcaggaacatagatgcaaaagttcttaaccaagttttagcatatccaatccaacaatatataaagaggatgatacaccatgagcaagtgggatttatcccaggaatgcaaggttagtttaatatttgaatataaattaatgcaattcactatattaattggctaaataaaaacatataattgtctcaatagatgcagaaaaatcatttaataaattccaatatttatataaaaactctcagcagattagaactagctgtgaactgcctaaacctgataagtggcatctatgaaaaacttcagctcacatcacactttaataaaacactgtgtgtttcctccctaaacatcaagaacaacacaagcacatccactctcaccacttttatttgacactgtcctggagtttctagctagtgcaataagacaagaaaaagaaatgaaaggcatctagaatttaaaggaagaggtaacctgtctttattcacaggtaacacaattgtttatatggaaaacgccaacaaatctacaaaaaagaataagtctgctggaactaataagtgaacttaggacagttgcaggaaacaacatcaatgtactaaaagtcagcacttgcaacaaaacatggaaatggaaagaaataataccactttaaatagctgatagcttctggactaagaggaagctgcaggtagagggggcaggtggaagatttaggagagtatggaggtggttgctgagcctgatatgagaagaacctggacagaacaggaacaaatgctttgccgaagcttctggacccactgggctggaggacaaccagcaaggaacagcaaggaaggaaccagcaaggaagcttctggacccgttgggttggaggacaacctcagcaaccctctgaggagggagagacagaaactctctgcagagactgcaggttgtgacacagaagctgatggcctcgatttccctccatgaaatgggacagtagggtgccgttgacagtcagaaagggtgtgcaggaggtggatgctagggaggaagcccacaaaggggctgatggactggccttgtaagaaacaaaacatcatgtctccttggagccatgtctcctgtgcctcgccagggacagtgggccccagcttcttcgaccagggaagatggcagtcaatggataccccaatggctttttctcttcacctgttccccccactctcctgttccctagaaccatgttcccacataaaccacctgcactcactacttgtatcatgttctaaaaatcccaccatgtccctggagctcaggatcttcaaggccaaggggaggccctaaaggtgaagttgggggtgaaccagagtgaaggagagcatctccagtgatgagggagtccaagacccatgatcctgggtgatgggggtggacaggaggagcgtgactgtcaagctgcccaggcccaggcccatgtgtgaacagcagccctgtgaatcttgctcttggcctctgagccttggctctggcttatgctccaaagatggtgacactgcatctcctgtggtctcagggatcagctgggtcatgcaggtttcagcaggggttgtggtcaccactattcccatgagagaggtcatacccacaatgtaaaatcccacttgggctgcaggacagccaagggctagggaggaggcgccgctcatgtcacccacaaccttgcccagaaggggcactgcctctaggggaagattggacccaggcaccccttcagtgccgccctcctctggcatctccacttggtggcagtattggcccagaagcggaactccagcaagcagccaccaaccggtccctaagagctgctgtggcagcaaaacttagctctttcccaacaggaaagtctggggagtctattgccctcatttcacagggaagtaagttatggcctgggaaccaggattctggataattaatctgcaggattccagaactccatgatactgtgattttttttttttttttttttgagtagtggtctctctctgtcacccaagctggagtgcagtggcacagtcatggctcactgcagcctcgaacttgtggcctcaaccagtcctctcacctcagcctcctgaatagctgggactacaggtgcataccaccatactcagctaattttttatagagacggagtctcactatgttgcccaggctggtctcaaactcctgggttcaagagatctgctggccccagcctcccaaagcactagaattacaggcatgaactacctgtctggcccattgtgatttttttttaattctcaaatttgattttcttatggttctaagactctccatctatgggtccatgcttgaagaaccataagattctaagatcagagggttctactgactcagttcccctgcatcctataattctgtgtttggatgattccagcatttcatggccatttcatgggatcaaccaggattaaccacatggctaaagggagaggctgatggccctacttccatggttcccagattccatcttctcttcctcatagggaggtccacaattccccacatatcaccaggccacctgcaaggagagcaggtccaagaagtcaccttgcaatgagaatgagatcgtgtgcctcctacatcatgccctaagggagagaggacagcatggagctaggaggtggatggctggggtgtcaactgagaaagacatgcctgttggaccccagagttgacttttatggcatccaagagctgcctgtgagaacacacatggtttgatttgtgaagggatgttcacacaaccatcatgcgtcagccttctcaaaggtggcgttcgtagcacagcatgcgaagggctttgagtcaacagacattcctggaaagaaagcagtgtgggggtatggaaggatccctggaggctgggacctggagaccagggtctttcctgcgggcccattgctccttccactttgccttgagcccactctttccatacaaggagaggctgacctaaggttccagttgctttcatcaggtgggatctggtgaagggtcaaaatggaactctaagatgggtagttgaaggggtgacacccgaggagagagtgatgtctcaaaacagactgaattatttcccaaagaggtgccccaagcccctgcaaatgcactctctaggaagtctggccactgggccccttgccctcgtcccacagggcagctcagaaaggcaagctcatgaggaccggctcgtgtccacctacccccctcattgcctacaaggactcccgagcatgccccccatcctggcgcaatcttctgccctggagccaggaaaggatggccttctgagttggagtcctgcagtcggtcttccagtcttggagggaaacatatactctacaaatggtgagcctcggagagagcccagccctgctgtgctgcctccaggaggttcaggcggctatgcctcctcattcagcctcactgagccttttccacttccagaacatggtgaaattcacttccctctgaccacacagtgcttggtggatcaccgggcacacagtgggcctacagtgggcatggtagtcgctgtcatcactccgctccaggagccttcaagaaatcatctcatctgacaacccacatttaccataaggaccttttggaggccaggcgcaggggctcacccctgtaaccccacagtttgggaggccaaggcaagaggattgcttgagcccaggagttagaaactacagtgaactatgatggcaccactgcactccagcctgggcgacggagtgagaccctgtctcaaacaaataaaaaagaaccttccggagaactgaaggaaagtggaaatttgataagagatctgggctggagaggagaaaagtcttttaaaatataaatataacggcaagctcagaaagatagatacagggcaatggtaagaagcagacaggtaaccagattgggctagtgggagatgctcattgagacaagcagtgcagtggtgtgccactgtgagggggaaacggggatggtgcccccgccatcctgctttgtgactggcgtgcacggcaagggggcagagcaacaacttctgtgggctggacctgccctgggcaggggccacggggaggccacagactccggtctgaataaatacacagcaggaacccagagctgtggatatgtagaccccacacacagcctcccacagagggcaggtaacccacaggaagacagacagccctgagctcacagccatacctgcaaagccctgccaggacatacccacatcagtaatgtccacgggggctctcatggtgatattaacgcggaggaggtaattcccacagtgcctgagctgaacaatgccaacaaaggtggagacggggcggagggacagacaaggaatgtagagaggggctgcagacaggaagagcaactcacaactgtgcaggagggctcatcggctgtgacaggaaaacacacagagactgatagaaagacaggacagccatagacaggaggtgggaggcagacaggtctgtggcccagagaccctgtctcaccacagcagctttggggaagcaggtggccacgtcattttccttgtctctgtttggctgacctgtgcatctcaggcccagccctggctgctgtttttccagctgcagttcccaaactgtgtgctaaggcaccctgggacgccacagcaaattcccagggtgttgcagaatatcacgcctgtaatcctagctctttgggaggccaaagtgggaggatcacttgagcccaggagttcaagacctgcctgggcaacatggtaaggccctcgtccctgcaaaaaaaatttgttttaaagaaagtacaattgagtcttggacaacatgggggttaggggcaccaaccccctgcaaagtcaaaaacttgagtataacttttgactccctgaaaacgaaactactaacagcctcctgttgaccagaagccttgctgatcccacacacagtcagtcagaacatacgctgcatgccacatgtgttatcccctgtgttcctacaataaactcagctggagaaaggaaattcctgctcagaaaacctagaaaagaagccagactcacagttcatgaggcggcagtgggtcctcataaaggtcttcatcctagtggtcttcatattgagtggctgaggaggaagacagaagcggggcttggtcttgctgtgtcagggtggcagaggcaggagaaatccatgtataagtgacccacacagtgcaaacctgtgttgtttgagggtcacctgtcctgcatgaacatcaccttgtatggcctgagagccaggaccttgaacaagaagtgagagtgttgcttctggagggccagtaactgcagttatgtgaggatgaaataaaaatatgattcatttatttttaactgatatgattttttttcaaatagctactgatcattaagtggttggacctaattacttaataaacaaagctcttaggtatttattttagcctgaggagctgggcaaagaatgactataagttgttttcttgattaatttaatttaatttaatttaattttatttagagtcagggtctcactctgtcacccaggttagagtgcagtgatgcaatcatagctcactgcagccttgaactcctcagcccagatgatcctcccatcttggcctcccaaagtgccgggattacaggtgtgcaccatcacacctggccaattgaaagttttgatctcaagaacccactgcttatggagaaggcatccaaagagtgacccccacaaggaaggtcagggaagcttccagaagggaccaagttccaatggaactgactgtggaggggcactccatcttctgaccctggacccctaccctgtcctgctgctgttccttccagggtccctcagccagaaagcccccagagccttgaactctgtctgcccaaaccccttctctgttttcccccaacttatttttgctcaaatgagaaaaaaaggaagcaaaagatgaccagttagtgtctgaaatcctggcttgccccacccataacagggactcacacccgctgtagacagggaacccactacctcacacagcaaactgtccatcagagatgcccctcccacctggcttaccccacccaagcaggtatcttacagagcttccggggtgggcagcgcctcctctcgcctgggggcctattctggaaggagggagcacgctccctgggccctccagcaggccagaaatgatgttccctccagcaccatccatacatggggagttttgttttatcaaacacatggctggctgctcagggcttagctccagagctgcccggttgtcaggccttctcacacgtgccctctctgaggacgattagccctttcctgacgctggcttgcaaaggtctcacccacctccccgttccaagtgttggaatgtgggtctgtgtcctggccaacaaggaggtctgtggagacaggaccgggtctcagtcaccgttcagcagccacccggcatgcccccaggagcctgccctatgccttgacctcaacctacgccatcccagtccccagcgcaatgcacaggtggggacatagaccttgacagactggtcagggacagctccctttaggcaacagcagagggcgcttccagggaggcccctcaccttcctctgcaccccaagcaagggacaagaggtgctgtaggcaacatcacccgagcctggaagacactcaggagaagcccctcaggcccctgacacccagctggggtcccacccttgctctcccactctgctctccaccccaccccagcccagccccactgacttggctgctcaggagccgaggctctcggaggctcacagagggaaagaggagccccacatggtacaggcaggtaccgaggagctagttccagaagcctccactcgttcctccatgcagcctaccctggctccctggtatccagagtcttcagaaacaggagccctcgcttgagagcctggcctgggcaggctgagctcctgcctggggcctcggagtctgctcctcccttcatcttctgcagcctgggaagcggccggatctcagtgtgtctactacccaggtggcacgggcagaggatggggcctgatgggggagaagaaagcagccaggaggaggggcttgggaaaccaaggggcaagagggcaggactgagcaggctgcgctcacctgcccccttcagagaggtcacgaggcccatcctgtcggtgggcagagctggcatcctctagggggctctaatccccgagcctcatttctggggaggtgggggtaacaagagtctgcgtgcctcaggctgggctcaggcgcccaccccacctgcagcccaggttttccccagtaccacaattgggtgggatttttgctgcaaggccaagtccagaggagcacaaacacgctcctcccctccccctccctgaccccaccgccgcttcattccagagctcttccctctttccctctgagggtgggggccccgcagtgcctgggagaagcgggtgggcggccgggcatgcgtagcggaaactggattcccaaggtagtgaggagcaaagggaactttttttcaaagagaaaggctgtcactctgaattcaggactcctgacatagtcaccaggtgacccctagggccggtgtccacaggaccacaggctccctctgcaaacgcagaaccaagttgtgagtggggcacactgtgggaagcagctgcctccatcagccagccagtgacacacctggggacatctcagccaccccctccctgagaagctgcacagaagcggccacatgcccatccctgcctctccatgcacctccctcccgcaactctgcagccgcacaggaggcctagcccacaggctgggcagtgcagtatccccagagaacacaccacggatgagtctggagttgcttggagctctcagaagctcccggagcctccttcctcaattccaacgcggtaaccaagattcctgctgagcttaggtcacagtgtgactgcaggaggaccagccgcgatgggagagtgcctcttaaccatcccagttatcaggtcccccgggggaggctggggacacttcccctctgcaaattacaatctccccaggcggctcccggggcaacacatggatatgcaaatgactgggagctggagagttgactggtcactgggtgaccttgggcaagtcactttccctctcaggtcttcccctctccatcagcaaactcctaaagcttaactaaacagtcagaaatccctctgtcggaacaggctgcatagctctgggcagacctggaggttggtggtcccagaacctgggggcagcactgcgcttccccaccgtcccatcgcgtcaggggcttccactgttctcttccctggtggagtgatggggagaaaaatggaggggtcaatccctgcgccacagagagagtcccactcgtccccagctgtgacccacagacgcgtggctgcaccttggaggtccacctggccgctgtccccattgcaggctgcacccatcccggaccctttctatccgccgaaggcgcaggcagctctggtctcagcggaaggagtccggccgcaggcagacggggccaaaggacgtgcacccgacaaccgtccgctccctccccaaacccccgccccgagaaggttgatggatgaaggggagccctagcccagccacctcgggggcaagagacggagctcgccacagaccaggagcgagagggggactgcgggtcccaccgtgagcgcagggcgcgcggggctggaaacccaggacgcggcccgggagctccaggagggcgcctgcggatcgcgcggccccgggccggccgcctgcccatctggcgcaccccagcgcgccgcgcacacctgggggcccgcacaccagcacgtcctcagacacaccgacacccacggcagcaggcgggggccaacgccgccgccgcggttcgggctcccgtggccccgcctgcccctgcctgccccgcccgggccccggccccggcgggcgccccccgcggcgctgccccgcccccgccgccccgcgccgccccgggcctcggcccgcagcccggccgccggcccacctggcgcagcgccgccctcggagcccgcgcacacccgcgcacccgcggccgcaggagggcccagcgacgccgccgcgccagctcccagggcccggccccccccggcgctcacgctctcggggcggactcccggccctccgcgccctctcgcgcggcgatggccccactcggatacttcttactcctctgcagcctgaagcaggctctgggcagctacccgatctggtggtgagtgagcctcctcgcgttcgcccctgcccctgtgcgccgcgcccgcagcagacggtcccctcgggcagggaccccgcggtggcccgagcccgcgcccttctgctccagccccgcgtgcgggccgcgggcggttggttttccttgacggccactttggacctgttcaggccgctgggacgcgtgggtggcggagtttccggagacattgattcccgagcgggggagtaggggaggttgcggaggtcctagctgcccctggcgtcggacagggcgagcagtgggctggggagaggctgaaagaaggtcggcacgcacggtcaccgaggggacaggcagctcgaggccaggggacaggcgagggaagagggccagcgagagagaattcgccggagactttcctcaaaaaccgtatcttacacacaaacacacacacacgttttaaaacaaagtcgatgagacaagactgaacagctcggagcagcgtggttacgtaaagaaagctgggacccggcggggagtggcgcagagccggcggcggggcgcactgggggccggccctgggccccgcgcgcctccccgccgcagtccgggcacgggggtttccaggggccctctctgcgagccctccgcatgggtccacctggcaatgaggggctgctgtagagagagttaagggtgagttaagcacggggtgtgaggggctccaggaccctcaatcagaaagcgctgtgctgcgccctccacaccagaaaaggcgcgttccgtgagaccctccccagcctggcgatggaagtgcagataaaccaaaggaagggtcccgaaaggtctctctcaggcctcccacctccactgcacatatcctgtgggagggggaacggtggccacactttcgccagggcttgtgatccctcagagccctcaccaagcaaggatcaccccagttccgaattaagggcgctctgagatgcccaagattgaggaacacaagtgggaggaatgtgggcgcgcagggccgggcgcagcgctggtaggacccacagttggagagaagcctccccacaagcatgcacactcccccccatccttctccgacggcagcctggaattataataattacgccgaggggaaggggggagacccagcgagccgaggtacatctaatccgataataatttttctcttcgagatggttcaggagcgggggctcccgcggtaggggcgccgggccaggagcagcggggaggggaaggggcagccctaggcagctgaagggcctggaagaggccacgaggccgcggggacgcgcttcggggacccccgcgcgcccctatttccgcgtgccccatttcccgtgcggcacctgctgcgcccagtggcccacctgagggtcaggctcggggctcgccttggggtgcggggatactgacgcgcgtccagacggccgcagggagccaggggcagcgcgtccgtccgagagagccccgagggctgccggcttacgcaccaggcttctaattagaacccgccgccgcgttcctgagcgcaaaaggaagctccttcgccccgcgcccttcccataaatgtcgccagcctcctggcaaccccgcgccctaggatctttgtcttgtcggccctgagggttcctagcctcggtccccatccacctcatatgcatgtatacctccttttcacctgggccccctgtgttctaccctgaatggaccctgagacaccctcggggacagtcaggcattctgcaggggagccaggaggagcagagaagtgaagtccctgtaccctccgcaccctcctatcaagagtccaggacagccctttggccacacagggaagcggggcatagaaccccacctgacactgaccggggtgggtggtgaggacccctcccccatccccaccaccactttgttctcagtagggttctcacacttggggattctctgcttcctgagaagcagcctccccttgggggaggctggctccctggggacaagtctgcccccttcttgatcccctctctgctcccaggcaggctgctcgggctggagcaaagacatggcttcccccaggcatgagcagcaccccggcagcatagggaagaagactcacagaaggacgcagtgctgcaggacccctgctgctggacccctgccgctggcatcctacagtttaatagccttaatagccggggaagattctctctctttctctggtcttctacccagtagagcatctcctcctttctcctgcctccccgcatccaccccagattaagcatcaccaggggaggaggggaccttggcccctgccaggtgggctcctggtgagccccagtggaacagagcaggctggggtggggggcctccctgtaactcctcacctgtgcccccagcccctccctaacatgaagccgctggccccttgattctcccccctccaccatcaccggcacatgaaagtgaaagtgaaggggaatctcctcacctggagaaacaaaccaggaaacagcccaaatcagggtaattaggcttttgaagttggcagagggagaggcaaaggtgtccctgtggccagcagccctgtgagagtgtgaagggccacctgcctccccagggctgggtggcccagaggtgtcttatacccacgcagcagatgccagtggtcccaaggctgagcgggtctgaaatgcagagagacgggcctagcctaacactgaatggcccagagctgcacagatgtccaggggcatccattctgagctcatccagtgacagagaggagacaggcaggagaccagaccaatgcatatgcatctgcccacctgcgtcccatgaggccacagacggcaggaacctagtggccccagcctcccagcacgccccttctaagctgagttctcaggaacaagaattcttggaagagcccacatggacagaggacagggcagctgcgctgcaaggagaccatggctccatctgagaacaatccccaggcacacccgcactccagggcactctgagcacctctcccttcttcccatgtctgggttaacggaatcttgtcatctccccagggaccccaccaggaccctagaggtgggcctgtgcctcccgccaccgcctccccagggtccaagcccacttcagggcttgcaactggattttgttcatctttcaagtccctctgctgcctttaccagactgggctgtggcactcccgccacggccacctcctgcttccgttctcagtcctggccctcccctgggacccacaccctcccagccacctggagttgctgccaggcctggccatagccaccgtcgctgcctagtggagcacagcaagctccaccccttacccagccctgctctccctctcaggccgttccttctgcccggccgtcaccagctcctgctggactatgggatcccaagcacagaggcctggctgcttgcagatggccaccccagttgtcccagcgaagtgcagtgtgggctgtgtccagccttttgcctgcccctggcctgctccacagcctcgctcatgctccctccagggtctccctcacatccctctgggcctcgagcttgtcactatgacagaaacacatcatgacctccatttttatagggcacctcacacagccctcaacagaagatgtaggccctttcaggcccccactctcctacacactcatgggtgcaaacaacctcctgggcacaagagctcagcccctcctcctagcccttcatgggctggagggccagcacacttggaggccctgctcagccagtgtctgcactgcaccaccgccaggcacttcgcccctgtgtcctcagtcctggtgggcctcattgtggtggggagacagcctgactggaagaggggtcgggtgaagaggcagcttagagaggcaggagccaggaaagggtgcaggagagaaggagctcggctggaatgatgggtcaggcatacgtgtgtggtgtgtgggcaggtggctgcagcatgggtgtttcggggactgagaggggccagtcgagcagggcagggacatggcccagggtacccagaagctcagatgggaagggccttgtgataggagggatggttgccactcccagagtcaccctgcctccacattagcctgccactggcccactccctctgcaggcctggcctcaccctagccccttcttccttctcccttcgcccgcatctgtctgtgtctctctgtctctgtttctctcttccctgcctctgtccctccatatctccatacctttgtctctcagtttctccctgtctgtctctctctcttccctgtatctgtctctgcccgtctctgtctctatctctctgtgtctgtctctctctttcagtctttgtcctgtctctctctgcctgtttctgtcactctatctcttttcatctctgtctttctgtcttttgcagtctctgcctctcgtctctgcctctggtgctgaggacagcagtcactagcaaataaaactcgtgaaacgagctgagtggagccaccaggccagccctcccagagctgtgggatctcagggccctgggggtggcattgcttctcagagctgcccacacacaaacccctcctgagggtgacggtcaggagtggccacacgtcaagtgtctgcaaccagacattggccctgcataactgccaggatccgtagccgcctcagggacgcacagcacccttccagagtgcaaagctcctcctgcctggtgctcgcacctcaggcactggccagcttgggcccttgaggccagctgcccctctgactcacggggcttgttctaacgatgtttgcttcgcataagcctcctagaatcttttgtagcagggagagcaggatgagtagatacagtcatagcagcccagtcttaggggtggtgactgcccggtggccacttcttccactgggtcccttgtgcacatcaccgtactgtgaggagggaagctccggtgtccagcagccctcccaagatacaggtgacagggctcccgccatctccatccagggaccccgttggggcttctcaatgtggggcctaccatgcagagcccaaatgtgaatgcttggccacctgccatgaagaaatcagaacagaaatgggaatttaaaaaggatttggtgacattgtagcggtttgacggtgctgcaaccatttctgtggattttgtaataatggaaatttaaaaacaaaccaaccacgtccctctgttgggactctagtctgagaaagccagcctgaagccacacctggagtaatgggggtgggggggctctctcaatgtggaccactgcctgtagccctcatccattggatttttgacccaaacgtgagacttctaacttgccccctttaagagtagttgaagggctggttgctgtttctgttcagaagacccgcttcatgtctctgaaggctattggctggggaagaaggattagactgtggctcaaggggcaggggctggggcagaggttgcaggtgccaaggaggctggttctggctcccaaagagaaaaagctccctagggatgagagcctgtgccccaagtggtaccagggaggtgctgagctgcagctaccgaggccgaagaaaaggaatgtcattcacaaaggagacctgtacagccccacagacagggtctcgctctgtcacccaggctggagtgcagtgatgtgatcttggctcactgcagcctcgaccctcatgggctcaagtgatcctcccatctcagcctcctgagtagctgggaccacaggcgagcaccaccactcccagctaatttttgtatatttgtagagatgggtttctctctctacaagaaaccatttctctctctagaagaaaccatgtggcccaggctggtctcgacctcctgggctccagcagtcctcccatcttggccttgtgagtagctgggattacaggctcgtgccactacgcttggctagtatttttcattttttgttgagatggggtcttgctccgtggcccaggctgtgcactttaatgttggacaatcccccaccccacccctcactggttacagccctgaggctggtgaggggcacatggcctcttccttggcctccctactggcctccccaggtgacaccctggaggtgtctctcacgttgctgcttccacattccttccccggcaaaacgtgccgctgccgcccagggaaactggcaagtgcgtggccgcgggcacaggagccgctgtgcctgctgggactcgttcaaagtatgtgtcagtaatcccagctgggccggcgggcaggaggaggtgcgggttgggagagctccaggcagggctgggcagcctggactgggaagggttgccgacacccaggagggacctgggggccttaagtcctggggaccctggccggctcacaaggtgcttgagctgccgagagtggtcttctaggcagctgcagttccaccactgggtgtgagaagaaaccagaaccttgggggtctcccaggcaggtgggtgccctcgggcagtctcagcctgggcgagatgggaggtcatccaccaacagggaaacacttcgagcctcaggtctgaggaaggaagccttatcaccgcccatggagtggccctgatcttaagaagacaaagatttggaacaggatgtttgctccagaggccccacagaggggaagcccacctgcccaagcaggaccctcaatggcagagacacccacctgccctggtcctccacacctgcctgcattgcagctgtgctggagccagaggggtcccaggaggcgaccagctggactcagggcacaaattgcatcctggaggggtggccctggcaggtccgcgagtggggtgcactgggtccctctcaggccaggaggaggctgagatgacatccagcagggcagcagggcctgagatcagtgtccccattccatgcactgctcccctcctctctcagagcttcaggtaggagaggggtccattaccccatttgacagatggggaaactgaggcccaggaggggaaagagagaaagagcaaacaaacaagcgagtaacagggcccgagttggagcccatgcccaccttccaggcctgtccacacgcctgcatggagcattactgtgaggtccccacgcccccagcaaacatgcaagcacagagccgtgcccttggtacatgggtgctctgagttcgctaaattttactgctaaaagacaccaggcctggacttgagaaacctaagagcctgccagcctcagaaggacttgcacaggaacagtggaggctggatatggtggccactcaggacccccacagctgtgtggctgcgagaaggcccccacgctttgccctgagcttccatccacagggattaggtagcacctccagtgccgccacgtaagatgggaaattgcacatgggaccaaaccaagccggggaggccagcgtggcccggactgggctggcctaccgcccgccttgtggtcctgggccagcctccttcttcccctgcatgtcacagccagcatctctgccgtacctctggcgagctgcccagcctttcaacagaagtgagggagtggggaagaaaaaccattagtgcttgtgggctggaggcatggctgctgtgactttggccacaggcggaagccatgggtctagggactggggccattttataaaactacatttgtgtgtgttctgagtgaatatgacagcctccccttcaaaacaaacgattgttaggaaaaaaacaaaacaaaacaaaacaaaacctaacagcattagtgaaaatctggaaggaaagacaagtctgtgatcttatcaactttttcaactttttgtttttctaaggatagaaacagtttgtgttctgtttttgaaaactcactaagcatcatctccatttctggggccttctggatgatcacacgatggttccactaggtcttgtggtgctggtactgcgatctgctagcccagccctgccgttccctccagagctgggattccagggaaaggggacagagcaagagaggctggagatattggaagagcagggtcacattcccttgggacaccaattttgcacagccagagggatatctggtgtcccatccagttgggcagttagaattccagccactcagctgtgtggcagctggacgtgggaaacatggactcttcctgggacgctgtggtgttggcagtgagaggggagagggaatgaattcctcatccggtgaatcacaggctcggggtgcagggcatgggggcagggagggcaggctggcctcagcctctccccggggactgggcccagccttcctgcccctgctgttcccaccaccctgaggcagggcccagacctcactgtgatccagatcgttggcatccaggaagtgagtagggagtgacggatggcaagaccaccacccccgcctcccccccacccccgccgcccaagtgcttacctgtggttccttgtgtgagtgatcctcagcaaggacccttcgtccttgaccagacacttgtttgcatgcctacaaagcgtgggagaggtcgaaggggagattggagaattcatcagaagccccagaagcccaagtgggagctcctggccctgcctgctggctggggccacgcttgtcttagggcaccaggcaggacagtggccaatcgtggctgctccgcctgaggccatgagcaggcaggagccacggactgacagccagtgctcagggtctgtctgtgcccgtcaccttctgggcacccgatgttgcccctttctgtcccccgcatgtgctttaagcgcctgctactaccttgctcttttggggatcctactgactagagggtggaggtaggtccctgaccccccagggtgattatcagcaaggctgactccccagggactcaacccaagggagcccccaaggaccctcagagtcctcatgaagacagacaggggccatggagcaagtttagactcaaggaagccatagaagtttccccgtcagccttagaatgtccaagctagaggcagcctgggtgaacccagcacacattccctgtggcactcacgctcctggggccaccctgggaggaccctgttctaaaccacaactgcccagttcagttggggaaactgaggttccaacagtcccaaagctgcaggtgcaactgttagggccaccacccatgtccccctgggtggcctcctggggtggaaagggggctgcattggggacaggaagccctatgatgtcttgggtcatcagctgcaaggaggctgtccagggtctgtgtgacttgcgccatttatctctgactcatttataaatgttattttgcagggactggggtttcatacgtgtacttgtccattctgcattgctataaaggaatgcctgagactggaaagaaaaaaggtttaattggcttagggttctgcaggctgtacaagcatggcaccggcatctgctgaggcctcagggagcttccactcatggtggaagtcaaaggggaggtacgtgtgtcacacgcgggagagggggcaggggagggtgccaggctccttctaacaaccagctcctgcatgaactcagagggagaactccctcattaccgcagggagggcactgtgccattcacgagtgatctgcgtctgagacctaaatgggtggggcccactaggccccacctccaacactgggggtcgcatttcaacatgagatttggaggggacacacatccaaactatatcaacacatttgaagggcattgtaggatcttagaaagcagtggcccctggaggccaacatgcgggaagccctgttctgctgtattagccggtggctgtggcaaagctccattccctgagccttggcttcctgctctgggaggtcccagtgccacctatccaggtcctgtgggtttcagggagccacataactagagcccgtggggaggtcaccagtgagctctgcccagcaggtggaggccaggtaaggggctgggtggtggtagtaagaggagcgatgctgggtattggaagggagaaacaaccagcttcagcaagcctccctttcagagacaagagtgctggaaaggtggagaggccgcaggaggagggaagaggagggactagctctctaaagaccacagtggccaggcgcggtggctcacacctgtaatctcagcattttggaaggccgaggcgggaggatggcttgagtccaggagttcaagaccagcctgggcaacatagacagacaccatctctacaaaaaatacaaaagttaaccgggcatcatggcacaggcctgtggttccaactacttgggaggctgaggctaagatgggaggatcccttgagccctgtaggtcaacgctgcagtgagccctcagcctagacgacagagcaagacttcatctctaaaaaagtaaattaataaaatttaacaaataataaaggccatggcagtgggctggcggagacagcggtggctcgggcccctggagcttgcatagcaagatgctggaggtggcagcctggccttcagatccttctccttctctgggtctgagaagcttaggtgttggaactcagaggtggtcaggaaatgccagcatgagcaggaaagtgagagggagtatctgctggctcccagtgctgcaagaccctatctctacaaaaaatacaaagcaagagaacagcacgggggctttgccattggctaacgcagactgacctccccagtttgggcatgaacatccttttcacgttccaaggtgggatccgggagtccaggttgcattgtatttgatgcaccctgagaacttgcgctgagaacaggaccctggggacactcgatctcgaagacggggttctcattcactctccatttgcagagcccctcccccactcactgcagccaatactccctggcgagaccctgagacaggcctgtctgtcccttgtcccaggcaagcctggcccacagggtgtgggaggaggaagttacaggtcatagtttcccaagcactgatggattccgggcatctgcattctccttggattagaaatttggatcctaggagcttttgggggctggtgtggggatagtgcctgtgcaatttagatttttttttttttgagacagggtctcactctgtcacccagcctggtgtaatcagagctcactgtggccttgtcctcctgggctcaagtgatcctcccacctcagcctcccaagcagcggggactacaggtgtgtgccaccacacccagctaacctttgtatttttgtagagatggggtcttgctctgttgcccagattggtcttgaactcctggcctcaagcaatccacctgcctcagccttccaaagtgctgagattacaggcatgagccaccatgcccagccttatatttgattttctttttaatgacccaactgatccttcaaggcccagccaaaatctggtggcccagtgagcctccagggccctcctctgcactgctccctggccccacaggagctccccgctgcctgccagctttccaccctcctcaggcagggtctgtgtggcccaggccttctggtggcctggtgctatcagaaggagaaatctctcaggaagcaattcaacgaactggaggggccctctggtccacaggaggcaggagaagcccatcctgaccccaaatccacaagggcccgtcaagggaggggtcccatcagggctgtgagaggccagggatgctggagccacctctggcctggcagctggccacctgcaccctggccatactcaggaaggtggtgggccagggcccacccgggaggagggtgagaggggcacagaactggctgactcagcaccctgagaatggaggcttcagacttgggagtccacctctctgctttatctagagaccagggacaaggccgcccctcccagccccgagcctgcgagctgaggtggtcccggctccatgctggtcatagtgttctgggggtgggcagagtgacagcccccaaaatgaatccagcatctagcctcggagaagggatgagccttggaaatggccgcatcccccaggccagtccctgttttgtaagcagcaagctctaagtggattcctttgtttctcctcattctaagtctccaagtaaaaaggacattcaactactcttgcttttccttctttcagacacctcttgctcacttccctggctgtaagctaggctggccctggagcctgggtacccggcccttctcagacacactcccaggcctcagccatgacactcaagtgtttgtcctctacaacattccattaggaaaattttcaaacatctggaaaagatgcagcctttggacatcaaagccttgtgtgtccacagctcacactgaagtcagcctgctttatctcacacccaccaccctctccattctctatctatccgtcttatctttttatgcttacgtcagtctgctctgtcccaaatactgtagcaggcacgtcctgaaccagtgctggatgttttgcaagtaacatcccacatggagtcacaccatagaatgggtgaaggggaagcatctgggttcatggaatggaggcacctcacctggggcaaccacctcaccctggcttaaaaatggaagccccttgcctgggcacggtggctcatgcctataatcccagcactttgggaggccaaggcaggtggatcacctgaggtcaggagtttgagaccagcctggccaacatggcaaaaccccgtctactaaaaatacaaacattagccaggcatggtggtgcacacctgtaacctcagctactcgggagggtgaggcaggagaatcgcttgagccaagagggggaggttgcagtgagctgagatcacaccactgcactccagcctgggcaacagagcgagactccgtctcaaaacaaacaaaaaaggaagcccctgcagtcctgggcgaagcagacagttggtctcccggcctcacccatgggcacccccaggcccctctgctggcgttcctgggtgctctgaggtgcatggtttgaaaaccacgagtccagcccctacggtcacctccctggcctggttcaacccaccttctcctgtccagaggcctctcacccacagtccaggtcacagacagctgaccttggtcaccaccacttggccctgggcagtggcagtgcagaccataccccagggaccccggatggtcatccagttgccgggactcaaaggaagagagaggatgaggaaggagacatggaaaaagactacccagctacctacagcaggaacaccaacccaggctgcatcagcacttcctggaagtgctgggatctacaaaatggtggagggggtgtgcagggacacctggggcaggatacctgcgtgtagtgaatgaataaagaagtgaacaagggagccgactgtgcaaggacagactgcaggggtgcaggcttgagtggtggcctggggatgcacgtggggtctggcgcgaggttatgcactcaaatgagggacagacaggagggagggtgactagggagagggaggccagatctccagggggtagacatattggggaccctgaacactgggagtccggtccggaggccagactggttggatccagtggacacatcgacaggtggtcataagcataaggaactctctccctccacccacctccaccagtgcccaaaaggacctggtgatttctttaaattgaggtgtattttgtacagcaaaatggaagaccctaagtgcatggctcaattcgttctgacgtgaagcactcacataaccaacatcgcagtcaaacgcagagcacttcggccaggctggcctggcagagcttccctgatgacaggcacattccctatctaactgtcccattcagggtagccacgggccacacgtgaagcatggctggtgccaccgaagggctgagttttacatttcttgcattttaattaattttaaacttaattacattaatttaaacggcacaggtgtcgaatgccttttgccaaaagcagagcacagcctgggagctgttgggacctggaaaacgaggagtgaggttgccacggtgctgacctctcccgcggatgagtgttgcctggtcttgagctcagactgggggatgcggagggccccaggagcatctcacagttgagcccctcctccccacgtgctcacgggagcccatgccttcgggtttctgagcagcctggcaccctagaggcagtcttcatttgtttattcactctcctattgacggatgcttgggtggcgtccaagttcctgctctcaggctcaaaggcctgggaagattcctgaacacgtctcattgtggacacgtgtttacatctaggggtacatagccaaaagtgggcctgcgggctggcgggatgggtctgagttccacagtgatttctgcgctgggtcacgcctacatcccggaagccaggcctcctcctccaatcccaaagccaagggcatcccttctctgggcagcccccacctgacccggtccccagcctgaggttctcaggttctagccctgagtcccccattgggctccaggtcaacctggtgtgaacggggcccatgcagttgtgctgagcaggaatgcggggctgcatcatttcctgttacagatctggacgacttgaattctgagctgagttttggggatagggcaggtcagggtcctggccttgtaaaatcagacttccagataaaacatacagaaaaacacatagatgatatcaaaacatctagaaaaaattaaatagccagcattgagtatttattctgcacacaacattgtattaagcacttcctgtataacatacaggcttaagagctgggcaaggtggttcatgcctgtaatcccagcactttgggaggctctagcgagaggtcacttgaggccaggagtttgggaccagcctgggcaacatagcaggaccttgtctctacaaactgtaaaaataaaaattagctggctctggtggtgtgtgcctgtagtcccagctaatctggaggctgcagtgagccatgatcataccactgcactccatcctgggcaacacagtgagattctgtctcaaaaaaagaaaaattagaaggcatggtttatgaacattattttagaggccacagagaatccttaattgggcttttaagtaaaaattctcttacttgcaaaataaaaaatcagatttccttcatggtggaagctgcgtctcgccccccgaatgcacttgaggccccagagcaaagggtctgtagcctgctcatctgtgtcgctgtcccagccccacactcaccaccggatcttgccctctgcaggtcgctggctgttgggccacagtattcctccctgggctcgcagcccatcctgtgtgccagcatcccgggcctggtccccaagcagctccgcttctgcaggaactacgtggagatcatgcccagcgtggccgagggcatcaagattggcatccaggagtgccagcaccagttccgcggccgccggtggaactgcaccaccgtccacgacagcctggccatcttcgggcccgtgctggacaaaggtatgggggtggtctgggggagggcagatgagtctggagtgggacagagtctcccgcctagcgctgcctgacattctcatctgtgcacacggtgggaacagtgcctcacgcggacgctggggtccttcccgcttacctccaggaggacggtctggggctgaagcaggactgagcctgtggggttattcgggtatccctcctcctcctgctccctggagaggaaagcgggcattctaaggtgactccaaccatggccagtggcggggctgctcccaggagccagggcacaggccaggcttgcagaggaaatacacaaacttaaagacctacaagaagggagaggtttgggggcaccctagagaagaaagagagacagagagaaagacagagagagacagagagagagaaagatagagacagacagagacacagagagagacagagacacagacacagagagagaggaacagtgagacggagaaagagacagaaagatgcagagagagacagagaaagacacacacacagagagacaaagacagagagagagacagagagggacagagcgaccaaaagagaaagacacagaggaatagaaagacagagacataaagatgcacagagacagagagagacagaaatagagagagacaaagagggacagagagagacacacagagagaaactgagagacagagagacagagacggagagaacatggacaagattaaaactttagcatctttttttaaaaagttgaggtgaaattcacataaccgaaaatccgcgattttaaagtattcaattcagtagcatttggtatactcacagaattgtgcaaccatcacctgcctagttccaaaatatctttatcacccaaaaaggaaatctgtgcgcattaagcagccattcccgttcttctcccttccatagcccctggcacccacccgcctgccttctcccctgtgatttagctactctgcctgtttaagaaacggcatcactcaatattttgcgtctggctttttttcactgagtgtgttgattcacctgcactgtggatagtttcagcacttcattcctgttcatgggctgaataatattccattgcatggatggagcacactggtttattcgttcttcaggttgacgcatatgagcgtggtctccaccttttggctgctgtggccttttcttggacatgcatgtgtttgaacgccgttttcacaccttttggtttctgtatctaggagtggaattgctgggtcacagggtaattctgtttcgctttgcttgacctgggaggtcaaggctgcaatgggctggaaccatcacactattttccacagcagttgcaccattttatattcctaccagtattgtttgagggttccagattcatcctcactgatacactgttttctggtgtttgtatttcttacttctggccatcctagagtgtgaagtagaacctacttctgatttcagtttgcacttctctgatgaccgatgatgccaagcaccatttcatgggctttggggccatttgtagaccttctttgaaatgtttagtcaagtcctttgcccatttttaaattggattctttgtctttttgttgttgagttgtgagtgttctttatatattctggatactggatgtgcatcagatgtatgattggtgaatatttctctctcatcgtgtaggtttttttcatttttgtgagagtgtcctttgatacacaaaattttttaattttggtgaaatccagtttatatagatgtcatactgaagcaagaattagctaacataaggtcacaaagattcacatctatgttttcttcaaaaaacctaatagtttatcttttactttgaagtatttaatctattttgagctcatctttttatatggtatgaggtaggaatctaaccacatttttttgcatatggaaattcagttattccagtaccttctatggaaaaaactgttctttttcccatcaaatggtcttggcacccttgttgaaaatcaattggtcatagatgtataggtttatttctggactctcaattccagtctattggtctgtatgtctgtcctgtcaccaataccacattattttgattgttgtagctttgtggtatgttttgaaactgggaagagtaagttttccagctttgttctttcttttccagattgtttgggggggacaggaaaaaagattgttttggctatttggggtccctttcaaatatatgtaaattttaggagcagtttttccatttgtgcaaaaaaaaatgctgctgggattttcatggggatttcactgattctgtaggttgccttgggaagcattgcctccttaacaatattaagttatttaattcaggagctcagggtctttccatttatttaggtcttcttccttaattttgtttgtttgtttgtttttgtttttgagacagggtctcactctgttgctcaggctggagtgcagtggcatgatcacggctcattgcagccttgaccttccaggttcaagcgatcctcctgcttcagcctcccaagtagcagggaccacaggcatgcgccaccatgccctcccagtgtttgtattttttgtagagatgggattttgctgtgtttcccagactggtctctaactcctgggctcaagcgatccacctgccctggcctcccaaagtgttgggattacagggcatgagccactgtgcccagcttctgtaatttctttcagccatgttttgtagttttcagggtatgagttgtgtacctccatggttaatgtattcctaagtactatttttctttttgatgctattgtcaatggaatcatttttcttttcttctttttgttttgagacagtgtctggctctgtcacctaggctggagtgcagtggcaccatctcagctcactgtacttccatctcccaggctcaagtaattctcctgcctcagcctcctgagtagccaagcttggctaattttttgtatttttttttttttttgtagagatggaggtctccctatgttgcccaggctggtcttgaacttttgggctcaagcaatcctctcgccttggccttccaaagtgctggggttacaggcgtgagccactgtggccagcttgtaattgttttcttaattttttttcagattttccattgttaatatatagaaatttaactttttaatcaagaaatacattttttttttagttttgatcctcaactgtaaccctgcttaatttgtttgttagctttgagagggttttggtgaattgtgtagaattttctacatataaattgatgtcatctgtggatggaaactgcctcctttcttcctatttgaatgtcttttatttctttttctttcctgattgctctggctaggacttccagtgctatgttgaacagaaatggtaaaagtaggcatccttccctcgctcctgatcttagggtgaaaactttgagctgcctgcatatatggtgttggctgcaggtttttctttctttctttttatttatttatttttaatttctatttcaataacttttgggatacaagtgtttttttgttacatggacaaattgttagtggtgaactgagattttagtgcacccctcacctaaataatgtacattgtaaccaatatgtagtgttttatccctggcttccctcccaacctccctcttctgagtctccagtgtccatgatatcactctgtatgcctttgtgttctcatagcttagctcccacttataagtgagaacataggatattggttttccactcctgagttacttcagttagaataatggcttccagatccatccaaattgctgcaaatgacattatgtaaatcctgttaatgtctgagtagtattccatggtgtatatataccacattttctttattttattttattgagatagggtctcactctgtcatccagcctggagtgcagcggtgcgatctcggctcactgcagcctccacctcctggtttcaagcgattctcctgcctcagcctcccgagtagctgggactacaggcaccagccaccaagccccactaatttttgttttttcagtacagacggggtttcaccactttggctgggctggtcctgacctcctgacctcaggtgatccacccgcctcagcctccctaagtgctgggattacaggcgtgagccacggtgcctggccttatacaccacgttttctttatccacttgtgagttgatgggcacttaggctggttccacatgtttgcaattgggaattgtgctgctgtgaacatatgtgtgcaagtgtcttcttcatataatgacttcttttcctttgggtagatacccagtagtgggattgctagattgaatgatagaactactttcagctctttaaggaatcaccatactgttttccacagtggttgaactaattgacattcctaccagcagtgtataagcatcctcttttccccacatccataccaacatctattattttttgatttttcaataatggcatccttgcaagagtaaggtggtatctcgttgtggttttaatttgtgtttccctcatgattagtgatgttgagcatttttacctatgttttttggccatttgtacatcttattttgagaatgtccattcatgtcccttacccactttttaatgggattatttgttttttcttgctgatttgtttgagttccttgtcaattctggatattcgcctttgtcaaatgtatgctttgtgaatattttctcccactctgtgggttgtctgtttactctgatgattatttctttctgtgtgcagaagctttttaattcaattaggtcccatttatttatttttgtttttgttgcatttgttttggggctgttagtcatgaattatttgcctaggttgatgtctagaagagtttttccaatgttgtcttctagaatttttatagtttcaggtcttagatttaaggctttgatccatctggagttgatttttgtataaggtgagagatgagcatccagtttcattcacctacatgtggtttgccagtttccccagcaccaattattaagtagggtgacctttttccaatttatgtttttgttttctttgtcaaagatcagttgtctgtacatttttggctttatttctgggttctctattctgttccattggtctatgtgcctactttcatacaagttccatgctgttttggtcactatagccttgtagtataatttgaagtttgcttcaaattagtatagtagtataattagtagtataatttgtttttgcttaggattgctttggctatttgggatcttttttggttacatataatttttttttttttttttttttgatggagtctcactctgttgcctaggctggagtacagtggagtgatctcggctcactgcaacctctgcctcccaggttcaagccatctcctggattccctgcctcagcctcccaagtaactgggattacaggcatgtgccacaatacctggctaattttttttgttgttgtttttgttttttgtatttttaatagagacggagttttgccattttagtcaggctggtctcaaactcctgacctcaagtgatccacccaccttggcctctcaaagtgctgggattacaggcttaagcaaccacacctggctagttccgtataaattttaggattgtttttcctaattctgtgaaaaatgatgttggcattttgaggggaattgccttgaagctgtagattgctttgggcagtattgtcatgttcacaatattgatttttactgtccatgagcatgggatgtgtttctgtttgtttgtgtagtctatgattttcttcagcggggttggctgcaggtttttcacaaatgccctttatccagttgccccaggtggcagtggctttatttaactttcaaggttttcaaagaccacccttcaattagccactgctctctcctgagacagttctgagttaggcaaaacgagttttttttttacccagacaggttaaaacagacaaacaattccttggggaaaaggtctgctccgctccctccagaactatccacccacctggggaacgccggccttcactgtcccaggcaggtttgtaggcaccaccacatgaaaacactaccaggctctcctagcaagtcaaggtcatcatttcctcaagttggcattcagtgggttgcggtgaccctttgactactttccagagagctaacaatgtcggtactaaccgtttgtgtctaattttttggagggcccttggagcttccttttgggttccaggctgcgttctggggtagaggacacagatcccaccactcgatggagcatcaaggtcaccttgggagacccacatgtagggcggaatgtgcatagtaccatccaccccagggtggctcagcacagtcctgccggcagaggcggggcccagggaaccacagctgtgctgagcatgtggtcagcaggccgaggagactttggagaccatggtgccgaaggaaggctactcagacaaagcgagacaggtcacgctgggaaagtcctcccagggaccttgcagtcctgggggtcctgttggcagaatgcccaaggccagagttcatctcacttctccacaaatctgcttccccgctgtctccctcattttataacggacaaccccagttctctgttgcttaggtcaaaaaccctgggcccctggctgccaccttaccctcctccctgtcctccccgcaatagtatgaatgcttgtgcccaccccccccccaattcctacattgaaatcctcacccacaggtgacggtgttagaaggtggggcctttgggaggtggtcaggtcatgaggataaagcctcatgagtgggatcagtgccactgaggctgaggtgggaggattgcttgaggccaggagttcaagaccagcctgggaaacatagcaagaccccatctctgcaaaaaataagttaacatatattagccaagcacagtgccttgtagtcctagctactcaggaagtgtcacttgagtccaggttgaggctacaatgagccatgatggcaccactgagctccagcttgggcaacagaatgagaccctgtctctaaaaaaatataaaaataaaaataaataggccaggcgtggtggctcacgcctgaaatcccagcactttgggaggcggaggcgggcagatcacttgaggtcaggagttcgagaccagcctggctaacatggtgaaaccctgcctctactaaaatacaaaaaaattagccaaggggggtggtgggcatctgtaatcccagctagtcgggaggctgaggcacgagaatcacttgaacctgggaggcggaggttttagtgagccgagatcgcttcactgtactccagcctgggcaacagagtgagactccatctcaaaaaaaaaaaaaggaaaaatataaataaataaacaaataataaataaataaaaaggaacctctcagtccttccaccatgcatatgctgacccagcgagaaaaagaggtctgacccagtgagaaagagaggtctatgaaccaggatgtgtcctcgccgggcactgaacctgccagtgccttgcccttggacttgtgctgtttatgagctgcctggctatggtgtttttttagagcagcccacacggactgagacactctctgtgtcttccagccccactggcctcttggctgcttctcaaacactgagcatgatgccccctccctcccacctttgcactttgcagtccctctgccaggaacaccctttctcctgtagtaattcccacaggccctctcaggagtgtcccccacgcttgctcctatcccccaaccctgcttcacagcctctggtcagccccatgagctgatgattctgtggaaggacagcatggccttgctcagcccctgcagccaaatgcgaaggaagaccacaagtcctttggaggggaggtgcctggccctggggggcctggcatgtgcactgaccaggagagctcctgagtgtgcagctgacactgcctccagggctggtggggcctggctgaggccatccatgggcaggagccctccagcatccagtggccatggccacgccccagccctcatcacgggcctgtgttcttcaggcgtggggaaggcaccgtggggcagagagtggggacccgagggtcaggctcagagtccgggcactggtcactgtgggtctgggatgaggaggacgtccctgaaggacaagtcagggtccctgtaggagaagaaactggagcttggggagcttggatggtggccttcctgtgatcttgagtgagaggcagctcacttcctggagcatcagcctcccatttataaagtggaagaatacttacagcttgtcagacctcacagagctgctggctggggtaatacaccacgcagctcccctggagatagctgccagggtgcacaggagtcaggtcccagggccgtgcagctcatcgagcgtgtccaagggtgtgtgtggcgtgtgatgcattgtgtgtatgtgagtgtgcacgtgtgtgggaatgtggtgtgatgtgtcatgtgtgcacatgcatgtggtgtgtggggtgtgtgcctgtgcatgtgtgtgcatgtgtatgtgtcaggtgtagtgaatgtgtatgtggtttggtggatacatgtgcctgtgcatgggtgtatgtggatgtgcctgtgccgtgtgcatgtggctgtggcatgcatgtgcatgcctatgtgtgcatgtgatgcagttgctgcccgctagggttcctgggctgtgctgtagccagtggtggcatggagggaggcatgggcaacatatacactgcaaaaggccaagagcaccagactgggccctgtgccatgtgcttgctggctccagagccaggatggggtgcttagggctgccactccccctctgagaaggaagcagcgattttaggaagaaagcaggaagcctgtcctgcttggagccataccaggtgatggaggaaggctgtgctgcatggggtcagaggggaacatgccattccctaaagccctgctaccctcgggaatctttaggatatttcattgccctccagaatgtcagggtgtctctcacttgtggaagcagggaggacatctcacttgccaaagcggggagggctcctgcccatggacggcatcagctcactgactcccaacctgggcatctgagcccagctggaggccaggaggaagctagcctcatgagtcacaccattcaggaacccttgggtctgtcctccaagctgagccttggggagcctgtgcatcactgtctggattggacgatgcccatggaaaggcacagatctgcacagatgggaatcccagccagcagattggctgggggcccagccagctgaatgcaaagccccaaagtcggtgaatagcactgggtcctaaacctgatggcaactccagctgcttcaaggaaaggcctatgaacgagtcctgctctggagtccccaaatctatggtctaggagcctggtcatataccagaacttccttcccttttatggctgagtaatattccattgtatggatagaccatattttgtttatccattcactcactgataggcatttgggttttttcaatttcttgactattataaataatgccttttgtgtgaatgtgtattttcagttctctctggcatatacctaggagcagaattgggtcacagaggaactccatgcttaactttttgaggaactgtcaaactattccagagtgtctgcaccattttacattcccatcagcaggatctgaggattctgatttctgcacatcttcatgagcacttgtgattttctgcttgttgtttttgttctagccatcctagtgggtgtgaagcaatgtctcactgaggttttcatttgcatttccctgatatctaaggatgttgagcatcttttcatgtgctcattggccatttgcctctcttccttggagtaatgttattccattcttccacccacattttaattgggttatttgtctttttgtcgttgagttgtaagagtgctttatatagtctgcatacaagtcccttatccaatacatgacttgcaaatattttcccccattctgtgggttgtcttttcacttgcttgatggtgtcctttgatacatgcaagattttaattttgacgaattccaagttatcagttttttatttggttccttggcttttgatgccatatctaagagacaattgcctaacccaagctcacaaagatctactcttcattaggttttttttaaataagagttttagcgttttagtgcttacatctcggtctttaattttcatcgacgatgtgaggcagggatccaatcacattcttttgcatgtggaaatccagttattccagcacaatctgttgcagactgttctttcccctttgaatagtcttggcaactttactgcaaatcagttagccctagatgtatgaatttatctctgtgctctttattctattccattgttccatatgtctgtctttatgccagtgccacactgttttgattattgtagttttgtagtgttttgaaattagaacatgtgagtcctcctgctcgtctttcttttcaaggttattttggctatttggagacaattacagttccatgtgagttttaggattagctcatcaatttctgcaaaaaaagcttagatttttagaaattgtgttgaatgtgtagatcggtttgggaaatattgttctactaatattatgtcttctggtccatgaacataggatatcttcctatttaggtctttaatttctttcatgacattttgtagttttcagcatacaaatcttgcacttattttgttaaatgtattccttaagtattttattatttttgatgctgttgtgaatgaaattgttttattaatctcattttttaattatttgtcactagtgtatagaaacacaaatgaggccaggtgcagtggcttatgcctgtaatcccagcactttgggaggccaagacagggagatcatttgaggtcaggggttcaagaacaccctggccaacatgacaaaaccctgtctctactaaaaatacaaaaattagccaggcatggtggcacatgcctgtagtcccagctactcaggaagctgaggaacaagaatcacttaagcccaggaggcggaggttgcaatgagctgagatcacaccactacactccagcctgggcaacagagtgagactctgtctcaaaaaaacacacacacatacgcacacacacatacacacacaaatgatttttaatatagatcttgtactctgtaaccttgctggagttgttgatcagttctaatgtattttttaatttgcagattcattagggctttctacgtataagatagttttatttcttccttccaatctggatgcagttttttcatttttcttccttaattgccctggccagagcctccagtgccatgatgaatagcagagttgagagtggacaaacagctttcagtctttcaccactggataggatgttagctgcaggtaggcccctcttgcttttaaacttagtagttctagatgtgagaaaaactttgttcacataaataaatagataaaaatgggagcacttagttaccatgcatctctcaattctttgaatttttttagagttatatatgccaaaaatcacatggtggcctatcatcaaaatgtgaaaaaatcctatcagcccatgactcagttaggtcctccttaaagtttgtggaaaacagggaattaaaggtgcctgattttcacaagtcccagtcattatcaatggctcccactcttgctttctgggagaaactccctagggtatggcacactccaggaagatccaggagtctcctggaacaagagctgggacccttgggggtctcccatgggtctggtgtgtgacagcatccctatagcatatgccacacaggtatacatgtggcgcaaatgtacacagtcggtcccctgggaaagcacagagatgcactctgccacacagcatatgcttagaaatgatgtattaagccagtgacctaaggacaatggtgcatgactcggggaatcccaggagggcttcccaggggaggtggcccctgggctgaatcttgaaggattttcttcctttaaaacacacacatatgcagtattttctaggcaccatttaagtgttcgacacaccatggccagttgaatcctcatgcccatctgttgaggccagcagtgcggtgaccctgttttacaaatgaggaagcagaatcactgtgacaaagcagagacatgaaccttggcagcctggctccaaagtccccaggcagaggggacagcccatgccaaggttggggctgacgtgggggtgagcagagccctcaggcaggcccagcagtgacagagcctagctggagcatacagtttaggaatcactggaggaaccccaagcccacagggagggcaggtgcagcccgggaggaagcagagaaggtaggactccagaggatacccggtccccatgtgtgcatccctccgggcagggcggggatggatctgagcggtcactgagaatttctcaatggggctcttggattaatgccgcaggctctccaggggcaagtgggcctcacagatgcccaggtcctgccctaaggtgccagcgttgggttggggcggggagcccccatttccggttgttttcctgctgctatgccggcctctctgcaaagggctgagctcctgctgtgcttctagcctcccctcccatcccacttacctcccctggaccctctccttctccgcttctctgatcctactacccccttctcctcccctttctgatagaggaacacagtctggaacccctcctacctcctcatggcttaaataggtttaagtaggaaaggggaagtcccggctcctccctcctgcctgccatggggactcagaaatgcttggagtcctggtggcctgggaggaaggagcccgccgggtgcctcagagagaggcctgctcaggaggccattgtggaggccctggctgcgctctccataatcatatgattggattagggtcagggcaaccctaatcatgtcaaaggtcaccccaggctttgtggcagtggccacagggtgcctgaccacccctgccaagatggccttgttgaacacagttaaaaaccctcagtcagctgtgaagagaggggcccagcctcttgtgtgtgtgtgcacatgtgagtgtacaccctagcgtgtgcattgtgaggggtgcatgtgtgtgcctatatgtgcacataagccatatatgtgcatgcctgtgtgtatgcatgtgcatgtgtgtgtgtgtgtgtgcatgagtgtgaacatatgaaggaagaagcttcatatcctcacacctcctgctttcatccccatctgccgtccacctggcctggggctggggactggggccaccagactgaggctgggagaaaccatcagtccttggaacatggggctctgtcacagaagctgagcctggtccctgaagagccctctcttctggggtccaaaaggagcaggacattcaacctgcctggggtagaaagcatttgaggaattttaagtgcatggagactgggcacaccgtgcagcttctctgtcccctgccgcaggacccaggcactgggagggctcacttccctgcagagctggagacacctcactcttgacccctggcaaggtaaagctggcaaggacacaggtacagagaaagggcagggacggctgcagtggatgcagcagcccagggcccagcagctggatctcaggcagcacgtggctctgcagagagcctggcctgctctaggccaggtggggcatgtgctccttagagaaggggacagaggccaggagcgggcgaggcctggagcctagggatgccacctgtgcccacatgctcggtgccctctaacatgggctgggcccaggagtccccccgggccctggcacctgccagataggtcggggggagtggagtggcatggggaggtatgcaatctcttgtgcttcccaagtaagtgtgcttcccacaactcccagtggacacttcccagagccctggggtttgcttcttcgtacccagtgtgggtggggcctgcagcagtggccctcccactcagccttcacacaccaccccctcttcaagcatttccagtccccaccccctgccctattctgtgaaccccagggtatccccactcaaagcacacggccagattcctggttggtgccccaggacccctccagccccaaagggtggggagagtaatgaaagggtcctgcgcaccacatgtcagtaagccttgttgggtgccccacaagtcccccttcatctctccaacgtcttccccaggcaggagacagcccagcctcctctcctccccgctgagcccccaggagcccctcgggggtggtccgccacctccctgtgtgtcccctgcctatgagggccggcacaggggtggggcctgcctgctaggacatggggacacacagggcagctctttagggaaccagcgtccccaaagccaggttgcgacccctgaccccccccatcggaaagtgttgccgtttaagatgcgttggggtggggggctcccctggctccagcggcctctctggtatatcattaactctccccagtgggaggggaaccccggccgactccccgccgcgtccggctgggagcacaatatcccagcgacggcgacaagattaagcacaaggggagagtgcaaatgcgcgggcggttcacacgcccttcgcggtgctgaattaaagcgtctgaatggggatttcccctcgcgccggacggcctggcgcgcggcgcatacttccaggttgctatgactggcctgcgctcgcctaatcaccgactagggggaaattcatataaaatatcgccggccattgtgggcctaactcggcgtgacagtggcgcacaaagccggattcaagcgccccagcgggtcagcacggcgcccggccgcgcgggccgcccggcggtgtcaggggccgtggccgcggtggggcgcgggccgcattccgctctcaggtggctccggggccttttgtgcaggccatgattaccaaatgccaccgcgacaccccctcccggccgcctggctcctcctggggccgcaggaatgagggaaggtgggcagcccccgaggggaggcgcccgggcgtcggctccggcgggctccggcggggaccggggcgcgggctgagtccccctgtgtgccccacagcaaagggtcttctccttcccctgtgttcaggcctcagtgggggaaaagggcccacgcgttggctgctctggaagcctgttgtggcctcccgatgggcacgagaaggactttgcttgtcctttttcaggggcgatggtccccagatgacatgacatttggggccacagtgacctgcaggcccctggccagtctggtcaggtggtcctagctgggatccaaggcacccccctcactcagccagccccttccagcagctgtggcgtgagcaggcaggagatgggggcagcaccaggagggagggacccaatgcattcggggtggccactgtccccacaactctatgggtcccaggtatgtggtgggggtgtggtaatcatacagggtgcagcgtgcacggggggctgtgttcgctgtgaccctccatcccccaggatgcctgaaggccagtccctggagtacagggagactgctcctcactggtgcatggaaagggctggcagatcaggcagggggaaggcctgtggggtggggcatttgccctgcagacctggggagagaagctggctgcagtagggtgcacttgggggacagagggcatttttttgtcacagtggaggtgagaacttcccggtggagattcagcagagtttttctcctgggcagtgggcaatgttgggagtctgggcccccagcacccggctggactggccaccatggagtcctgccctcggccagtgcatccctgccagagctgggggtgtccagccagacagtcagcattgccaggggaaagagacgaagccacaggtttccaggggctggggacagcattggagggccccaggaggcatggccaggtgagcatgggtcaacatcaagaagcagactgggcaaaggcggcatcccaagctcctaggaaaggaggtgtcagctgccccaggatggggccacagaggcagaaccatagcccccttcccagactaagcagcccagccaccagctgccagcagccagggccctgaatcccagagcctgtgaccaaggtacccacctccaggaagaggccaggccagagacccaatgaccactgtctactcatggggggatggccatcagcatatcagagacaccctcccaacccccttctcctggcaggctcctgttcagggtcttgtccagggtcccatagagcccttacaaagtcatggccaagctgtccatagccttctttctggtcacagcccagaggaggggtcagcacggaatggaatctgagcttgggagatctcatctcagttgatgcatcagaatcactggagaccctttaagatataggtgccccccaccccagttgaacttgggtccccagggcggccctgcagtgattcattggccccccagccatgaccattgttggaagcctccagtcctaattccctgatgggcttcccagaggggccagcctgggtgaagcccttcagactgagcactctgcctccccgaggagctggatttcattgtcctatggtcgcatttaacaacaatccccaccccctgacccagaactttccctccttcaagttgtttgtccctcagaaaagccactcaggagtcccctctggaccaacaggcatgtcccaggagcccaggagtcccaggctgtccctctcctctcgccctgtatcagcccccacagcctttccacagataggcatgtccccctcagccatgcagtgggggcccagccaggcaggtgggctccctgctcccttgaggctatggccatggaaacgccagccatgggaacacccattggagctgcaggagcccataatgatgagttcagggacctctcttgggacccctctgtctgggctctgcactcactgctgtgcagcctggggcccatggctgaccctctctgagccatcttcctgttggggccacttctctcattagttaatacaaggatcggcttggacctgcttttcccactgtcaccccctaacagggcagcctccatgctatgctgcctcagcagctaccttctgagcaaacacctgtccctgccgaaatgcttcttgggtcacctccccatggtaaggtcagctctgagaggacagaggctgcagccttctttgccacttaaaagacagtcactgcgtaataaatagtggcaactgagcaactttagtgaaatgtgaaagacaaggattttggaatgatttgggcaaatgttgttcaacgtttaagaatttggaaacatggccgggcgcagtggctcatgcctgtaatctcagcagtttgggaggccgagatgggcggatcacgaggtcaggagatcgagaccatcctggctaacacggtgaaaccctttctctactaaaaatacaaaaaaaaattacctgggcatggtggtgggcacctgtagtcccagctactcgggaggctgaggcaggagaatggcgtgaacctgggacgtggagcttgcagtgagccgagatcgcgccactgcactccagcctgggcgacagaacgagactctatctcaaaaaaaaaaaaaaaagaatttggaaacatatccttcctgtttgatgttcaaaggtccttttctgaagttatgatggtagatattttatatatatatatatatatatataatatctactacatatctatatctatctatctatctatctatctatctatcatctatctatcatctatctatatcttttcctgtctcaacaaaataaaagcacttggcagtcctctgttagtccccagatgctctctgatacttgaaaagcccattaaatccaaacctagaaacgaaggatttgttaagatccctctagtccaaaagttctgagatgcaagagacaaaggaaccatcaaagctcatctcatgattccctgcatctgacaactgcactgccctcagctgtgatggagccttgcctggcagctcttctgcctttccctaaatgcccacctcttaccacctagaactccctcaccttctccgactttatccatccatccatcatccattcatccatcatgcacgatccaccatccatcaattcatccatccatccatccaccatccaacatccatcaatctatccatctgtcaatctgccatccatcaatccatcatccatctatccatcaattcatccatccatccatccatccatccatccatccaccatccatcaattcatcatcatccatctatccaccatccctcaatccatcatctatccacccacccatccatctacccattattcatcaccctcccatcccaggcctgcctcagagctcatgttgtcaagccttgctatgtgtccttgtcctctctactgcctcccttgtgaactgtaagctcccaaaagcacatggtttagcacagtcccaggcaaaaaacctaacacacacaccaacaaagcctcccaccagagatagggaaggcttcccctggttcattctccttaccaaggcaaggactctcttctcctgaaagtgggtcatccaacctctgttttattatcaccaggacaggaactccttcaactttcagaaagcctaggttgttagaaattgtatcatattgagcagcagtccactttctggaggatttttttttcttttgatggagtctccctctgttgccaggctggagtgcagtggtgtgacctcggctcactgcaacctccgcctcccgggttcaagcgattctcccacctcagcctcttgagtagctggcactacaggtgcacgccaccatgccccgctgatttttgtatttttagtagagacggggtttcaccatgttggccaggatggtctcaatctcttgacctcgtcatctgcccacctcagcctcccaaagtgctgggattacagctgtgagccaccgcgcccagcctctggaggattttttttactgtggttattgagagtgggcaccttgcttcttattcatctcatattcctcattcagcccagtgcctggctcattagggactctcagatcctggatggatggatggatgatggatggatggtgggtggtggatagatggatgaatggatgatgggtggatgatggatgaatggtgatggatgaatggtgatggatggattagagatggacagatgatgggcaacagataggtgatgaatgtacagatgatgaaggggatgatggatggatgatggttgaatggtggatgggtgatgaattgatgatggatgcatgatgaatggataatgggtgaatggatggatgagtggtggtagatggtggatgatgggtaatggatggacaatggatggattgtggatggatggtggatgatggatgatagatgtatggataatgtatggatatggatgatgaatggatgaatggtggatgatggatgatagatggatgatggatagatgtggatgatggatggatggataatggatgatggatggatgtggatgacagatgatgggtgatgggtggatggatagatgggtggtggatggtggatgattgtacatgatggatagtagatatatggatgatggatggatggatggtgaatggatagatgaatttataagtggatacatggtaggtggtggtagaggatgtatgataggtaatggatagatggatggatggatggatggatggatgatgcacgatagatgaatggatagatggatagatgtggatgacggatggatgaatgaacgaaaggaaggaaagatagataattgatactttggatgaattcagtaaataactgctaaatgagaccacaacaagtttctgggaaagatggttttcccaggtggaagatacttcccttacagaacaattttgttatgcagtttcctttcttcttcctttctccaacaactgattgctgtgttagaataaaagtcttgggcctgaatggggcaggccttaggtggctcaaaaagttcagccaggctccttcccaggtgacttggccaaattggcagcatttgtgtctaagcaccctgcctcccagtagcctgtgtcccattccagtgggaactccgacagtccactctaatgaaggcattttcctgctgactgggatgatttcctggccttctgggatggctggcacttcccacgggcaagatgcctccgtttcacccccatagctgactctgttgtgtcaacaaaagcagaaacccctgacaaaggtgtttgtggtagagaacttggtttccgtggaggctggctgccagaactccagagcctggacgtaagtcctggcctcaggggagccctgagtcagctcctctgtaaacagaggtgactctgggcagtggttcatagcctgcatgcttcaaacacctgtggaaatctgatcaaagcaatggattctctctccagaaagatgcccgtgctcccagacataccccatcgtttgtgctattttgggagggtagtgaacctgctgcagattccctctagaaccttgggtggaatccaacccataggctcaaatctcctgccgctgtgcctgccacttggacattctggggggtcttccttctgcatggtttcaggacattttttaactttttatttattttattttattatttttagattagagatgaggtctcattctgcctcccaggctggagtacaatggtgtgaacacggctcactgcagccttgaagtcctgggctcaagcaatcctcctgcctcagcgtcccaagtagctaggactacagatgcacaccaccatgcccagctcatttatgtttgtttgttttttaagaaagggggtcttgctatgttgcccaggtttaactttttattttgaaataatttcagactttcataaacatcgcaggagtggcactgagagtcctgggtcccctcgtccaacccagtggtgcataactatgccaattgttcaaaactaaatgtgttctattcaccacactctggacgtcactcagctttccttcgtttttctatcaagatcccttttctgtcccagaaccccctcctgggtcccttgttacttttggtgatgccatgcctctggcttctccactcttccctgtccctcatgcccctgagacctctgaggagcacaattaggcattttgcagaacagccatcaatttgggttggtctgatgtctcccgacaattagatgcaggctgtgcattttgggtgagaatacctcaaaggctatatttggccttcatgcatcatccctggagccacaaggtattgtgtgtcccatttcaggcaaggttaactcagtccccagaataaggtggtgtctgccaggcttctcctgtgcacagttaaggtttttcccattgtgcttgataaacactgtgagcagttgcggaaccgcttagagaccttgtggcttcaactttaatgcaggctctctttgccagaacatagggtctcacgcttttctggcctgtggtcttgcagcctgcagcttctacttcagcctcggatgggggtgtctgtcctgggatctgagcctctctgcagagacttcttgtcttcagtcttcacgagtgaattgaaggcctgctccagggttttctcagcctggcagggagctccacctccacatgtgatggaagagaaaatcaaggttcagccagctggtgaccaaactgagcaagaatgagctcttttctgtccaagtggaagccctcagcaccacccgcccttgcccttgagtgtgtctggctattggggctgtttgcctgagttttgataagcagggatctcgaggcccttgttatgggcagggcatgagtgaggcacagagagccctagcctcaggctctggttctcctcttaccagaagctcaggagcaagagggaggggctggccttggagacagactcttgtagtagccaggccgtgaggtgggaaggcagactcagctggggtggggtattcagggtgtgggatgcccaggccatttgggagtgagaaggtccggccaggagggcaggtggagctgtgtgccatgcgtgagctccaggagcacccaggacactcctcaactctacctctcaagctgccctagaagggaagcagggcagatggcaggggaaggggcgctgactagggaggggacgacctgagtcctttaaagacaagaacaggcgctcaggcctggaggcttagagaggaagtgctctgcatccagccacacgtgtattcactcagaggcagtgggttcagcaaaggcccctccaggcctgtctgtgaactgatcagttgtgttagggaagtaacatggggtcaggggtgggggctttaagtttcttggagaggtgcggaggaggtggctgcctagctgctccctgggaaaggaaacagcggaggttgcatgatgggcctgggtgccttagaggggcaagggtgggtctgctctgggtaggctcagaccctgctcattccttgactcagcccacggctcctgcctttcattctggccccaggaaatatctatgggctgggccttgtgctccagattgcaaataaaaggtgagccaaacagtccctgcccctaggcagccgcggctagggagggagtcagtgggcaaatcttcctggttggggaggggcagccaggtgtagaggacacccgatccctggccgctcccctcagagcaggcaggggcacagcaggtccagcctgagccaaggaaggaaccggaaagagcccgaggggaggacaaagggctgagtgcggcctgaggccagggagtggcattgaggtcaggagaggagatagatccagagggggcctggcatggccaaactggcattgggcgaagacctcagcctgcagatagtgtgttgcgagggagaggtgtgcatgtgtgtgcatgcatgtgtttgcatgtgtgtggtgcacatgtggaggggtgtgtgtgtgtgtgcatctgtgtgcatgcatgtgtttgtgtgtggtgggttgtgaatgtatatgtgcatccgtgggaggtgtgcatgtgtgtggtgtgtatggtgtgcatgcatgcatatgtatgtgtgtgcatgtgtctgtgtgtgcattgcacgaggcgtgcatgtgggggttgtgtgtgcatgtatgtgtatggtattcatgtatgtgtatgtgttgtgtggtgtgtgtgtgtatttgtgtgtgtgcatgtgcatggggtggggtgtgtatatgtggggtatgtgcatgcatgtgtgtgcatgtgtatggtatgtgtggtatgcctgcatggtgtgcatgtgtgggggggatgtgcatgtatgtgagtgcatgtgtatgctgtgcttgcatgcatgtgtatatgtgttcatgtatgtagtggggtgtgcatgtgtgcttgtgtgtggtggggtgtgcatgtgtgtgcatgcgtgtgatgtgtgcatgtgtgtggtgtgcatgcctatatgtgtgtgtttgcatgtgtgtgtgcatgtgcatcaggtggggtgtgcatgtgtgtgtggtatgcatgtgtctgtgtgcgcacgcatgtgcgcatgtggctgtgcatgcatgtggtggaaggaggaagctggaggctggggcctcctaggggcctcttcatggcgaggtgggagatggacccacagataagaaccaggaggggcaaattggctgagaggccccagggccacctgggaaggccacagcagcctgggcggctggggctgtttcaggactggacagtctccagccagcaagcagagcccttcctgagctggtggtgggaagtggatacagaagaaatggacagttttcttctgggcttgtggctggatgcagtgggtgtccaggcctgacttggacagggccctagggagggacggggctgctgggacccgccatcagggggctgttggccaatccacagaaaagtcaaccaaagcaggcccgaggggctcagggggctttgtcaacagccagggggatgccagtgcaaagccatagcctcaaataccttccactttgtatgttcttgttatgggagcaacgtgcgttcttctgtgctggctgtgtgtggatgtgtgttgggccgtgtgggagcgtctgagtgtgtgcacactcactcgtgcctttctgtcccagctggcctgggctcaagggcatcacgagccccaggggctgctgtctcggtcctctcctaggcagcctgcaaccacatgcctgtgtccctgagttaggccattcttgcattgctataaagaaacacttgaggctggtaatttataagaaaagatgtttaattggctcagggttctgcaggctgcacaggaagtgtggctcttgcttctgcttctagggaggctaggaagcttccaatcatggcggaaggcaaagggggagcaggcatgtcatgtggcgagagcaggagcgggataaagagtgggggaagaggtgccacacacttttaaacaaccagatcttgcaagaactcactcataatctcgaggacagcaccaagccatgggacccaccccccatgacccagtcacctctaccaggccccaccccagccctggagatcacagttcaacatgagatctaggcagggttaaatatccagactacatcagccccatccacccgaggatgaaagctccctggatgtccaggtggcagaggaggtcacagccccctatgatgactctgttgtgaccctaaggggtccattgcaggcctctgccaaggaggagcaggggacactgtgggacgtagccctgtatccccgccttgtcccatgggaggaccctggctccaggagaacctcaggcctccttctatccccatagagagggcccatcggagctcccttctccctcctgctctcccagggcctcgaggggagagagaaggtcagagccaaggaaaggtggaggctcaggactctcccacaacagaagcagagacatggaggaacctgccccagggcacacctagcccccagaggccaagccgaggctcaggggctccaaagcccaggtgtcttcttgctaggtctgtaagatccctgcccagcagcaggtcaggctctttcctggttggctccctgctagttccccagctcagactgcaatgcttggcaaacagcaggcactctgttcctcacctgtgtcagagtgtgggtccaaagtgagtgcctgtctctttttattttgtttttttgagacaggttctcactctgttgcccaggctggagtgcagtggtgtaatcatacctcactgcagccttgaactcctgaactcaagtgatcttcctgcctcagcctcctgagtagctgggattataggcccccagccctgagtgtcttttatcaatggaagcagggcctggccaggcccaccccctctcctcatgcccttgcagaagtgtctgcatacacccacccccaagacacagctcattctttcaacctgtctggggaagcctggctggggtcctggcctctgcaaagcccacaccaccgctcattcccatccctctgatcctagcctccagagctttctcctaaattccagccctcccctaccacccttctgcacaagcaatgccacttccccaacttggcctctatttccccatttggggaagaaggaagctgtgtacaaggacccaggcagctccaatgtcagcagcggcagacaccctgcagccttccaagctggaggcaggggcatttggggcactggggctggccctggggaggcgggcactggaagtcactggtgttgagaagattccagaagaggcagctgtaccgctgagccatgcaagtgtcggtgcttggggtggaggaaggcaatggcaagtggcacagcagaggtgggcggtgtgtggggtggagccacactctggggtctgcaccccaggctatctgggcagcagaaggaattagctcttgtctggttttacctgccttcgttcagttgtatgattattttgagatcctttgtgctatttttcttgttattcctaaattaaatgctgttacagacttgccactgctttttaaccatccctgttaatggacattggggtacttccagtttgtggcttgtgtgaacatttgcttacaagtctttgcacagacacgggtttcctctggggcaaacctaacggctggtggacgtttacccttgaagacactgccaaagtgcctcccaaggggactgcacctttcccctccatccagctgtgaacaagggtcagggtctgatttctccacatccttgccaacacttgctactctttgactctttgattgcagccatccccgtaggtgtgaggcggccccttattgggttttttgatttgcacatccccaggatgggtgatgtcgaccatctttccaggtgcatgctggccttccttgtgccttttttttaaagacagggtcttgctctatcacccatgctggagtgtgactatagctcactgcagcctcaaactcctgggctctagcaatcctcccacctccgcttcctgaatagctgggactacatgcacacaccactgcaccttgctaattttaacatttttttgtagagatggggtcttgctacattgccaaggctggtctcaaactcctgggctcaagcaatcctcccacctctgcctcccaaagggctgggattacagatgtaagccaccttgccagctgtatgttttttaagacagggctggagtgcagtggtgctatcctggctcactgcagcctccacttcctgggctcaagtgatcctcccgcctcagcctcccaagtagttggggccacatccagttaatatttttagtttttgtagagatggggtcttgctatgttgaaaaggctgtcctggtctcaagcagtcctcctactgtgcctctcaaagtgctgggattacaggcatgagccactgtacttagccaaagttgcttgttaaaaagagcctggtaccaacctcccctctctcacttctgtcaccatgtaatttcttgcacacactggttcccctttacgccccctttcccttctgccacaagtggaaacagcctgaggcccttgccagaggcagttgctggagccatgcttctgtgtagcctgtagatccgtgaaccaagtaagcctctttgccttatacaccacccaacctcacgagttcctttataacaatgcaaatgggctaagacccctgacctgcccaaggcggtcctttgagctgagccctgttaaccctgcatctctcctctctctacagctaccagggagtcggcctttgtccacgccattgcctcagccggtgtggcctttgcagtgacacgctcatgtgcagaaggcacggccgccatctgtggctgcagcagccgccaccagggctcaccaggcaagggctggaagtggggtggctgtagcgaggacatcgagtttggtgggatggtgtctcgggagttcgccgacgcccgggagaaccggccagatgcccgctcagccatgaaccgccacaacaacgaggctgggcgccaggtaggttcgccgcccgcaagggtgcttgggaaaaaggagcctcctcagcagggtgtgtgccctggttccttggggcatatggcccggtgaggcaggatggtggccaggctgagggtcttctcgacccctgcctggggtgtgcgaagcttagcaccatccagctacaccacagcatccagtgcgctcctggggatggcgagcccacctgtggactggggtagccaagaaggagtgatgaggcaaaggcctggtcaacaggagccccggcagagcccagggagggagacagccaggcagccacagagacggggaggaattctgcaatgaggaaatgcaggcacacaaggtgacccgatgtcaaggacagctggcagtaatttagggggagggaggctgggagagcctcccaggcagcctggaggtgaaagacaacaagcgacttggtgggcagagcacagagtgtaatggaacaaagagcatcttgatctgcagaggccaacccaaaccaagccgtgtaaagcttcgtgagcctgtgtcttattctgtctgtgctgctacaacaaaataccttagactggataatttataaacaatgggagtttagtactcacagttctggagactgggaagtccaaggtcatggtactagcagataccttgtccggtgagggcctgctcctcatggatgatgccttctgtgtcctcacccagggtgtggatcgctctggggttacttttataagggcattgttttaggccattcttgcattgctacccgagactgggtaatttatgaagaaaagaggtttaattggctcatggatctgcaggctgcacaagcttggtaacagcatctgctcagcttcttgggaggcctcagggagattttacacatggcagaagtggagtggtagcaggcacgtcacatgggccagagcaggagcaaggaagacagagtgggggagaggtcgccacgcacagatcttgtgtgaactcactcattatcatgaggacagcacaagccattcatgagggatctgcccccataacccaaacacctcctaccaggtcccacgcccaacactggggattacacttcaacatgaaatttggagggaacacagatccaaaccgtatcaggcacgaatcccattcacgatgctccaccctcatgacttgacttgatcaccttctaaaggccctacctcttaatgctgtcaccttgagggtaaagatttctttctgggggggtggggacacagggtcttgctggatacagtggcaccatctcagctcactgcagcctccacgtcccgggttcaagcgattctcctgcctcagccttctgagtagctgggactataggcgcatgccaccacacctggctaatttttgtatttttagtggagatagggtttcaccatgttggccaggctggtcttgagcttttggcctcaagtgatccacccacctcggcctcccaaagtgctgtgattacaggtgtgagccaccatgcccagccgagggtaaagattttaacccatgaatttttgaggaacacaaacattcagaccacagcagcttgctagaaaggatgtggtcagaagatcagtggatggccaagggaggaaagatggctgatgggcagtgacgggcgtaaggaccaagtggcgtccacgggatttaacaacatgaagatggcagctgaccttggctgtagaatcaggggaccacagaggggtgacgagtgaacaggggatattcaccttttaacagtgaggaactagataactcagactaatcttcctgcagaagacaacttcagatgcaggatgaactataaaaagcaccctgttaaaagtgtggagtccccataattacccaattcatgatagatgaggcagtgcagtgccatgggagaaatgggcttttcaataaatggtgctcagtcaaccgggtggtgctatggtctgaatgtgtctcccaaaattcgtatgttgtaagcttgatctccagtgcaacagtctggagaggtgggacctaataagaggtgtttaggtgatgagggccttgccctcataaagggaccaatgctgctgtaaaagggcttgcagaagagggtctctctctctctctctttctattactttcctgccatatgaggacatgatgttcctcccttctggaggacatggcattcattcagggtgccctcttggaagcagataaaccaagccctaacctgtcagcaccttgatcttagatttcccagcctcccaaaccatgaaagaatacatttatgaattactcagtctcaggtgttacgttgtagcaatacagcattgactaagacagatagcaacatggaaaaaaaataaccctggcttgctacctcacaccatctgtaaaaatcaattacaaatcccagtgggacaggtaaaacaataaaacttttacaagaaaatatagaatatctttgtgaccttagagtaggcaaaggtgtcttaaacagtccaaaaaagcactcacattgaaagagaagtggaataacatagactatattcaaattaagaactttcatccataaaaagacaccactatgggactgaaaaggcaacccatagaggacacattcacatacatacatccacactcacatatgcagcaaatgtagagaagctacagtaggaaaagaactctgcagactaagaaaaaaaagatagacaaaccaatgggaaaattggccaaaaaattaaaagccatgttatgaaagaaaatatagaaattccactacctatacaaaaggtgctcaatgttatgagtcatcaagaaaatgctgtgagaacctatgtcctggaaagagagaggaggatgggggtgtctgagacactggtgttctggggcaggtaatttgtaaaattttgtatattttgcacttatgacacatatatatttttgtatgtctattatacttccataaaatgatttttaagtgtcaaataactgaccatctagtgaggaattagcagcccctgatccaagagaagatcccaagtctggtacctggggtagcttttgtctaggggccatttgctgacctggaagagactacagaggttgcactgcatttccagcagactcacagagctaaggggcccaccaagggtgccatctctggtaaatccttcctcagtgtaggctgtgaccctgaagagcaaagccaagccagaagtagtcttgtcctgttcacatgggcagactagaaatctctcaaaacctgaacttggattaaggtaatcccaaattgctggtactcccatacacctggaaaaagcagacaaaatcctctttggagaaggatgatatccctcctctaagcctataaatgtttctataataattttttagaaaacacaatgttggctgggcgtggtggctcacacctataatcccagcactttgggaggccgaggtgggcggatcgtgaggtcaggagattgaaaccatcctggctaacatggtgaaacccggtctctactaaaaaataacaaaaaaaattagccaggcgtggtggcaggtgcctgtagtcccagctacttgggaggccgaggcaggagaatggcgtgaacccaggaggcggagcttgcagtgagccaagatcgcaccactgcactccagcctgggcgacagagtgagactctgtctcaaaaaaaaaaaaaaaaaaagaaaacacaatgtccagcacacaatcaaagataatctatcacatgatctgatgacacagtgagttaaaccagaaaaaaaaaaaaaaacacaagtacacagggaattcagacaatggaattattagacacagactttgaggggaaaaatgcttacttaggttcacaaagctaaaacacaagtgtgaacattgcatcaggaaactagaaactataaaaattatataataggctgggcacggtggctcgcacctgtgatcccagcactttgggaggccgaggcgagttcgagactagcctgaccaacatggagaattcccgtctctactaaaaatacaaaattagccgggcgtggtagtgcacgcctgtaatcccagctacttgggaggctgagccaggagaatcacttgaatccaggaggcggaggttgtggtgagctgagagtgcaccattacactccagcctgggcagttttttttttggaaactgggagttttttttggaaactccgtcccaaaaaaaaaaaaaaaaaaaaaatatatatatatatatatatatatatatatatatatatatacacacacacaatagatttggaaaataattacacagaaattgcagaactgaagaacaaataaggacttccagttaaagatgagaagctgaacacttccgtctgcactctcctggaacccactaaaataacaataaattaattttaaaataaatagatatgtagagataaatataaataaaatataaatagatacaggtagggacaggtaatagtagatatagatgatagatataaatggatataaatagtgcatagagattatacatagatatagatgctaatacagataggatggatggataaatagattagatagatggatgaatagatagagatggatactcatgagaatacagaaaataaagaggaaacaatggtaacaaaactttgaaagctaaaagcagatagatgaatactcaagcagactcaagaaaactgagtcttaagccagtagagaagaaatttgagaaccagtctaggaattcctagtgtctgatatcttgagaagttgagataaatatggggctgaaaacaggaagattggttgaaagatgactttcagggtactttatagcccactcactccactacccaactctttgtagccaggcagcagcctctcctttccctgttgctgaagcctggaggtttgttttctgcaaagcacaggtctctgatctgagggacgccaagcacatctcagagtgaaccttccaaagtgaaaattttctctctacatatggaagttcatgcctttctctctcctcctgatttcctaatgctagctgtgaaccctagttatcctccaggcaagaggatggaagattctgctctggggactctgaccaactcaaaagaggagacttcaagacagttacctgtggaaggtcccaataaagtgatgcagctagatcactctatagagaggaccaaagttgacaagtctctcccatgtacaggaacttccaataagatttttagtgtcccatttttaaatacgagcagacagccaaggatcatcagacctctgaggaaggactctaacaacaataatggcaaagtccaaaacaaacaaactcaaacaaaatttatgggaaagagacattgtaaagagagatgaaacttcgaaagatgatcattaatatccccaaaagataaaacactatatccatgaaattggaacaggatggtaattttaaacattcaggttacaaaagagctcttagaaattaaaaatatgataacagaagcaaaatcctcaaattgaaagatagttgagataccctcccacaagacagaaagaaaaaaaagacaaagagattaaaaataagagcaaggagaagatttggaggatctgtccaagaaagacaatgacaaacaaaaagaggaggcagtcagcaaagaaacaaggcaggaagcttcctcagaactgtggagcacaggttgcagaccaaacaggccactaagtgacgagaacaacagaagaaaaagatctacttcaagacacactgctgtgaagctcagagcctactgcacagaacagccctccaagctgccaaggagaatgtttgggcttcaggatcaggaatcaaaatagtaccagacttttcgggagcaataatgaaagctagaagaaaacagtaataatactttttgaactccaagatgtaaaaatgattttaagccaagaattcacttcccagcaaaactatcaattaaatgagatagtagaaaagattgtttttagacatggacatttcaaaaaatttacaaggccttttctgggaaaaaaaaatctgcaagaaaatgaaattgatagaatagctgatgtgtttggacatcttgaagagaatatgtagataagtaagggagaatttgaggctgaatcagttacaggtacattgataacaccaactacaaaaagtcatttaggaaaagaaaagtcatcataatatatgacacttaaagtagtcccaataccaccagcagtgaatattgatgtgaaattaagctagtttttagggcaggaggggttggtgcttgggaagtgtgcatcagtgtggtggagtaaggagagaaaactaactgccacccaccatggctagaggccaataaataatgcctaatgctgaaaaatcaagaggtgtcaagacaagtgtgttaacagagttgtagacattgcaaggggctgcatgtaggaccagaattcctgtttatctaaacaggtcttggaaactgttggactcttccaagtaagcacctatataactttgatccaatataaaactaaaacaaaagaggaaataaaatggatattagataaactagactgggcagggcgagggatatgttactctacagatgcccataggaaacagtcaatatcagagggaggagttcaagaaagagccagaaggggacgaggaggaggcaggattgggacccagagcccagttgaagccttagattagaactgtccaatagaaatagaatgggagccacaaatggctcatagattattataatttgtcccacaaatgacacaaagatcattataaattttctagtagccacatttaaagagtaaacaggtaaaacaagtttttttggttttgatttggtttggtttggtttgagacagactctcgccctgtagcccaggctggatggagtgcagtggcgcaatctccgctcactgctgcctccccctcctggctcaagcaattctgcctctgcctcccaagtagctgggatcacaggttcccgccaccacgcctaatttttgtatttttaatagacacgtggctttgcctcaagtgagccacccgccttggcctcccaaagtgctgggattacaggcatgagccaccatgcccggccagaaacaaattttaataccaaatttgatttaactcaggatagccaacatgctatcatttcaataatgtagtcagtattaaaattatgaatgagctgtttctcatccttttcttacactaagtcttgggaatccagcatgcagttggcacgtatagcatttctgaattcacactgccatgcctcatgggctcctgtctgtccagtggctgccacagtgcagtgccacctagactgttctgatgttcacatgccccttcacgctcacccctaccccttccccaaagaaagaagggaaaagaagctgagttctacactgcccataggggaaaccgttcgctcctcagcgaggtcctgcccggtcccccaacagccttatgtcccaacattgccttcctcttcctctgcagtccccatacagtgaccagcttcctgggccactctctttactcatgctcaggactcgtgcctttccacccagccgtatacacctctgggcagcgtgcctgagtcctcagggtcagaaggaacgcctatccccctgcatccctgcactctgactgctgtggctcttcgtgtatggcatcccacgctgcagctctgtccttcattcgctccaccctagacagtgtagaagtactcagctaggagacgggaagaggggagccccccaagccctgacctgggaaggcttgggtctggcaagggagcaggcaccagtatctgcaccataggaagggggtggccctggggccctgcctgggagtctgccccctctgcccgggggctttatggagcaggtaggctgcaggcgacatgtaatgctgtttcctcggggagacgcaccagggggccgccctgacgctggctcctgcgcgtgccccgcaggccatcgccagccacatgcacctcaagtgcaagtgccacgggctgtcgggcagctgcgaggtgaagacatgctggtggtcgcaacccgacttccgcgccatcggtgacttcctcaaggacaagtacgacagcgcctcggagatggtggtggagaagcaccgggagtcccgcggctgggtggagaccctgcggccgcgctacacctacttcaaggtgcccacggagcgcgacctggtctactacgaggcctcgcccaacttctgcgagcccaaccctgagacgggctccttcggcacgcgcgaccgcacctgcaacgtcagctcgcacggcatcgacggctgcgacctgctgtgctgcggccgcggccacaacgcgcgagcggagcggcgccgggagaagtgccgctgcgtgttccactggtgctgctacgtcagctgccaggagtgcacgcgcgtctacgacgtgcacacctgcaagtaggcaccggccgcggctccccctggacggggcgggccctgcctgagggtgggcttttccctgggtggagcaggactcccacctaaacggggcagtactcctccctgggggcgggactcctccctgggggtggggctcctacctgggggcagaactcctacctgaaggcagggctcctccctggagccagtgtctcctctctggtggctgggctgctcctgaatgaggcggagctccaggatggggaggggctctgcgttggcttctccctggggacggggctcccctggacagaggcggggctacagattgggcggggcttctcttgggtgggacagggcttctcctgcgggggcgaggcccctcccagtaagggcgtggctctgggtgggcggggcactaggtaggcttctacctgcaggcggggctcctcctgaaggaggcggggctctaggatggggcacggctctggggtaggctgctccctgagggcggagcgcctccttaggagtggggttttatggtggatgaggcttcttcctggatggggcagagcttctcctgaccagggcaaggccccttccacgggggctgtggctctgggtgggcgtggcctgcataggctccttcctgtgggtggggcttctctgggaccaggctccaatggggcggggcttctctccgcgggtgggactcttccctgggaaccgccctcctgattaaggcgtggcttctgcaggaatcccggctccagagcaggaaattcagcccaccagccacctcatccccaaccccctgtaaggttccatccacccctgcgtcgagctgggaaggttccatgaagcgagtcgggtccccaacccgtgcccctgggatccgagggcccctctccaagcgcctggctttggaatgctccaggcgcgccgacgcctgtgccaccccttcctcagcctggggtttgaccacccacctgaccaggggccctacctggggaaagcctgaagggcctcccagcccccaaccccaagaccaagcttagtcctgggagaggacagggacttcgcagaggcaagcgaccgaggccctcccaaagaggcccgccctgcccgggctcccacaccgtcaggtactcctgccagggaactggcctgctgcgccccaggccccgcccgtctctgctctgctcagctgcgcccccttctttgcagctgcccagcccctcctccctgccctcgggtctccccacctgcactccatccagctacaggagagatagaagcctctcgtcccgtccctccctttcctccgcctgtccacagccccttaagggaaaggtaggaagagaggtccagccccccaggctgcccagagctgctggtctcatttgggggcgttcgggaggtttggggggcatcaaccccccgactgtgctgctcgcgaaggtcccacagccctgagatgggccggcccccttcctggcccctcatggcgggactggagaaatggtccgctttcctggagccaatggcccggcccctcctgactcatccgcctggcccgggaatgaatggggaggccgctgaacccacccggcccatatccctggttgcctcatggccagcgcccctcagcctctgccactgtgaaccggctcccaccctcaaggtgcggggagaagaagcggccaggcggggcgccccaagagcccaaaagagggcacaccgccatcctctgcctcaaattctgcgtttttggttttaatgttatatctgatgctgctatatccactgtccaacggagttagacgaatagatgtgttgtgttttttttcccttttctttctatgaaagaaattgttttagtcatagcttgtgggtttcaaacaatgggaaaagtgaaaaaagagaaacaagccatcaaggctgtggtctgggctggatgtttggtggtgggtcagcacggtgttgaaagagtagagaagatgcccactcaggggctcagggcctgggtccgggggcagggggatgccccagggccgtgatgggcaggggacctccagagctggaattccatggggaaggaataaggatagccaagctgaggaaatgagggaacggccactggcaccaaggcctggagcagagtagagcctctgacagggagagagcagcaggcacctggaggccccaggtaggcagccctaaggtaagggggttggccgagcccccaacaagtcagtagagcagcaagacgcccaccacctcccctcccgcagagcctgtactcactcagctgataccttagcaccagctatggatgtgccccctctctaggtttggggacagtggcctggtggtataggatcagctggatcccagcaggaccttgggatgggactggccatcaggagttcctctgggatcctcacctcgtggggctgtgcacaggggtgccccctgtgcgagcccccatctcctttccccagccaaggaaggcagggagagcccctggaacaggtgagccatcctgccgacaggagccctcatgaggccttactaggggtgctgggtgtgcctctggaaacaggcagcaggagcccaagggctgtctcaaggccatgccttccccgtcccagccccaccaaggatctctgctccactctctgccctcccatgcctgtccagtccccatgcccatctctgggccctgactggatgctcagccagaccttcagggcagtgaatgccaagggaagaagctatggagatggggcagccaggagcagccagtgtacctgcctgcaggccgggcccaacacagccaccatactcaagccatgtgcacgccggcggggagccaggccttcatagaacaggaatggctggccatcccccagtgtgccccatggtaggaaggggggtcaaggcagccccaggagtggggtgggtgcaccagcgtcctaggcatggaggtcatgggaacacaatccccaggcctcaagagccagagaagggccagccccaggcaggagcataacccctccaggaacagtgtcccctgaccctgccacgcacctgctgtcctggaccctgagggcacaggcccagggcatgcagctaaggctgggcagaggggcctgagggactgctgacctccctccccacaccctcaccccaaggtgccctcacggctgcccagcaggacaccctctctaggccacactgggcctggccaccctctctgggcaccattttcaagctagagcccttgctcctgacctttgtgacgggtccactagaagcctggccttcccaaaccccccacctgcccctcactatccacttcctaggtccccctggtcctgtgcctcatccacctccctaaggctacagatccagcccggcccccaccagagccctgctcctccccaccccaggtcaggtctttccaccccactcactgcccagggcctcctcacagtgctggcatagtgaagcctcacagcacccacggagcaagagagcataccgccctctaccataccctgctggctgcacagggcttctgcccaggtctggctgctgcccaacccctgcctgcagcagccttgcagaacctcatgaagcagaggctcccacccgaggacagtcaaggaggccaggcccaggaggggatgagggctgaagtgtggctgctggggtggttgtagggagggagtgtttctccagagccaccagccatgggagcacagagctacccagggcctgtcagggccaagggagaagggacccggtccaggactctggaggtcaggcacccctctcctttgcctcccaaaactgtgcctcagcttccatgcacccccaaggtctggtgggcaccccaatatcactcccagccatggcctcattggctggggccgtgacacccatcccaggtgggtcacccactgctccagggcagccctgaccctccataggcagggccactggaattcccggggggcaccaagggcagctgtgctaccgtctacaaagagggagccagtgactaagggcataggacccctgtggtgcatcaccagtggggggaccccaagcccgctcaacccgccaggccttcctgagcaatagccataaagggtcagtccttgggggagggcagtgccccacaggagcccctggtcagccccagcccatgggcacagtgcctcttagtcgggacccaggtcacagccaccctaattagcacctactgggccccagtgccaggggcattgcagatgacagacactgacccagccgggaggcggctgggcaggcagagggcacgagatcatgggcatggctgccaggttgcagggacctgagcagtcagcataggccggggcaagagcccacacccagatccaggccagggccaactcggggctcaaagctgaggtaggccccagagagatccccagcacccaggctctatctccgctgctggggcccagagaggagatggtgctggcctgaggacacacagtctgctggagacccagggggccatctgggtggagagccgaaggtccccttgcaggccaggtgtgaaggaccactgtgaagatggtctcagctgtccccatccccactgtggccctagcacagacagagggtgaccccacaagaggttctggatgtgtttctgaggaatgggggtcggctggtctgcagcccctggggccataggacacaccccagtttataggcaatgggggctgggaggtgaaacgctcaactcaccctgtgtaggagcaaggcccactcctgcctgggcctcagtttcttttctatgtaaaaggcagtgagccaagggaggtcttccctcccacgggcctgctggcttgggctgctgcacctggtgcatggcctccctcacctgccaagggcaggcatcaccccgggagccccagcccccaacccccccggagcctgcaggcctccaagtcagtctcagaagccaccccccagggcgtttatagcccatcctgcccacccgccctgcagagggaggaaatgcgcctggtgggcctgttcgcaggtagttgagacaggacaggaataaccatataaaaggcccggaggtagtggggccccaccccaccagggctcccctgcccagccccctgcacatctcaccctccatgctttgaagtcctggaggggtgtggccagcccccaacttgggcactcctcctctctctgacactcccctcctgacacctactttcaggatcctggggcctcagtttcctcccttcaaggaggatcctggaggctgccagcctggcctccccaggacgctgggaccgcagcaggcaggtgcaaggccagctccaggtccccatgcccgacatggggtgggggtgaggccctacttactgactgcccagtgcccgtccccagtgctgagcctgggcttggtgtgccccggggccctgccagccctggcccttgcccctgctccatcatgggtcctctctggaccatgctgggtcggtgggggcctgagaggctcatcagtggagacggcccctcccctctcaaccgggttccacacccagcctaactcccctagtgtgggcctggcgtcaccatcctccagtgggtgggagaggagagggcagagggcaggacccctgaccaagctctgggcctgtcagctcccaggggcacagctgctgccccaggagttgacacagcccaaaagatgaccttggctcagggggtcctcggcctgtccaaggttggaatgtggtctgtcacggcctccagggaactccaggacacaggctgagcagccaggaatgaattcagggcttccccgcagtcccttgggctatcctcaagaaggaacattctagaagcttcttgttgggggaaggcgaggcctggggaaagatgcccctgaagaggaagagaagctgggacttgggggtcccacaccccagtccttggagggggtcctccaaggaccagggcattgcagagatgatgtcaggcccagcttgccgtccaggcctcaatacgcctgtttgtgtatggggtggagtgtctgagacgtcgtcagacatcagccactcctaagccctagcaaggctgccctggccacaggtcccccgataaggtgaccctgtaacttcattccctggagccttcctccagcctggccctccccgatgtttcagccggatggatacctccgccctttcccctgcagatagcctctcaccaggaattacaatcagggccatgcactcagagcctggcatcatcagagtgggggacccaggtccccgagcccagggcggggcttggtgggtggactgtccatcctgcactgaagcctggagtgacaagccatgagagaaagtccacggggagaaccagagggggactcctgggatgcggagccagcctctgccctctgccaggctctgtcctgagaccctgcccttccatctgtaggccctgccattcctgggctactggcagagagggtagaagacgttggagcaccctgggctgcgggcccaggtaaaacaagtacagaccctgagcctggactgagctgaggatgtgccccatcctggaatataagaagacacggccctgccctggggtctgggagacacagcctcaacctgggtcctgggggaagcagtcccaccctggggtccagctgtcgacctgggatgagccctagttccctctgccctacagtggcaccaccgccccccacaggccccaccccctcccctggacagctcagccctctttcccagtctcctcccctcatggatccccctttctgcctctgaacccctagggatggatgcctcaggacagggcactcaggtccctgtcggagtcttgcttggatctggagccctggatcccaggggcatgacctcctggagcaacttccaaggtctgggggactaggtcagtgttcctccctgcagaactggactgctgtcagtggctgccttcgggatcatctgggagggcttccaggaggaggtgagcatggggacacttcctagggctccaacatcctcctgtaattctgagattgcatccctgcagacgccaggaaaaaagtgggttcccatggcagccggggagccctcagaaggggccccactgaagcctgggagccaccacccgcctgcctggccaggatgggagctcagcagaaggtgctaattgctgtttagctccaagctgactccttgctctctttttgtctctctctctctctctcttttttttttttacttgagcctctagagcacacagtaaacagtcatttggctcttggggccctgcaaattggtgtttatggtgcgaagatgaggaggatttgtccacccaaacacaggctggctgggagggaggaagcaggggtgggacatcccatccaggcccagctcggggaagcctccttcagactgaggagctgtggtctcacaagcaggggactgtgattaacccaggagagcttctaggaagaggtgaggcatccgcggcaaaaagacctcctccaggggaagctgcaaaggctccaccataccctcaggtgcccatggggagccctgccctccagacccagctgggatcagagcttcttggctgggtcacagcctgggtctccttccaacagcacacctcacctgcccacccagcagccagctgcagaattacaaactggaatgccaaggcccggtctcctggcaggagcaggaaacacagaagtccaggcgcaggcatatgggctggatgtgtggctgggaaaagtggatttccccaggtatctccccctcgttcacgaacctgaggtgggcagactatgccccagagccagtgcccgggctcctgtcttcttctgctgcccaaactcaccccaccatggcagaaggccaagaggccagactggcattgccctctccccactccatccaaggtctggcatgaggcaccggccctgcagtgccactcctcaatggagcaggcagcctgcagcaccaacaccaaaggctggggaggacatgggatgctggacatgggaaccatcaggagtgtgcaggaggggcagtgttggcgggtagtgtagaccagaatgtacagggcatgtagaagaatggatagtgtagacagggtagtgcagaggaatagcacaggtgggatagtgtagggggatagtgtggggggataatgtagggggtatagtgtagagggatagtgtagggggatagtgtggggggataatgtagggggtatagtgtagagggatcgtgtagggggaatagcgtaggggggatagtgtagagggatagtgtaggggatagtgtatggggatagtgtaaggaggatagcatgggggatagtgtannnnnnnnnnnnnnnnnnnnnnnnnnnnnnnnnnnnnnnnnnnnnnnnnnnnnnnnnnnnnnnnnnnnnnnnnnnnnnnnnnnnnnnnnnnnnnnnnnnnnnnnnnnnnnnnnnnnnnnnnnnnnnnnnnnnnnnnnnnnnnnnnnnnnnnnnnnnnnnnnnnnnnnnnnnnnnnnnnnnnnnnnnnnnnnnnnnnnnnnnnnnnnnnnnnnnnnnnnnnnnnnnnnnnnnnnnnnnnnnnnnnnnnnnnnnnnnnnnnnnnnnnnnnnnnnnnnnnnnnnnnnnnnnnnnnnnnnnnnnnnnnnnnnnnnnnnnnnnnnnnnnnnnnnnnnnnnnnnnnnnnnnnnnnnnnnnnnnnnnnnnnnnnnnnnnnnnnnnnnnnnnnnnnnnnnnnnnnnnnnnnnnnnnnnnnnnnnnnnnnnnnnnnnnnnnnnnnnnnnnnnnnnnnnnnnnnnnnnnnnnnnnnnnnnnnnnnnnnnnnnnnnnnnnnnnnnnnnnnnnnnnnnnnnnnnnnnnnnnnnnnnnnnnnnnnnnnnnnnnnnnnnnnnnnnnnnnnnnnnnnnnnnnnnnnnnnnnnnnnnnnnnnnnnnnnnnnnnnnnnnnnnnnnnnnnnnnnnnnnnnnnnnnnnnnnnnnnnnnnnnnnnnnnnnnnnnnnnnnnnnnnnnnnnnnnnnnnnnnnnnnnnnnnnnnnnnnnnnnnnnnnnnnnnnnnnnnnnnnnnnnntgcaggggtataatgtaggggtatagtgtaggtggataatattgggggacagtttagggggagagtgtagggtgacattgcaggggtgatagtgtagagggatagtgtagaaggatagagtacgggggatagtgtaggcaggagagtataggggcatagtgtaggggagatagtgtagggcaatagcgtagggtgatattgcccaggctatagtatagggggtgctgtagagggatagtgtaggggaggaaagtgtaggggggatggtgtagagcgatagtataggtgatagtataaagggatagtgtagtggggatagtgtaggggaacagtgcaggggggatactgtacagggatagtatgggggagagtgtaggtggatagtgaaggcggatagtgtggggcatagtgcaggtagatagtgtaggacaatagtgtaggtgatagtgtagagggatagtgtagtggggatagtggaagggaatagtgtaggtggatagtgaaggggaatagtgtggggcatagtgtagagggatagtgtaggggatagtgcaggggtcacagtgctgttggggtgccaaggcaccgtgctcagtgtccatgatggtttgtgtgctttgtgtctggagcatcacgtggggaccctgcagacacagagtcctggtcaccctccctgtttctgtgtcacttggcctgcctcaggtggagggtcagaggtcagtgtgttccccgttagtgtgggcactttcctgggctgtgcctaaccataggtggctctgctcaggccatcctggcccagtgctgcctaaaggtgtgcagctggccaccacccactctgaat

SEQ ID NO: 59 - DNA, 1555 bp, Homo sapiens
cggcgatggccccactcggatacttcttactcctctgcagcctgaagcaggctctgggcagctacccgatctggtggtcgctggctgttgggccacagtattcctccctgggctcgcagcccatcctgtgtgccagcatcccgggcctggtccccaagcagctccgcttctgcaggaactacgtggagatcatgcccagcgtggccgagggcatcaagattggcatccaggagtgccagcaccagttccgcggccgccggtggaactgcaccaccgtccacgacagcctggccatcttcgggcccgtgctggacaaagctaccagggagtcggcctttgtccacgccattgcctcagccggtgtggcctttgcagtgacacgctcatgtgcagaaggcacggccgccatctgtggctgcagcagccgccaccagggctcaccaggcaagggctggaagtggggtggctgtagcgaggacatcgagtttggtgggatggtgtctcgggagttcgccgacgcccgggagaaccggccagatgcccgctcagccatgaaccgccacaacaacgaggctgggcgccaggccatcgccagccacatgcacctcaagtgcaagtgccacgggctgtcgggcagctgcgaggtgaagacatgctggtggtcgcaacccgacttccgcgccatcggtgacttcctcaaggacaagtacgacagcgcctcggagatggtggtggagaagcaccgggagtcccgcggctgggtggagaccctgcggccgcgctacacctacttcaaggtgcccacggagcgcgacctggtctactacgaggcctcgcccaacttctgcgagcccaaccctgagacgggctccttcggcacgcgcgaccgcacctgcaacgtcagctcgcacggcatcgacggctgcgacctgctgtgctgcggccgcggccacaacgcgcgagcggagcggcgccgggagaagtgccgctgcgtgttccactggtgctgctacgtcagctgccaggagtgcacgcgcgtctacgacgtgcacacctgcaagtaggcaccggccgcggctccccctggacggggcgggccctgcctgagggtgggcttttccctgggtggagcaggactcccacctaaacggggcagtactcctccctgggggcgggactcctccctgggggtggggctcctacctgggggcagaactcctacctgaaggcagggctcctccctggagctagtgtctcctctctggtggctgggctgctcctgaatgaggcggagctccaggatggggaggggctctgcgttggcttctccctggggacggggctcccctggacagaggcggggctacagattgggcggggcttctcttgggtgggacagggcttctcctgcgggggcgaggcccctcccagtaagggcgtggctctgggtgggcggggcactaggtaggcttctacctgcaggcggggctcctcctgaaggaggcggggctctaggatggggcacggctctggggtaggctgctccctgagggcg

SEQ ID NO: 60 - DNA, 1059 bp, Homo sapiens
atggccccactcggatacttcttactcctctgcagcctgaagcaggctctgggcagctacccgatctggtggtcgctggctgttgggccacagtattcctccctgggctcgcagcccatcctgtgtgccagcatcccgggcctggtccccaagcagctccgcttctgcaggaactacgtggagatcatgcccagcgtggccgagggcatcaagattggcatccaggagtgccagcaccagttccgcggccgccggtggaactgcaccaccgtccacgacagcctggccatcttcgggcccgtgctggacaaagctaccagggagtcggcctttgtccacgccattgcctcagccggtgtggcctttgcagtgacacgctcatgtgcagaaggcacggccgccatctgtggctgcagcagccgccaccagggctcaccaggcaagggctggaagtggggtggctgtagcgaggacatcgagtttggtgggatggtgtctcgggagttcgccgacgcccgggagaaccggccagatgcccgctcagccatgaaccgccacaacaacgaggctgggcgccaggccatcgccagccacatgcacctcaagtgcaagtgccacgggctgtcgggcagctgcgaggtgaagacatgctggtggtcgcaacccgacttccgcgccatcggtgacttcctcaaggacaagtacgacagcgcctcggagatggtggtggagaagcaccgggagtcccgcggctgggtggagaccctgcggccgcgctacacctacttcaaggtgcccacggagcgcgacctggtctactacgaggcctcgcccaacttctgcgagcccaaccctgagacgggctccttcggcacgcgcgaccgcacctgcaacgtcagctcgcacggcatcgacggctgcgacctgctgtgctgcggccgcggccacaacgcgcgagcggagcggcgccgggagaagtgccgctgcgtgttccactggtgctgctacgtcagctgccaggagtgcacgcgcgtctacgacgtgcacacctgcaagtag

SEQ ID NO: 61 - DNA, 21565 bp, Mus musculus
  misc_feature (1217)..(1236): "n" at positions 1217 to 1236 can be any base
  misc_feature (3121)..(3140): "n" at positions 3121 to 3140 can be any base
  misc_feature (5706)..(5725): "n" at positions 5706 to 5725 can be any base
tctcacttcacctgggtcttcctcaggacaggggcctgcttggaagagctttgtgagtgaagtggctcatccagtgagaaagaagagacagccctgcctgggaacaccctaggagcgagcttagcagactgcagataagggttcctccaccctagagacaccctctgactgtgggagggacttaaggattttctgactgcactaatcttgtcctagtttgtgaactcggcaaggcacagtggaccaaactgaaaaagcaggtacaggaatgactaaggctgagttgagaaactcctcacggctaggaccagggcctgctaggatccacagatggatggttggccaactttcagtcatcctcatgagataacattctgtctgggaaggtcaaggggtttgtgagcaagaagtagtacaggttgtatcctgtctcagtcaatgttctattgctgtgaatagacaccatgcccactctttacaaaagaaagcacttaattggagcttgcttactgtgtcaggggtgttgtctattatcaccatagcgaggagcacggcaacacaggcaagcagacaggacgctggggaagtagcggagagtcctgcatctggacccacaggcaagcaggaagagagtgacactgggtctcgcttggacctttgatgcctcaaagctcacccctcagtgacacacttctttgaactgaaagaacctagtgggaaaacccccactcaatttctgttcagtgcacacccaagaatcacgaacagacgaccatcttgatgtaaaagcatgaggtagtttaatgacggagctccgggccgacacatatctcccacaggagacagaggtgtggaccacatggtggagccataatggcggagctccggttcaaaacgtatctcacacaggagacagtggtttcgaccatgaggcttggaagctaggggcttttatagaaaagggggtagggctgggggaggaattagcgaggttttacatgattggtctatttaaatatcaacagactgtcagaagggcgggagatagggaggcactaggccagtcaggacatgtaaggcctgggcatgtcctggcctgttctgctatgttctcagccccaggttttaaagctcacaaacaactctttgggctattttgacataaattacatgaattcacatgtctcaagttttatttcctttcagaacaaggctannnnnnnnnnnnnnnnnnnncctgtccttaccctgaagaccatcctgtccctgaagacatactgtcctggtccctgtaactccctggggggcagccgaagtaggtgtttctatacatgaagagaggacagaaagttctacataagacaacctcagcaaacttcaccctcactgaacacatgtctagaatcccaccaaggtgggacaggctcagtagtaacagaactccagcccataataaagccattggcacaagcctaagtcacaccatggatgtcactgtcagcccatgacaagggaccagaaagagtagcacaattgagttggagatgtggttcttagcatgtatgaagccgtaggtttgatccttagtacgcatagccctggtatggcggtgcacagcgccaatctgtactcagaagcagaggcaggaggtaggaggattagatgttcatccttagctactcagtaagttctagaccaccctgggctccatcagaccctggtttgtttgtttgtttgaatttcttgttaccattgctctggaagggtagatgtttcaaacccaagaagacagatgccggtggatggattctgaactgtttcccaacagcatccgaagggtggttatagaaacatattcagaaatagaaaacagtgggggtgggggcttccgcaggggcctgtggtgtacctgttcaagcggcactaggatctgaacatctagtcaggtcacaaggtctgtgaggtctggactgaggcagaggtcactggccacgcaagtaagatctgagtcctttgttacagaggctacagagagacaataggaagattcccacacatgacttggatggcctaggaatgaatgagtgaacaggaagtgctgagccaccagtggagtgggatcacagatttgtgaagagagacagcacctgtccctctcatgtggtgtcacaagtggactgactaaattaaggaattgaaggatagaccaagagttcagcacatgagatcaatctgtgtagaaactcctggaatcactgcctgggtcctgagatcactgccttaaggagggttctccttggggacgtggattccaatgtcagtcataactcctagaagcttatcactcactctcagattcctcttagttgcacagcattaagggagccagccagactcctctacacaatgcttcaaaggagactaggctttgtgcctgagtaatgacagagaccttagaactcttgagagctatatacatccataatcaattaaggtctcttctgatgtaacttgtcttccaggtccaaaggaggggcctgttctcatgaataatggctcctcactcactgagaccctgccatgagccacacgtggtgctagacacaagatgaagttctctgccctcaggtccttcatagtgacagcttgacaggaattcagatcattggagcagcccaagagcaagtatgaaaaagatattctaactacaaggaagacatctccatccttggctactggtcctgcccccaggtaagaccagggaggaaagagaaagctaaggcctcagatactgagcaacagcctggccattgcctgctggatggtttctgtcttgggaacaccccaaactgtggattcccagaccaccaaatgttaccattgttgtgttgagagagagagagagagagagagagagagagagagagagagagagaatatgatgtttggtggaagtgcagtcaggtgtgggtggaagatggtgcctctgagggcccatgctgagccatcccttccccatgagggtccagccatagatggtatagtatagtacagtatagtataatatagtatagaatagagtttattcagggcatggggagggggggttaagagggtagtnnnnnnnnnnnnnnnnnnnncttccctttccttgctgtggcgtaagctaattcctgcattacggctggtgaggcatctacacatgctttaatataatctttcaggggaacttgtcttatggattggtctgttcaggtcttggcacaaggtattcacgtattcccaagccaattgttttattaatatatcagtcccttccgaggggggaagcatcctagaaactgcctcttccaatctagccacaaaactctcgtaagattcatcatgcttttgtctaattcctgaagggactgtggatttagccccaggtggaggtaaactctgccagctagatacagctatctgactaattttctccaacactgcttttgaaattttcagttgtgctgctcgtttagcatagtctttttgcccaagaagcataggcactgtgggtttagttccatttctattttcctcatggaacttcctcatatccttacctactcgcttccaatattctaatgtcaagcttccctcctctagaaaccagggactgattttttgcacgaaattatgaaatttatccgaaacctttaggcttcttccagacaacatgtgcttaaacactgacagaaacaatcttttcccttttaacttttactgccccgtaataaaaaattactcgtctcttaacggatgtacagatcctctcatctgcagcacggtcacgacgagatcctatctttgcctgagaaaataaagaatagaaagaaaaaagaaagagaaaaaagactgatctgcccgggtgtccctgtttgaaggcaccaactgctgcagaccctctgggctaatgtttgtctgcgtgaaaagagtctctcgagcagatgggcaaagagtcagatggagtgacaaacagatacacacacacacaagagaggtgttggatctgaatgtaatgttccagtcgagcctcagacattttataatacagagtaacagaataaggcacgttgaagttttccaggtgcgagaggagtgacttcaaaaggaaccagataaatgtttactttagagattatcaccctgcttcagatcagccctgtgccaggcaagaaatttacacttcagtgttaatagcaccagggggttgttaactcttgacaggcttcaagaatgatgtagtgtcactgaccccgaaattctctaggccttgttaaattatatctagtctggagaatcctcattatcaggatagtatattcacttgctcttggcatggaatgtagcttgtggtaaaatttttatctcagtgaggatttttgtctcttcctgcagacaactgagttaatggctgtaatttattcttttattgtagtgcttaattagttactgaataggttaagctccttgctgctgtctggaattttggaacactgggaaaggctttagctatgtcagaatacaatcttaaaaggcatttacaataaggtaatactaaatagagagcacgtggatccatacactagactaactcgggaatgaaaaaattaattttatggtttatatagattagggagagagtgacagaccccaggaagggagtttccttgaaactctttgcttcatgaaccagcttcccagctttcgctttgtcaagctgactccaccagagtgccatggcaaacatgtggtcactcagatgcctgttgctgctgctaaataccttcttcaccataagggactcttatcccaccaggagccctgaccctcaaatacactcttccataatgctgttttccatcctggtgttttataactgcaacagaaaattaatgggatacatcctgtcttaaacaaaaggaaaaaaaataaagcaaaacaataacaaaagtcattcaaataaagcattttggaagcaaaactaggcaataaaactaaaactggaacaaagacttttttttttcaagacagggtttctctgtgtagccctggatgtcctggaactcactctgtagaccaagctggcctcgaactcagaaatcctcctgcctctgcctcccaagtgctgggattaaaggcatgcaccactactgcctgtcagaacaaagacttctaattacttcctattaagaacagaccagctgtttcaaaacggggcataggggacagtgttagatttggtcctgtgtcttctcacaagctgcttagtttctttacagcccttcccccttttcatatacaaggtctcttttcatcctagcttgacctggacactgaagatgaccttgaactcctgacctccttggctccacctcccaaatgcttagatgacaagcacgcactaccagtcctggtttatatggagctggggatgaacccagggtgtcttgcttgctaggcaagtactccagcaaaggagctgcatctctaggctctcaatagacttcttcaatctttctacttcatgatctctttcactcaaggtgcagttcttctttgcagaggaagatagtttattctggaaccatacaaaaatggcccaggatcacagatttaggttaccccaaatttctgtgttcccaatgtggcaacagtttgaggagnnnnnnnnnnnnnnnnnnnngataggagaggagaggagaggagaggagaggagaggagaaatagaggctggccataagcatgtggagagggggaagggaatgggaagagaaggggaatgagtgagaggacagaggggtagcaagagggctagagagagcagaagcgatggcaagaagccccttttatagtgagtcgggcataactggctgttgccaggtaactgtggggtggagcctagacaaaacactaacagccatgctgtagcctggacacctgaggacccacactgagtcttgctgtcagctcttgaggaatgagcaccaaaagcatgtgtgtccccaacccttatctgtatgggatgatcctgggcatggctggagctgaggagaactctgaaaacacacaacaacaagctgtttcttcgcatcactagcagcaaacacggactatgctcccagttcccctccaccaacagctagcttccagctacagggcaacttggcctcggccccaccctggccaacccacccaagcagcttcacaactttttctgtctcctccctacccccaatcctaggaccagcccctgtcaccaccatcaactccttagactgtgaggaagatcaggtgcaaagcccctatttccacatgtgagaccaagaatggaagtgtgactctcagaaaagcaggtggaggaaactcagcagcccacaatcccctgagtagggctgtgctggaggatgatgggggtgaggagggaagggaaggagaaggaacaaacaggactgccaggcaaagggagcctgatgccctgatctcccccagaagaatcacccagaagcaggacgtgggtcccagggttctgctagagggataacactcagcaggtggtcgttaatatttgttaggtgtggaagcacttcctgagcggtaggaatagaatactggaggacgcttaggtaaaagcagaagggttggagatttccttgtaaaaactggggcttcagcacttaagatgagaaccaaaaccggatgcctgggctggatcctctgttcatactcaaggagcggagtgtaggaggcagcccggcacctagaggaagtgggaagtgagaaacagatctgttcaaaccagtgctgcaatgacctccttcccgaggaatttctgtcctgccgcctcatccccaaaagagggatggcccagacgggctcagcccagagggacctgacaacctgaagggcgggtgatgaggcatccttggtccaggacttcctcagccttacagcagcagagattcccatgagcgtttcaggatgcagtctgtcccctcactccttccggaagcaagctaagcctgcgcacaggtcttagtatcggtgattgccagaagccctggcctttccaccctccctaggtctgtcctgaaaggtaaggtagacatgctacaccagaagccacgccagggctctgatgccacattgtgtgcggtggggcacttagggcggtctcagccaggcttctgggtaccaccggggaccgccgccgtgggcgcatagcttgggacccctgtcgtagtctcagaggagcagttgtgcagccaagccaagggcacagccggagttgccagaggccagcagccagggtcgttctccccaccagccagagacccgcccacagcccatgaaacgccccgcctgcagcccgcccccgccatctgtgctccgctccgcctgcttgggtgcattcagcctttggtgatcctccaggacctaaggtttcggtattatcttcggggcctcttcacccggaggtgagtctgctgagcccgacctcaggtgttcactcgtcacgcgagggcctggccacggcggggaagcactgggagagagcgggaggccttgaccgcagcgtgtaggatctggggtcccggcgctctgctcccgggtgcagagtggttggagcatgcgaggccctctgcagcgtgctctgttcctaccatcaccccacccccaccccagtccttcctgcacgtttctggagaggcaaaggcccctgctgagccttcactgggtacccctatctcgactccacttgtctgcttgggatctccaaagggggatacaccctcgtaaactagagcaggaggctggggggtgggggtaggggtagggtctgaccagttagattgaggctggaccctccccagagtgaggagcgggaagctctttgtcttatccaggattttgcatatcaatgctgaggttctggtgattaagtagggtccctggctagcgggggtaacctgaacaaccttcctccgctggccgctagccaatagacacctggcttccgcggatgagccctttgagtttgtggaggtgttcctcaggtccccagggccctgccccgttgcctgcagatgtgtggacagacaaaacattggactcgttttccaaccacttcaccccttccttcgctagtcctccggtggacgatgggatgcctcattgacttgtttgtggctgtgcatgccagagcttcctagcagacagctcagggctccatcgttcctaaatcccactgtgtaacgaaaaaaaaaaaaacaaaaacaacaacaacaacaacaacaaaaacaaaaccagaaatgaggacaggcccagctgggcttggcactgaacttggccacctggagctttggctacccactacaagatgtcagcaagtctcaggatagaagaggcctaaggccagtcctggaagataccaaaacttcacctcctctataccccgttcctctaggagaactgtaagccacctttgtctctgggacgcccctctcccactcaacagatggcaccagtcatcttcctcctcaagaggccagtggtattcaaaataggatattgaaaccaagcaagctggtcctctcctctaccctatgccaaagacttctgcccaaagggcccagaaaagtcccatagccatctggctggctagtgtgctgactgctacaggtgtcagtgtccccagcgagcaggtagtggagtggaggtgtcttcttgtggaaatgggtcctgagcctctaccttgtacagaaaggaattagtgaagcccagaggcctccagcccgtgtctctgccacaagagagagggggtgggggtggggctgtatttggttcccagggctcagggaaggttttcggttcatgcatgctcatttatctgaccactgtcttaaccccaggacaaccacttaactgtccacttccatatcagagttcttggttcccctttacttcgtctatggagcccctgagtttgggaaggggtattaactgaaaggtaccattagatgaacttggagaaagatttgtaggtgccacgggagatttcaggtaaaagctcttttaataattggctacaatagcagcaggaggaggccaggaattctgaggtagagatttgattagcagcacgtggagcaaaggagacttctgactcctacaggtttcagaaagtggggagaggctctcagatgaatggcttggactgtgaggtaagtgttaatgaaaggaaataaaactgtaattcatgtaatgtatgttaaatagccccaagagttgtttctgagctttgaaacctggggctgagaacatagcagaacagaccaggacatgcccgggcaagcccatcgcctccctagctcccacccctctgacctaagttaaatgttacaggctgctgatgtttaaatggaccaatcatgtgaaaccgcgccaattcctcccccagccccactccttttctataaaaccccctagcttccaagcctcgtggtcgaatccactgtctcctgttgtgtgagatacgtttcgacccggagctccgccattaaaaaacctcttgttgttacatcaaggtgttgtgttctattcgcgattcttgggtgcacgccgaatcgggagctgagtgggggtttccccactgagttctttcattagtgtagcacgagactagcttaaggctgtacaaattgtccgtctgattggtgcatggggccaggtagacactagataagcaattgggccttaactcgagttgtcttaatggctacccccagggcagcagggagtcaatactgctctcctgtctggggcctgaatgctgaaaccatctacaaaggggacataaggcatattggggaggtgtagagtgggccaggcccagggtctgctggtatctatgccaggatcctgagtggtggtggcgtagcctgtcttttaaccaactgcctctctcacagtaggcttctttggcttgcgaaccttcagcagatgtctgccacttccaacatgagagtcttcctgcctgtgctgttggcagcccttctgggcatggagcaaggtatggagctctgagataaccctgcagcctggtcctcctcctgatctctcattctttctcctgagtagatgcccagggctcctcctgagccagccctcctaggaacgtctggccttcccacctcctactctctagccaactgacctagttcccctgatgctgtgctggcccagctacacctttgtcacctcgtgttgactttagccactccagtaccaaagtctgaagtcagttgtcattggctggcttttttccctgacccagggctgagcatgctgttgcttcttgtcagtgggttggggatcaagggccccactggaaagtcaccttaccctggaaggcttccccaggcaataggcaggtgtcacctacagcattgtcccttttgcagttcattccctgatgtgcttctcatgtaccgatcagaagaacaatataaactgcctgtggccagtttcatgccaggagaaagaccattactgtatcacgttatctgccgctgcgggctttggtgagtagctgcctgtttccctagccagggccagggacctgcggggctttccccatttcctgctaccctgtctgtctgtcccctcatcctcactttccatgcagggaatgtcaaccttggctacaccctgaacaagggctgctccccgatctgccccagtgaaaatgtcaatctcaatctcggtgtggcgtccgtgaacagctactgctgccaaagctccttctgcaacttcagcgcagctggcctcggacttcgtgccagtatcccactactgggccttggactcctgcttagcttgttggctctgctgcagctgagcccctgaccatcccccatgtgttctccatatccccccagctcaggaaaagcccagctccttttaggtcccaggggaccctaggaaccttcagctcctcctgggtgtgtctagttccccctccacactctctcaacgtcagggctaagtaccaaactcacccatacctgctctgttgaagtggtactggctacccttgcttccagagccaatcctataacctcccttggggaaccagcgaaggggtgaagatctccttggagtctcaagagtaccagagtcagcgccgaatcttgtggacacactgacaaggatgtctaatccaaatagatgtatatctgtgtgctcagtgtatccctgtgtgaatgaagccacttggattctggggtgggcaaagaagacctgaaaagattctacagcagaaggcctgtgtcgccaccaaaacccctccccctggtatcattgtacccaccttgtactctgttcaggaggctgcccatggaggactgccacccctccagatgaaggctcccactacccgatgcagttgagtcccatcctgccctctctgcccacactggcttcctgctgctattctagtgcctcaaataaaccgttcacaccctttcctgctatgtcctggttgtccttaacccgtcttccccctccggtccaaagggacctggggatcctgcaggcccacagccctgcttaagcgattctgaaagaccaaccccgatacagtgatacattcctatgatgccatcatagcagaagcagaggtctctgggaggccagcctggtgcatagcaaatcccaggaatctaggcccatttagtgagacaggcctgagagaaaagagagagagcaaaggcagagagaacttgaaagtgtgctgtctcaggctgaaagctgagaagtacagctacccataaaggcaggcccatcaggctggtcacacattcccaagctttgtctgccccagagacttcagaggcctgctgttgccacttgtccttcataaactaccctgtagtctaagccatgggagtctggcccaggcaagtgatacttgtccaccctataactggctttgctttgctttctggtattttaagacggtctcgctatgttaagactagctgccccaaacccagagcaatcctctttgagtgctggaattaaaggcatgcaccaccacacctggcccttagacttttttgtttctgaggcaggatctcacttgaacgttaggtactggcattacaggcagatgctactacacctggcttcctggggttcagtgctgtgagtattatggacactgatggagaagctcctgagtctgggtgcctaaggaagctatttctcagctgttcctaagcttctgggctgttgggtgataccataatgggataagatccacacagatcctggctgtggtgatatccgtgtctgaggaatactgcccagtgggggtcagacacagggacaacacaggggctcagggtgaatttctaaaatctatgtaggcattggctttgtgccatgattctcaagaccagggttcccatgacgtatagcctgagggtacaagaaggaattagcctcataccaggtagctcagctacctgaaaaggacaaactttggggaaatgtcaccgggacagcacctgagactcagaaagtatgctttgttcctagaatattgaaaggccaaatggagaaaggtgggagccaaatcttctgcaaggagcttgggctgcctcagtgtagacagtatccactgtggtgttcaggacagatctgagtaaggtttctagagactggcttgtctgtggtcccagcagatctaaccaccaaaagcagtatgagggaagacacctgggttagactcccgggacatgggaaccagaagggcaccaggcagtgacagggacacgtaacaagctctggttttctccctatcttgatttagcttccatattgtgatggagtggtgtcacaaggctcaagagttgaggccacacgtgatctgggatcctctgctctagtctggagggcgtgatggtttcaaggctaaaaactgggacagtgagtggtctgctctgattcctctcaggagaagaatgggcagaaggggcttgagttccaggaatgacctgaggagaagggagggtgaggattggaaagaggagggagaactggaagcaggggagggaggggccaggggccaagtttcacttcccaaaagcagaatcgaaagtatcccagagttaagtttcaatttcatgaagcttggaggcaggaagggtgtggaaagagggaggaagggtgaatggggagggaagggtgcacactgcacctctaagaaggctgtccaggtttggagccaccagcttcactcataccagattcaaatgctagatctgatcccacatgatccaatatgtctctgatttgttctgggcccattctacctccagaccctggccagctttcctattattgctgctagttagtgatcagtgaccagtgaccagggcttccccagtctgatcctgctagcctgccccaaccagcaagtgcttagctacctcccttctgtcccaagggctccagtgacagactagagattgaggactgcaacctcaggtggacgcctctccacctgagcatcatccaaccaactgagtatcctcaggcaagatcaaagcaaaagatgagagaaatttccctactagggctccctctaataaacagagcatatgcaggaaaagcctactctgtaccaaagtataaaaggcaggggcgatgtaaaggtctcgtaaaggggtctatacttcatggtggatgctttgggggctctgtccccagctcagtagcccactctcattcctgggagtctgttgcttgtctaaactctatctttaattctaaccatctggttccaatcttttgttctgagacataggagtctagagtgcactaatgcaagaggtgttttgtttgtttgtttgtttgtttgtttgtttactactttaaaaaattgaatcttatttttttattttaataaactttattatttaaaaaagcgtgcagatcaggggctggaaagatggctcagcagttaagagcactggctgctctcccagaggacccaggttccatgtcctgcacccacatggtggctcacaactgtctgtaatgccagtttacagggatacccatcctcttctatcctctaggggcactgcatgcatgtgatacacagacagacagacaggtagacagacagacagacaggcaaaccacttagacacataaaattaaaatctttttttttaaagctttcaaacaaaaccacgatacatcaaacattaaccagacccaaagcctagacgacgtaatgaacttacatgcagttagaactggcatttgaaatggaagccgtgaagctcagcattaaatttacacttccagtaccaaacattctatgcattgttagttagggttaccgttgctgtgatgaaacaccatcaccaaaagcaatatggggaagagagggcttatttgacttatacttccacatcatagtgcatcactgaaggaagtcaggcgaggcaggaacctggaggcaggagctgatgcagaggccatggaggagtgctgcttactggcttgcccctcatggcttgttcagcctgcttgctttcttcctcctcctcctcctcctcctcctcctcctcctcctcctcctcgtccttttttttttgagacagggtttctctgtatagccctggctgtcctggaactcactctgtagaccaggctggcctcgaactcagaaatctgcctgcctctgcctcccaagtgctgggattaaaggtgtgcaccatcactgcccggctcaatatgctttcttaaaggacccacgaccgactgcctgcccagggatggccccacctgcaatggcctgggccttcccccgtcaatcagcaagaaaatgctcttcggggcttgcctacagcgtgaagaacgtaggaaggcattttcttaattgaggtttcctcttcatggatgatttagcctgtgtcacgttgacgtaagactatccagcccacaccctgacccacttttctttaactccttcctccccttgcccatgatctcttattttggagacctgcaggtgctcaagcttgctttccctgacgctgtggctgtttctctgaccactatgcctaactttaaaggtgttaaaattgcagcgctgggtgtggtggtgcacgcctttaatcccagcacttgggaggcagaggcaggcagatttctgagttcgaggccagcctggcctacagagtgagttccaggacagccagggctatacagagtaaacccctgtctcagaaaaaaaaaaaaaaagattgcagcaagtgcctggacaagcagagtttggccacccagccgcagaaaagagccaatgcaaccacattggcaagagagactaagatccagtggccagacctcattaaactcatccttagggccttaacatgggggtaaggtttaaacaggagactgatagcaagggtgaggcagtccagccaaggtgtgccccccccccaccgcggtctcagttctcaagtctacagtgtctcacaagttataaatctttctccaggggacatgttcttcctcctgtttccccagcctttggctcttccagcaggaagtatctgaggaaattccagtttctggggatcctttatttcagtaatctgctagcccgagagaggaacgcagataaatttctcccagggaggcaggttccaaaggactgatttgccagtccagtcaagtcttccccttgatccttaactaaattaagttgtccttgcgatcttcttgctttccttctcagtctggtccaccccctatacacacctgccccagtgatgaactctaagggtccttagcctgcttcatcaggcctcatggccacagcacctcagcttccagaggccctaggtccctctccctctctttccattctgacaagccctttcctgcaacacgtttcatgtcaactggagcaccccaggcagctttgaggcctcaggtgactggctgactggcacacagtcccattaggaaaggctgcctgattgctggagggcctctcggcatactcagaactccgaggaccacggctatagcccagacctctggagaaatttagaagatggaatgctggtctgtgtaccggggcatagccagtggggaatccttagcccagctggcaggagtgattggtcttacagggcatgaccagaatgaccaaagtgctatagctctccaaggggaagccagagtaagacaggctgcccctgaggtggtggcaggtggcaagaagcagagggcagctaggagcccaagtcggggccactgagcaggaagtggctgtggtcacgcgcatgcataccgtacaccacttgttggggatctggggatctaggtccagcaaagaaagcttcaggaggaaaaactcttccatgaagtgttacagctcaataaagcaggcaccctcagtcaatctttggtgaaaatcactcaggcactttattccttgtggactaggaccttataaacattttgggatggggtgagtaagtgcttcctattggcttggtttgggattctctatctgcatggggaaggacttcaggtgttgactgtacatgcctgattttcatggtcctcctagtggggtgtctcagtcacgtgctccaggacaggaatctggttgggagctagtttgaactcctgccattctcaatgatgaattttatggaagttctgaacttgctacaaccttaccagctcttctatctggtggcatggcccactgcccccacaactcctccttttcctttttataaaggagaggtatcattggagtgactgtctcctgtgttggggacagtttggtattgaaccaaaacctgattggtagttatttttgcaatgctactaatctgctgctttagaaattggatgagacagggtgccaagagaagcaaggctccaagctcatacagggccaaggaggagcagaagccaagctaccaaggggttagagagccatggggcaggggtgttgggagcacagcatgcccagcgatccccctggagctctttgggcatttgcacatcttgttctaccagcccagattcactgacatagaagcaacattcctcttctagcaaaacacaagtccctccctgttcagcaggtagtaagcccaaggccctccagttttggagaacaactcctgccaaggaggttgtctggcattgaagggactcaagcgtgtctgcagtggaggccattgcctggtcaagtttggtctggaagtcgatggccagatgctgtgtttggaccagggctgctctaccagctcctgtcatgcctaatgagacaaggaaacccagtgcagcaagcagagggatgaagatatctctctctctctctctctctctctctctctctctctctctctctctctctcttcctcccatctgcaaggcaagttcttcaggttcatagagataaatctgggaaacaattattataggagttgcaggagccttgaaaaggggtggggcggggggcagtgttaatgcaggagcctgtagtgctttgcaccagagaagtgcagggggttgatgtatgttgatttggtgatggtgttgtaacaggcacatataagatggggtttttgaggagggtcctacaaggcaaaagggggaagaaatgccccacctttaggttgaagagaggaatatcctgtgctttccttgtgggtaagggtctatgggttttatgggaacagctgctaatagcagtcaggagagagaagcacagaaaaaagaggagtttttgggaggagttggggtgggtcattaaaggaaggaggtcagctgtatattggatttactgtagccaggaatgggtagcttggagttccttctgagactgattttcccattgaagaatattaacatgcataaagattgatttggaggtgggaggggggagttcacgagagacatgtaagttggctatggggtatttggcatagccattatggtagagtttacccatgactcctgttcgacaacattcatcccacagatggctgatggaaagctgaaaatgagttttaggttggtgagcatggtgccactgtggctggttggtttccactctgcagctccaatacctcctggagacattcacctgtgtttcagtaaggaaagcagaggaaagggctgtgtatagtggagatgccatctgggtgtagggagatctcagtcctggtccaacatgcttcaagtgggcaattctgggaccctatgatttttgagtgtgtatctgttgtaggtctccctagagaagaatctttgatggtaagtgttgggaaggctagagagaggctggacattagcggagttagtatgaagaatgacaaaggagaggtgtccccttcctccaggcttgagtaggctaaatagaccttaagtgcttgccacagttggaccttaaagacccaggtggaatcttccatctagcccatttgcaatttcttacaggaacagactgcccgctgagcttactttgcaacttaatctagctgaaacaaaggatggggtctgtggattttccctatataaacacagagctgaatattaaattttgagccttgatcagaaactttgtcttggcttcatccttctcttgcaccctatcctttatcatttctagcctccctttcaagtagacccagttctccatggctgaaggacagctacagagaagggaggttgtgtaaggcacatgcctgggcagcagtcaccaggtcatgaatgtctttccaggagatcttgttcttttgggcatggcatctcctctgcctcctcctccacctcctctgtccttgatctgccagtaagaggcaggctatcttcttggttggtgtttgacatttctggcaggaacccagataggaataggctgatactgtgggaaaacacaaacgaaatccttctcagttgtaaggagtctggtcctttccaaatcccatccaaaggatcatgacatcgtactaagatgggggtgggggtgggggtaggggtggttaaattttggtgtgtgccaatggagggaaataggagaatgcttagagtttttgtagatgttaaatatgcttggtgtagtcataactattgttaattgtacatgggggtaggtggttggcttttgttttagaagttgagcttttaggatttgatgtattctttctactatcccttggccctgagggttgtggggaatccccgtatggtgggcagtttcccattgtgtgcagaaagttttgaactgagaaccagtgaagacagggccattattagtttcttttatctgttgaggaatgccctctgaagctaagttcaccaagagctgacaaaaaaaggctctgtcaaaatcaaagacaccccaaattttcctctatcaccccatcctatcagttctgatcaagaagtagggtcgccctggaggagagctccaagatgaagtttctgacagctttattttaccaaagtccagtctcccaacccaacctccatcccagagaacagggtgttaaagaagggacttccttgacattccttggcacttctgaaggactgcccctcttgtgaaccctgtcctctaaccccaagtctctgaagactgttgatgaaaagggaacgctgttgtgcggatagatgtggtgtaggaaaacagctatggagactccaactcctgggcaggtttgcccggatgtctaagtagggaggacagaggctccagtgggggccaggagttccagccagaactcagcacctgactgtgaggtggggcctgacccctctatgtggaccagaagttctccctggggtaccttccaacctcccagcctctggccagctgtgctatttccagcccccagcctccaccctcagaggggagtggtctgggaatgtcacggagatgacatatacacttcatcccaggcctggacagaggccagagagccctaagaggctctattagagcccctgctcccttcacttccgaaggtccccatagtcctctccctcctctaaacttcaggaaatcgaaactcaaattctccgcctctccacctcttcccaaaagtcaggaaactgaaagctagctcccgaccacctctgccaatttactttctcttctctctcccaggtatcttacagcctgtctgaagcctgtggtgccctgcccatggtgagtcctaagtaggacccagaatctaagcaggaaagtggaatgggagttctgcccagtgaaagctccctttgaagtagctctggctccccaaacacacaagtcagactaaatcttccctggagcgctcaatgcccgtattacccccaagcgcccctggaaactcctatgggttggacgggaagggtcgggcatcctcctctcgcccccagggagggacagtgttgttagtgagtgtaatagctctcagcgtgtgcttgctatggggagattccattgacttgaaagttgaaatgcgctcttactgctttgacagcttctgccactaggggcgcgtgtggccaagcctggagcccgggtttgaaagcaccaccctcctgggatagggttagtcagcttcttccggcaagctgtgcctgccggtgaattaaaggggcaagggtggccacggtggcacatccagctcccgtgctaaccatcagcttaaagtcattagatgaaaatgagaacacagccacatgccacaattgagtgtcccctgccctagagcaaactcccttcagccctcacccatagggcctttccatctgctgggcagatgactaaggatcttggtctaataattccatcttccattgatgagtctgcggttccatcttatggcttgagtgttggaacatctctcgtggaggagaaatgcacgggcgctaggctatgttccttcctcacagctgccttccagggtgtcggggtaccaggctcctgggaccccaacacatcactcaggggaggtgaaatgcagtctaaaataggggtcccaacccatgtttctccaggtgagaaatggcaggggctaggacagtggctgtggttctcaaactcctgggcacccagatgccgccgagaacggcattgagaatggggttcccatacttctgtgtatcccaaggccgctgaggactgcaagcagttgggagaacaagggccgagggcctgtgatgagggcgtgtgggggctccaacttaactcaggtgagtgccaggagtgtgcaggggccttctacccgagacttaggtgcagctctgtatgatgaaggcttccccccatagtggtccttgatgaaggagacagcccttgcttgtccaaactgtttattcatggcacatgaagactcatgtgatttactcagggtgaaccagagattaaataccttttgcagaaagggacgcttaggaagaatgctcattggctaaacac

SEQ ID NO: 62 - DNA, 1072 bp, Mus musculus
cttcacccggagtaggcttctttggcttgcgaaccttcagcagatgtctgccacttccaacatgagagtcttcctgcctgtgctgttggcagcccttctgggcatggagcaagttcattccctgatgtgcttctcatgtaccgatcagaagaacaatataaactgcctgtggccagtttcatgccaggagaaagaccattactgtatcacgttatctgccgctgcgggctttgggaatgtcaaccttggctacaccctgaacaagggctgctccccgatctgccccagtgaaaatgtcaatctcaatctcggtgtggcgtccgtgaacagctactgctgccaaagctccttctgcaacttcagcgcagctggcctcggacttcgtgccagtatcccactactgggccttggactcctgcttagcttgttggctctgctgcagctgagcccctgaccatcccccatgtgttctccatatccccccagctcaggaaaagcccagctccttttaggtcccaggggaccctaggaaccttcagctcctcctgggtgtgtctagttccccctccacactctctcaacgtcagggctaagtaccaaactcacccatacctgctctgttgaagtggtactggctacccttgcttccagagccaatcctataacctcccttggggaaccagcgaaggggtgaagatctccttggagtctcaagagtaccagagtcagcgccgaatcttgtggacacactgacaaggatgtctaatccaaatagatgtatatctgtgtgctcagtgtatccctgtgtgaatgaagccacttggattctggggtgggcaaagaagacctgaaaagattctacagcagaaggcctgtgtcgccaccaaaacccctccccctggtatcattgtacccaccttgtactctgttcaggaggctgcccatggaggactgccacccctccagatgaaggctcccactacccgatgcagttgagtcccatcctgccctctctgcccacactggcttcctgctgctattctagtgcctcaaataaaccgttcacaccctt

SEQ ID NO: 63 - DNA, 411 bp, Mus musculus
atgtctgccacttccaacatgagagtcttcctgcctgtgctgttggcagcccttctgggcatggagcaagttcattccctgatgtgcttctcatgtaccgatcagaagaacaatataaactgcctgtggccagtttcatgccaggagaaagaccattactgtatcacgttatctgccgctgcgggctttgggaatgtcaaccttggctacaccctgaacaagggctgctccccgatctgccccagtgaaaatgtcaatctcaatctcggtgtggcgtccgtgaacagctactgctgccaaagctccttctgcaacttcagcgcagctggcctcggacttcgtgccagtatcccactactgggccttggactcctgcttagcttgttggctctgctgcagctgagcccctga

SEQ ID NO: 64 - DNA, 21526 bp, Homo sapiens
  misc_feature (1)..(1993): "n" at positions 1 to 1993 can be any base
  misc_feature (5327)..(7874): "n" at positions 5327 to 7874 can be any base
  misc_feature (15923)..(16250): "n" at positions 15923 to 16250 can be any base
nnnnnnnnnnnnnnnnnnnnnnnnnnnnnnnnnnnnnnnnnnnnnnnnnnnnnnnnnnnnnnnnnnnnnnnnnnnnnnnnnnnnnnnnnnnnnnnnnnnnnnnnnnnnnnnnnnnnnnnnnnnnnnnnnnnnnnnnnnnnnnnnnnnnnnnnnnnnnnnnnnnnnnnnnnnnnnnnnnnnnnnnnnnnnnnnnnnnnnnnnnnnnnnnnnnnnnnnnnnnnnnnnnnnnnnnnnnnnnnnnnnnnnnnnnnnnnnnnnnnnnnnnnnnnnnnnnnnnnnnnnnnnnnnnnnnnnnnnnnnnnnnnnnnnnnnnnnnnnnnnnnnnnnnnnnnnnnnnnnnnnnnnnnnnnnnnnnnnnnnnnnnnnnnnnnnnnnnnnnnnnnnnnnnnnnnnnnnnnnnnnnnnnnnnnnnnnnnnnnnnnnnnnnnnnnnnnnnnnnnnnnnnnnnnnnnnnnnnnnnnnnnnnnnnnnnnnnnnnnnnnnnnnnnnnnnnnnnnnnnnnnnnnnnnnnnnnnnnnnnnnnnnnnnnnnnnnnnnnnnnnnnnnnnnnnnnnnnnnnnnnnnnnnnnnnnnnnnnnnnnnnnnnnnnnnnnnnnnnnnnnnnnnnnnnnnnnnnnnnnnnnnnnnnnnnnnnnnnnnnnnnnnnnnnnnnnnnnnnnnnnnnnnnnnnnnnnnnnnnnnnnnnnnnnnnnnnnnnnnnnnnnnnnnnnnnnnnnnnnnnnnnnnnnnnnnnnnnnnnnnnnnnnnnnnnnnnnnnnnnnnnnnnnnnnnnnnnnnnnnnnnnnnnnnnnnnnnnnnnnnnnnnnnnnnnnnnnnnnnnnnnnnnnnnnnnnnnnnnnnnnnnnnnnnnnnnnnnnnnnnnnnnnnnnnnnnnnnnnnnnnnnnnnnnnnnnnnnnnnnnnnnnnnnnnnnnnnnnnnnnnnnnnnnnnnnnnnnnnnnnnnnnnnnnnnnnnnnnnnnnnnnnnnnnnnnnnnnnnnnnnnnnnnnnnnnnnnnnnnnnnnnnnnnnnnnnnnnnnnnnnnnnnnnnnnnnnnnnnnnnnnnnnnnnnnnnnnnnnnnnnnnnnnnnnnnnnnnnnnnnnnnnnnnnnnnnnnnnnnnnnnnnnnnnnnnnnnnnnnnnnnnnnnnnnnnnnnnnnnnnnnnnnnnnnnnnnnnnnnnnnnnnnnnnnnnnnnnnnnnnnnnnnnnnnnnnnnnnnnnnnnnnnnnnnnnnnnnnnnnnnnnnnnnnnnnnnnnnnnnnnnnnnnnnnnnnnnnnnnnnnnnnnnnnnnnnnnnnnnnnnnnnnnnnnnnnnnnnnnnnnnnnnnnnnnnnnnnnnnnnnnnnnnnnnnnnnnnnnnnnnnnnnnnnnnnnnnnnnnnnnnnnnnnnnnnnnnnnnnnnnnnnnnnnnnnnnnnnnnnnnnnnnnnnnnnnnnnnnnnnnnnnnnnnnnnnnnnnnnnnnnnnnnnnnnnnnnnnnnnnnnnnnnnnnnnnnnnnnnnnnnnnnnnnnnnnnnnnnnnnnnnnnnnnnnnnnnnnnnnnnnnnnnnnnnnnnnnnnnnnnnnnnnnnnnnnnnnnnnnnnnnnnnnnnnnnnnnnnnnnnnnnnnnnnnnnnnnnnnnnnnnnnnnnnnnnnnnnnnnnnnnnnnnnnnnnnnnnnnnnnnnnnnnnnnnnnnnnnnnnnnnnnnnnnnnnnnnnnnnnnnnnnnnnnnnnnnnnnnnnnnnnnnnnnnnnnnnnnnnnnnnnnnnnnnnnnnnnnnnnnnnnnnnnnnnnnnnnnnnnnnnnnnnnnnnnnnnnnnnnnnnnnnnnnnnnnnnnnnnnnnnnnnnnnnnnnnnnnnnnnnnnnnnnnnnnnnnnnnnnnnnnnnnnnnnnnnnnnnnnnnnnnnnnnnnnnnnnnnnnnnnnnnnnnnnnnnnnnnnnnnnnnnnnnnnnnnnnnnnnnnnnnnnnnnnnnnnnnnnnnnnnnnnnnnnnnnnnnnnnnnnnnnnnnnnnnnnnnnnnnnnnnnnnnnnntggcaaaacccccatctctacaaaaatacagaaattagccaggcgtggtggtagtgcatgcctgtaatcccagctactcaggaggctgaggcaggagaatcgcttgaacccgggaggcagaggttgcggtgagttgagattgcgccactgcactccagcctagataacagagtggggctccatctcaaaaaaaacacacacacacacacacaaatcaactgttcctctggcccccactttcacctgcaacctggagagcagtggacactgatcacagcctcacaagaatatgaccctcccttttttcctttcctccttcccctgcggccacttctttctttaactattgaagccccaaaaccctctttggaaaaggagtgggctgcacaccctactgtgttttctgcctctttttcccgggcatggcttcaaccttggcaaagtgaacctctgaactggttgagacctgtctcagtcactctgtgggaggggcctcccctgaggttggggaagatgtcccaagaggagggacaagcagcaactcagggaggcctggagccaacttcggtttcagggttgagccagggtcaaggtggcagtggaagttacaggaagagcctaaggccccagtggtgggagcagatgctgaaatccccgggagcactttggactgtgccctgggagaggcgggaaccaagcctgagagcagagtactggcagctgcacgttagaatgtgaagcctggacacagggaggtcaggcagcgagctcacctcacggcagcccagccagagagtcagcctgctctccccgcactgagccaaggctgggagacagcctacctcccaccagagccagcaggcaggtcccagcccagcctgccccgtcccgccccagcctgccctgtcctgccatctgcactccccgtcaggcctcctggccagccccacagtccctgccttccaagagacacaggcagcggcagcaggggctggatgggggaggccaagaatcagaggcgctcccccacaggacccctgaatcgtggccagagaaaggtcagggcaggatgaggcctgtggccacgggcagatctcaggtggctgacccgtcctaggagcacacagggcagctgtggctccttccctcttgaacccagaaaacagggcagagctcatcggtggcctcatctgccagccccagcagtaaggccaccggctcattcttcatggggcagcagcatctggctttctggctccagacaccgcctgctgggccaggccttcaaccaggtccctcctgacagcaggcacgcctgagtccagacccgagacagagccgggaggcagcctgcagcaaacgtgccccaaactccacaggcgcctaacccagtcctgccaagggaaagtgctcaaggctctgccctctcgctggaggcccactgctcactctcacccgtgggacttctccccacaggccccagcagcctcctcccgtcatctgagacgctaccaggacaaaagtcttccacaactagggccaaaggcctcttagtcatggaagtctccctgaacctattctggttcggaggttgcctggtttaaaattttaaaaattaaaaaaacaaaagcctccgcatgacagcaggcccgtcccagtcttatgatctctctgctctggtgtgggaggaggagggagtgccgtgtgaggaggagggagtgccgtgtgaggaggaggagggagtcctgtgtgaggaggagggagtgccgtgtgaggaggagggagtcccgtgtgaggaggagggagtcccgtgtgaggaggagggagtgctgtgtgaggaggaggagggagtcctgtgtgaggaggagggagtcccatgtgaggaggagggagtcctgtgtgaggaggaaggagtcccgtgtgaggaggaggagggagtcctgtgtgaggaggagggagtgctgtgtgaggaggagggagtcctgtgtgaggaggaaggagtcccatgtgaggaggaggagggagtcctgtgtgaggaggagggagtgccgtgtgaggaggaggagggagtcctgtgtgagggggagggagtcctgtgtgaggggggagggagtcctgtgtgaggaggaggagggagtgctgtgtgagaaggagtgctgctacgtaagaaggaggtagatgtgtggggggagagttggcattcggcccggtcaggactccatggcccttgttacagttgtgggtagaaatggaatctctgtgacatctcctgctcccctttcgcctgccccaaggcaggtctccagtactccctctcctttctgatcatgggcccaaagaggctcattcagagaggatcagtcccatgccctgggggcaggaatgctgagcacatagaggtttacctggaggggccacgtgggcggcatggaagctccccaccccttccgggagacggcgccctgtgcctctcgcgtgtatccatttataattaactgcaaatgtgtttccctgagttccctgagccactcttgcaaatcaattgaacgcaaaaccgggaggggctgcagtattgctgggaaagagggtcctgatccagaccccaagagcaggttcttggatgttgtgcaggaagtaatttggggtgagccacagagcacagtgagagaagcaggtttatttgaaatggctccgttccagagtggggcgtgctcagaaagcaggaggaggagggcctgtcctctgttagtgcctctgcttacaagaaactgtaaggagctacaattacacctggaatgggcagatgcacccactaaggataggggctgtgggtgccatcagtgcccgttcatcctccaacctcaggctgctcattgaaattatctctgagtaaagtggcctgcactcttgggttatctggacagtctgcgggcttgctgggagatgccccatatggccacaaatattctgtaattataattggtgtccagcttgagacatggctatttttagaccataagcattaaccttataggtgccttgtgagtgcctcctactcacttcaagatggagtcactctggtcatgtttcattaaaccagaggcctggtgagcaagcgttcctctaacagtgggaacctcaacgtcgggccagtcggtaagaagttccagaggctggccctcgcagctcatgtgtgtgcatatgtgtgtgtgtgtgtgtgtgtgtgtgtgtaggtgtctggatctgacgctatctgcaggtaccggaatggtgttggaggacactcggctggtgtccgctgcagaactgatggcttgctcggtggcggggagannnnnnnnnnnnnnnnnnnnnnnnnnnnnnnnnnnnnnnnnnnnnnnnnnnnnnnnnnnnnnnnnnnnnnnnnnnnnnnnnnnnnnnnnnnnnnnnnnnnnnnnnnnnnnnnnnnnnnnnnnnnnnnnnnnnnnnnnnnnnnnnnnnnnnnnnnnnnnnnnnnnnnnnnnnnnnnnnnnnnnnnnnnnnnnnnnnnnnnnnnnnnnnnnnnnnnnnnnnnnnnnnnnnnnnnnnnnnnnnnnnnnnnnnnnnnnnnnnnnnnnnnnnnnnnnnnnnnnnnnnnnnnnnnnnnnnnnnnnnnnnnnnnnnnnnnnnnnnnnnnnnnnnnnnnnnnnnnnnnnnnnnnnnnnnnnnnnnnnnnnnnnnnnnnnnnnnnnnnnnnnnnnnnnnnnnnnnnnnnnnnnnnnnnnnnnnnnnnnnnnnnnnnnnnnnnnnnnnnnnnnnnnnnnnnnnnnnnnnnnnnnnnnnnnnnnnnnnnnnnnnnnnnnnnnnnnnnnnnnnnnnnnnnnnnnnnnnnnnnnnnnnnnnnnnnnnnnnnnnnnnnnnnnnnnnnnnnnnnnnnnnnnnnnnnnnnnnnnnnnnnnnnnnnnnnnnnnnnnnnnnnnnnnnnnnnnnnnnnnnnnnnnnnnnnnnnnnnnnnnnnnnnnnnnnnnnnnnnnnnnnnnnnnnnnnnnnnnnnnnnnnnnnnnnnnnnnnnnnnnnnnnnnnnnnnnnnnnnnnnnnnnnnnnnnnnnnnnnnnnnnnnnnnnnnnnnnnnnnnnnnnnnnnnnnnnnnnnnnnnnnnnnnnnnnnnnnnnnnnnnnnnnnnnnnnnnnnnnnnnnnnnnnnnnnnnnnnnnnnnnnnnnnnnnnnnnnnnnnnnnnnnnnnnnnnnnnnnnnnnnnnnnnnnnnnnnnnnnnnnnnnnnnnnnnnnnnnnnnnnnnnnnnnnnnnnnnnnnnnnnnnnnnnnnnnnnnnnnnnnnnnnnnnnnnnnnnnnnnnnnnnnnnnnnnnnnnnnnnnnnnnnnnnnnnnnnnnnnnnnnnnnnnnnnnnnnnnnnnnnnnnnnnnnnnnnnnnnnnnnnnnnnnnnnnnnnnnnnnnnnnnnnnnnnnnnnnnnnnnnnnnnnnnnnnnnnnnnnnnnnnnnnnnnnnnnnnnnnnnnnnnnnnnnnnnnnnnnnnnnnnnnnnnnnnnnnnnnnnnnnnnnnnnnnnnnnnnnnnnnnnnnnnnnnnnnnnnnnnnnnnnnnnnnnnnnnnnnnnnnnnnnnnnnnnnnnnnnnnnnnnnnnnnnnnnnnnnnnnnnnnnnnnnnnnnnnnnnnnnnnnnnnnnnnnnnnnnnnnnnnnnnnnnnnnnnnnnnnnnnnnnnnnnnnnnnnnnnnnnnnnnnnnnnnnnnnnnnnnnnnnnnnnnnnnnnnnnnnnnnnnnnnnnnnnnnnnnnnnnnnnnnnnnnnnnnnnnnnnnnnnnnnnnnnnnnnnnnnnnnnnnnnnnnnnnnnnnnnnnnnnnnnnnnnnnnnnnnnnnnnnnnnnnnnnnnnnnnnnnnnnnnnnnnnnnnnnnnnnnnnnnnnnnnnnnnnnnnnnnnnnnnnnnnnnnnnnnnnnnnnnnnnnnnnnnnnnnnnnnnnnnnnnnnnnnnnnnnnnnnnnnnnnnnnnnnnnnnnnnnnnnnnnnnnnnnnnnnnnnnnnnnnnnnnnnnnnnnnnnnnnnnnnnnnnnnnnnnnnnnnnnnnnnnnnnnnnnnnnnnnnnnnnnnnnnnnnnnnnnnnnnnnnnnnnnnnnnnnnnnnnnnnnnnnnnnnnnnnnnnnnnnnnnnnnnnnnnnnnnnnnnnnnnnnnnnnnnnnnnnnnnnnnnnnnnnnnnnnnnnnnnnnnnnnnnnnnnnnnnnnnnnnnnnnnnnnnnnnnnnnnnnnnnnnnnnnnnnnnnnnnnnnnnnnnnnnnnnnnnnnnnnnnnnnnnnnnnnnnnnnnnnnnnnnnnnnnnnnnnnnnnnnnnnnnnnnnnnnnnnnnnnnnnnnnnnnnnnnnnnnnnnnnnnnnnnnnnnnnnnnnnnnnnnnnnnnnnnnnnnnnnnnnnnnnnnnnnnnnnnnnnnnnnnnnnnnnnnnnnnnnnnnnnnnnnnnnnnnnnnnnnnnnnnnnnnnnnnnnnnnnnnnnnnnnnnnnnnnnnnnnnnnnnnnnnnnnnnnnnnnnnnnnnnnnnnnnnnnnnnnnnnnnnnnnnnnnnnnnnnnnnnnnnnnnnnnnnnnnnnnnnnnnnnnnnnnnnnnnnnnnnnnnnnnnnnnnnnnnnnnnnnnnnnnnnnnnnnnnnnnnnnnnnnnnnnnnnnnnnnnnnnnnnnnnnnnnnnnnnnnnnnnnnnnnnnnnnnnnnnnnnnnnnnnnnnnnnnnnnnnnnnnnnnnnnnnnnnnnnnnnnnnnnnnnnnnnnnnnnnnnnnnnnnnnnnnnnnnnnnnnnnnnnnnnnnnnnnnnnnnnnnnnnnnnnnnnnnnnnnnnnnnnnnnnnnnnnnnnnnnnnnnnnnnnnnnnnnnnnnnnnnnnnnnnnnnnnnnnnnnnnnnnnnnnnnnnnnnnnnnnnnnnnggggaggggcaggagaggggctggggctgccggtgggttggtccccagagagctgagcttctcctcccatcccccgcaggcctccccgaatgtttccaaagatctggggcgggaccgggcggagactgccgccaggagcctcccggccgccccagggctgcgcagccactggagcccatcacccaactccagacgctcctggctcctctacgtgggccgggagggacagccttgaggactaggggagggggcacgggaccttgcagagctcctggccggaaagggaggattgaccgcccccggcatatcaccccggagcactggaacccgcccccgcttcttgttttggcactggtggtgcttgcggtgaggtccaaggagcccagcctccctgagtggaccgccgggcccctccccgttccgggacacaggagagctcccgccccttgctggctgggcagcccctagatacctggctcccaggggccagcttccctgagcctggggatgagccatgagcctgcagcctggccccagggcggccccccacggcctgccggctggctccctccggctccatggcccacccggccttcctaattgccttcggctcccaccggtgccttagctcagcctggtggcccagcgggttgggtgccacccagtgagcaggtggcggcaccagctggacctgtttgtggccctgtatgctaggacttcctcagagacagctcagggaccccccccacctaccagaacctcacttagggggtggggggaaaaggaattggagatccttcctcctcgggctactccctggaggcggggataggccccagccggacttggcactgtttttggccacctggggctcccactcccaaccccaggatgtcagcccaggtctcactgtcctggcctgctgctctccccttagggcctctgcgggcccctctccagatctgttctctgaggcatcctccttacccccagtgcccagcactagctccccaggcccgggatgtccctcccactcctctgcccacggctgtccctgacagaaggcagcagcctccccctccaacaccatgcactcacaaaacagagaatcacgaccccagctgggtgtgttccagattctttctccagcagtgcagagggtcctgtgcagaggccgaggagcagtacagcgacccatctggccctttcctgctggtgggaccagtggcacgcagccttgtctctcggagcccatttcccagccacagaatggggagtagcagatactgagtggggtgctttcctcggaactgagtaacatcaggaatggggagtgctttccccctcagccatgccccacctggccccaggtctccatgtgaggggagctgcctgggctcaaaacactgagccatcccaaggaaaattctagatacagattagctaatatacactgacagatacacatatagatgtgtatatagatttctcttttttttgagacagggtctcactctgttgcccaggctgcagtgcagtggcatgatcatagttcacttcagtcttgaactccctggctcaagagatcctcccacctcagcctcccaagtagctgaccacaggcacgtaccacgcccggctaatttttgtattttttgtagaaacaggaggtctcactgtgttgcccagggtggtctcaaacccctggcctcatatgatcctcctgccttggcctcacatagcatggagattacaggcgtgagcccctgtacccagccccagactagctaatattatgactgatcaccattccccattccccattcccccaccccaggaccactggcagaggccactcactctgccttcttttctgtggttctgagaaggctgctgagtttcctcctcttgcctgtgcagccccctcctgccaggtttcaggagggagatagcctagagcatgtctgcactgagtgaggagtgggtcaggagagaagcagggaagtccttgtgtgctggcaggtcccttcccctctgctgtctgtgtcctcatctgcaaagtgggggtgcatggtcttggggaggagtgaggcaccacccggccccctaaccagtgtgtctctccagagcaggacaggctgctttggtttgtgacctccaggcaggacggccatcctctccagaatgaagatcttcttgccagtgctgctggctgcccttctgggtgtggagcgaggtgaggtgcccttggggaccccagacctttgtccagctgtgccctgctccactccctctccacccctctcccctgagcagacgctccaggggtccttccaggccgctcccagcagagggctcacccggcctggccacactgtctcactgtgtgtttgagtgtcgcttgacctgctcgacggccagggtggggtgtcactgtctttgctctgccttcagcccagggcctggtatacagtaatttctcagtaaatgtccactggggtcaggcctgggagggacactggaggcttccctgagacaggtgtgtcctccttccgcagccagctcgctgatgtgcttctcctgcttgaaccagaagagcaatctgtactgcctgaagccgaccatctgctccgaccaggacaactactgcgtgactgtgtctgctagtgccggcattggtgagtgccaggcctcagaccgtgccttcctcccctggccatctccctagcccgggccggggctcagcagaggccattgctgtctgtctgcagccgtctgtctctcccctgacagcctcatttcccatgcagggaatctcgtgacatttggccacagcctgagcaagacctgttccccggcctgccccatcccagaaggcgtcaatgttggtgtggcttccatgggcatcagctgctgccagagctttctgtgcaatttcagtgcggccgatggcgggctgcgggcaagcgtcaccctgctgggtgccgggctgctgctgagcctgctgccggccctgctgcggtttggcccctgaccgcccagaccctgtcccccgatcccccagctcaggaaggaaagcccagccctttctggatcccacagtgtatgggagcccctgactcctcacgtgcctgatctgtgcccttggtcccaggtcaggcccaccccctgcacctccacctgccccagcccctgcctctgccccaagtggggccagctgccctcacttctggggtggatgatgtgaccttccttgggggactgcggaagggacgagggttccctggagtcttacggtccaacatcaggaccaagtcccatggacatgctgacagggtccccagggagaccgtgtcagtagggatgtgtgcctggctgtgtacgtgggtgtgcagtgcacgtgagagcacgtggcggcttctgggggccatgtttggggagggaggtgtgccagcagcctggagagcctcagtccctgtagccccctgccctggcacagctgcatgcacttcaagggcagcctttgggggttggggtttctgccacttccgggtctaggccctgccccaaatccagccagtcctgccccagcccacccccacattggagccctcctgctgctttggtgcctcaaataaatacagatgtcccccagcttcctgctctgagtgtggctgccccttgcggggagaggcagagcaccccaggtttggagggtcctggggtcttctgtggtatggcccaggggggtggtgggggaggaggagtcatccccctgagccacagccagctgcttgcctgacctcagagggagcccctccccagtgctctgccctttcttctgccccaggttcagcaggtcaagtgagttcctcctccacacagcggaaggaggatgttggggggcatggaggaaagaaagcgggtgcaagaaggagcacgctcaggctggggcagcacccagggccgtaggacttgggaatggagggtgtctgtctggacccgctggtgcagagggcacaaaagctgggctggggcaggacagacgggccggagtgtagtgagtggcctgtgggaggggcagggggctcccacgcagaagctctgggcagcagccctgacccatccgtgcctggactgcagcgctgcccgcttccccctggcaaacaggtggcagcctcctgacagaggaagccggcccaggccgccgtgtctgcagttgggtgctgtgcgctgcccagagggctctttgggctggagagagaaaacaagaacagacacccagtggaggtgtgtttgttcatttctccgggacagtgggagggagccggccagggtctcagccacttagggcccgaccctgaattttcccggctggccagaaactgtggtgtgtgtgtgtcaggatcccaggggcaccgtccagcaggaggggccggtggtcaacgtggaggcccgagattcccacccctggcagctgatgtgaatagccgggtcctcccaggtccctgaggtcaaggcaggtcaaagacctgtgtcctcctcctgggtccctgagctagtgattcctgtctgaaacacatgaatcattactgccacccatgaggggcccattgtaaccgagcgagagggcctggaagaggtcagcgggaggaggggcctgatcggtggatcagctatccctgtgcaaggacccggagcccatcagagcagcctgcagagactgagcttgagattccgtcgggagtttggattcgctgagtgggtcgctctagcattgagaaatgcaagcagagaacagagggtggaaaccagatggtccaggagcctgggcactgtagccaggaggacagagatcccggtgtgcagtgcgttcactgcattgttcactcggaatcgcaggtggctttgctggagggacagacagttgatcatagtggagctggtgagaggaagctgcacccaaaagccatggccgggaacctggatctgactgcagggaaacagaagcgtggtgggcgctgggcgatgatggaatttctaacaaatgctttgtttctgctaaagctaacttgcgcttccatctctggcatctcctccacttcccaggtgagctgactggttactgagcctcacaaccacactgagacgggggcgcggtcatcccctcgtttccccaggggagacaggctcagagtggaagccgcttgtcctcctaggatctgggactcggggcccagctctccctctgctctgggtttagggctgaggtcagaggcagccctgacctcctgctggtggtgggtagggtagtcccgccgggttcctgctgccccgccctcgggaggctggaggccccccaaggacaggtggtttccaggagcagcgggagggagcccgggttgtgtcctgggcctggagcagagaggggaggagcccagcgcctgagtttcaatttcctgaagcctgggggagggagaggaagagagcctcgtttcgtttcggggctctggacctgagcctcccgcccagggcccaccgcaccccgctaggacctgggatttcccagtctccacaccggcccggaactgggccccctcctctccgcagcccatccagccccacttccccgcttccccgcttcccagcatctgcccgcggatgagcctctggaggatgggcggcccgtcccggcgctgcccctcacccaccccccaccgctcaacccctgtggggacttcctgcagtgaggcccaggcaggacgctgcgctgcctcccccatccacagcctctgcccccttgacacccccgccctctgcggtgccttgcaggagtcgccagcctgtgggcccgggaccatttcacacgctgtccacagtcgtggaaacccggcagccacagcaggcctgggcccacggtgcctccacccctccgtcagcccccagcaagtcttcctgggggtccccagccctgagtgcgagaccctccaggctgcttctggacctcggggctggggctgagcccgatcctggctggaaatgagtgcagggccgggctgcctgggggaaggccctccagtctctgagccccaccctggggaatttgctgggacaccttgaaggccgcaggccagaccccaggggttaataagggaacaaagtccttgggcgaacacctgcatttactatctgagccagcaggcagctaggatgctgggtgagggggtctctgggctgctgggcggccaggcgggggcatcggggcaggagctgagggctgcactgggcaaccaccctgagctcctgtttacccaccaggggcagtgccagggcgggctgggctcacagcagagcccagaggaaggggctcaggctgagcaggagctccctgacagcctggcaccagaggccacgccgcactgtggccgccttgttacggaggctattttcacagcaggtcatgtccagcttctcaatcttcgagtcaatcagtctatcctcaatttctgtggggtaagaccctccagggaccacaggatgggtgaggttcataatctgggcacagagtggggccacagcccttgctagtgtagctgagcttctgccctgtgggcaagagaggagggtgtctggcacaggaggccccacccgaccccctcggacccgccccaggaccgcccccttcagggaaccttgaagccagtggggacgcggaggcgagcagaagagaacgggcggcggccccaggccccacaccaagtctgcagtccattagatggaggtccctgagctctgtccccagatctaagcttccaccaggccagggggctcaaggcagagcccctgggatgctgccagagagtgccctgcccacccctcacctgcctacagacgctgggtcccacccaggactcaccatcgatagtgccagtgaccacagaggaggggcagctttgagcctgcatgggataggagacggggtgacacaggctggggtccaggacaccgtagcactggaagcactcaaggccctggcctgggatggggcggggagggtgcaggtcagggtcgcaggctgaagggtgggttccagtccctctcaccagcaccggcagcaggcctgggcagcacacaggtaggctcaggtgcccttggctactcagaattgtgggcagggtcctgctggcatctggagcccccagcatcaagagggtcttactcccaccttcaggcctccttcccatcccccaccctcagccagcagcagcatggggctagtgaccttcatggtcttgggtatgggtgcattgagggcacatgtggcacagaggctctgagcctgggaagagctaggggaggccttgcacccccgagcctgggaacctctgccccacttctggtttgtgatgaggaacccggattgtttgtgtaaagtgcacacagctgatggcctcatcccatcatctcacagaatgggaattgaggggtagaaacccttccttcctgacctggctgctctggaaggcagacatgaccttgagcaagacccctctcaccccaccccttctctgcctggggcctcccagagctcagggtgtgagcagaacagatccggagggaggaggggctgcggtgaggagaggaggggctgcggtgaggagaggagggagaggttgtcccctggggtgggaggacgccttaggagaagttctgactcaatagagaggagggtcctggactagggccttgagtttcagtttcagtttcctggtgcatcacagtgttggtgtctgaagcaggagagaaaagcagccgtgagacctcaggtcacacccaggaccaggcccttcccgctcaggatgagggtctctggctgagcccaccactggcaggcccccgtgcagacagagcctgggaggggccagcagggcaacaagctctgacactgagaccccaagccaggcaccccttgttttctgtgcagggagcagaggcccctgtaacggggtgggacgacatgggggctcccttggggcaggggaggagggnnnnnnnnnnnnnnnnnnnnnnnnnnnnnnnnnnnnnnnnnnnnnnnnnnnnnnnnnnnnnnnnnnnnnnnnnnnnnnnnnnnnnnnnnnnnnnnnnnnnnnnnnnnnnnnnnnnnnnnnnnnnnnnnnnnnnnnnnnnnnnnnnnnnnnnnnnnnnnnnnnnnnnnnnnnnnnnnnnnnnnnnnnnnnnnnnnnnnnnnnnnnnnnnnnnnnnnnnnnnnnnnnnnnnnnnnnnnnnnnnnnnnnnnnnnnnnnnnnnnnnnnnnnnnnnnnnnnnnnnnnnnnnnnnnnnnnnnnnnnnnnnnnnnnnnnnnnnnnnnnnnnnnnncccacacccgaatttgttcttcacggagaatcagaagacacaggaaatgggccaggggtgactgactgcagactccaccccccctccccaaccaggtgctgggcagaaggaagagagggctgcctgggctgtggggacagagcccttgatgaagacagataaaggcagcagacctgcataaggatgggtcgcctctccggtgggtggtcccttccgaaaagcagaatccactctgtgccctcaggggtctctgcttggagagtccatggcatctgagaggatgggccaggtgaggtgggggtggctcctgagagcagggaggacaagggcggagctggaggcgtcaggcccagaagacccccccagtgacttggggcagctgtgggcaaggcttggacccaagaggcctgaccaccccgcctggcagcacaccagagcacaggccagacctgaaggggcagcgccaggggggcccatggtccacgggtcactctgctggccctgcggccacactgctcaggtcccagggcctgatgatggctgagccagacatcataacaccaagcaatggagaagttagaatattgctagggatactgacttgtatttttgaatcttaaaatatatgttttaatctgacatctataagcagtgcatgttacatgccagtcagagcatgagcatccccaagaggtgtgcactctgtgtatctatggataatgaaagcacggctttcacacagcaagttatcctcacttcctgtgatcaactctgatatcttctactttatttgaaagagtattgattgtgtcccactcgactgattttacaccctctatgtacatggtccccagtttatgggcagggcggttattttgtgttttattttgtttttgagacggagtcttgctctgtcgcccagtctggagtgcagtggcgtgatctcggctcactgcaacctccgcctcccgggttccagcgattctcccgagtagctgggattacaggcgcccgccaccatgcccggctaatttttttatttttagtagagatggggtttcaccatgttaggctggtctcgaactcctgacttcaagtgatttgcctgcctcagcttcccaaagtgctgggattacaggcatgagccaccacacctggcctgttatgttttttgagatagggtctccctctgtcacccaggctagagtgcagtggtacaatcacagcacattgcagcctcaacctccctcccaacctcaacctgcaggggaggggagggagaggaagggaggctcatctcagggctctgaacctgagcctcccaccagggatttcccagtctccacactggcctggaactgggcgccctcctctctgcagccccatccagcccccacttcccagcatctgcccacggatgagcctccggaggatgggcagcaagtcctggcactgcccctcacccgccccccaccactcagcccctgtggggacctcaggaggtaaggcccaggcaggaccctgtgccacctcccccatccacagcctctgcccccttgacgcccttgttacagaggctcttttcacagcaggtcatgtccagcttctcagtcttcaatcaatcagtccattctcagtttctatggggtaagaccctccagggaccacaggatgggtgaggttcataatctggacacacagggagggccacagcccttgctagtgtagctgaacttctgccctgtgggtgaaagaggagggtgtctggcacaggaagccccacccgacccccttggtcccaccccaggaccgcccccttcagggaaccttgaagccagtggggacacagagacaatcaggagacaagcagaaaagaacaggccgcgccgagtctgcagtccttccaggctcaagcgatcctcctgcctcatcttccaagtagctgggaccacaggcacctgccactacccccagctatttaaaaaaaaaaaatttatagagatgggatctcactatgttgcccaggctgatcttgaactcttgggctcaagtgatccccttgcctcagcctcccaaaatgctggaattgtaagcgtgggcctctgcacccggcctggtccgcaatttaaaaacgcacagccaccattccctctccagaaagcacccagatgcctttgggagaaccagcctcctccatggaggaaagcttgggatctgccttcccacctggggaggagagggatctgtggaaaatccttctgacggacttcccctcagtgcctgatccatactcaatagtagaaaaagtaagaaatatacaaagatagcagatacacggagacagttccccaaatagctgagcgaatagcgcagaagcaatattgaagacctaatagctgagacatttccagaactgataaagtgcatccagccacagatcaagcagcccagaaaattccaggcagcatcaacaaataaatagccccacatgcacccgtgaaaatgcagaagaccaaacaaaaaagtcctgtcaacagccagagaaaaagatcagccaccaggggtcggtagtgagaaggacaactgtggaagccaggagagacgacagccctgagttccacaggcaatggaagaaagactgtcagacagaaaggttgtccccaatatacttgcactaaaagaaaatctttttttaattaattaattaatttatttattttagacaggatctcactttggagtgcagtggcgggaacacagcttattgtagccttgacccaggctcaagcgatcctcccacctctgtccccgaagtagctaggatgacaggtgtgcaccaccatgcccagctaatttttgtattttcatagaggcggggtttctccctgttgccccagctggtcttgaactcccttgatcaaggaatgctgggactacaggtgtgagccacagcaccggccaagaaggtcttttaaaaagtcttttcgggcacggtggctcatgcctgtaattccagcactttgggaggccaaggcgggtggatcacaaggtcaggagttcaagaccagccttgccaagacggtgaaaccccgtctctactaaaattagctgagtgtggtggtgggcacctgtaatcccggctactcgggaggctgaggtagggaattgcttgaacccggaggcagaagttgcagtgagccaagatcacgccactgcactccagcctggcgacagagacagactctgtctcaaacaaaaaaaagaaaaagaaaagaaaagtgatctttaggctagacatggtgcatggtggctctcacctgtaatcccagcactttgggaggcctaggcagaaggatcgcttgagtccaggagttccagaccagcctgaccaacatggagaaacctgtctctactaaaaatacaaaaaaattagccgggcgtggtggcgcatgcgggtagccccagctactcaggacgctgaggcaggagaatcgcttgaacccaggaggcagaggttgtggtgagctgagattgtgccattgcgctccagcctgggcaacaagagcaaaactccatctcaaaaaaaaaaaaaaaagtgatctttaggccgggcacagtggcttgtgcctgtaatcccagcactttgggaggctgaggtgggtgaatcacttaaggtcaggagttgaagaccagcctggccaacatggtgaaaccccatctttaccaaaaatacaaaaattagccgggtgtggtggcacgcacctgtgatcccagctacttgggaggctgaagcaggagaaccacttgaacccaggaggcggaggttgcagcgagccaagatctcgccactgcacgccagcctgggcaacagagcgagactacatctcagaaaaaaaaacagtgatctttagccagaaggaaaatggtcccattcagaatcagagatacctcaagtgatgaagcacagattcgtagaaatgtggtgagtctaaatgaacatcaattctattaaaaaagataaaatagtggccggcgcggtggcttacgcctgtaatcccagcactttgggaggccgaggggggcggatcacctgaggtcaggagttcaagaccagcctgaccaacatggtgaaactccatctctactaaaaatacaaaaaaaattagcaaggtgtggtggcacatgcctgtaatcccagctactagggaggctgagatgggagaatcacttgaacccagaaggcctctcacgccattgcattccagcctgggcgacagagcaagactccgtctcaaaaaaaaaaaaaaagttctgtcttgtgggagatttaagtttttgtggtgaaattaaaattcataccataaatacaaacctggaaaggagtgaatacaatgaggcgaacccactgggcggttacacagtggcccacagctgtagtccccactactcagaaggctgaggcaggaggacggctggagcccaggagttcaagacccacatgggcaacatagtgagatggagcagggacccctcctaggtgcctgccaggctctcccaagcttggaaatcaaggaacactcttgaatcccttcaagggaaattccagtcaccttgccagccttgaaaggtaagtgagcagcctgccaggaaggcgacgggagcacgggtctcccaagcaggccacagccacaggtggtttgcttccctatagaaactaaagcataacatacattctcaagtctttcagaaacccccacccggtggaaaatgccgactgctatcacagagacccagataagggggaactgaggactgaactctggccgtgttctctgtcatgaatttcttcttgaggggcctggagggagtcacagctgtgagccactaatgtgtgcccccatgcacacagcacccttggcataactaactccatcttagagactccattgtatatcttacagggcacttggccaacaaaggtaagatgttttgcttaataaacaagttaaaaataaagcctgcatccaaacagatgaggacgcaagcaagcgcactcttcagatgtcacttctcacgggaggcctctgtgattgcagaaggaaaggccccagcagaactcaccatctgccgcctgaggctccaccacctcgaagacatccttgcaagatccacagactggcccagaccaggaggtttctgtcttcttcttgtgtcttcttcactctcctggactggttcgtgaaccctttctcctatctctgtttcctctggatgtt

SEQ ID NO: 65 - DNA, 1145 bp, Homo sapiens
gctccggccagccgcggtccagagcgcgcgaggttcggggagctccgccaggctgctggtacctgcgtccgcccggcgagcaggacaggctgctttggtttgtgacctccaggcaggacggccatcctctccagaatgaagatcttcttgccagtgctgctggctgcccttctgggtgtggagcgagccagctcgctgatgtgcttctcctgcttgaaccagaagagcaatctgtactgcctgaagccgaccatctgctccgaccaggacaactactgcgtgactgtgtctgctagtgccggcattgggaatctcgtgacatttggccacagcctgagcaagacctgttccccggcctgccccatcccagaaggcgtcaatgttggtgtggcttccatgggcatcagctgctgccagagctttctgtgcaatttcagtgcggccgatggcgggctgcgggcaagcgtcaccctgctgggtgccgggctgctgctgagcctgctgccggccctgctgcggtttggcccctgaccgcccagaccctgtcccccgatcccccagctcaggaaggaaagcccagccctttctggatcccacagtgtatgggagcccctgactcctcacgtgcctgatctgtgcccttggtcccaggtcaggcccaccccctgcacctccacctgccccagcccctgcctctgcccaagtgggccagctgccctcacttctggggtggatgatgtgaccttccttgggggactgcggaagggacgagggttccctggagtcttacggtccaacatcagaccaagtcccatggacatgctgacagggtccccagggagaccgtgtcagtagggatgtgtgcctggctgtgtacgtgggtgtgcagtgcacgtgagagcacgtggcggcttctgggggccatgtttggggagggaggtgtgccagcagcctggagagcctcagtccctgtagccccctgccctggcacagctgcatgcacttcaagggcagcctttgggggttggggtttctgccacttccgggtctaggccctgcccaaatccagccagtcctgccccagcccacccccacattggagccctcctgctgctttggtgcctcaaataaatacagatgtcccc

SEQ ID NO: 66 - DNA, 396 bp, Homo sapiens
atgaagatcttcttgccagtgctgctggctgcccttctgggtgtggagcgagccagctcgctgatgtgcttctcctgcttgaaccagaagagcaatctgtactgcctgaagccgaccatctgctccgaccaggacaactactgcgtgactgtgtctgctagtgccggcattgggaatctcgtgacatttggccacagcctgagcaagacctgttccccggcctgccccatcccagaaggcgtcaatgttggtgtggcttccatgggcatcagctgctgccagagctttctgtgcaatttcagtgcggccgatggcgggctgcgggcaagcgtcaccctgctgggtgccgggctgctgctgagcctgctgccggccctgctgcggtttggcccctga

SEQ ID NO: 67 - DNA, 96593 bp, Mus musculus
  misc_feature (10187)..(10887): "n" at positions 10187 to 10887 can be any base
  misc_feature (12842)..(12911): "n" at positions 12842 to 12911 can be any base
  misc_feature (22034)..(22053): "n" at positions 22034 to 22053 can be any base
  misc_feature (24129)..(24148): "n" at positions 24129 to 24148 can be any base
  misc_feature (44031)..(44050): "n" at positions 44031 to 44050 can be any base
  misc_feature (85698)..(85752): "n" at positions 85698 to 85752 can be any base
tggagctctgatgctgagggcccgcatgaaggccagctaggtataaaaatgcatctgaagtcccagacggttggaggcagagacggggaaaccacgagacaagcttgctacctagactagccaaactggcaagctccagcttcaagatcttgcctcagtaacttaagtgaaggatagaagacaaggagacctgtaaccccctaacctccacacaaatgcacacagctacaacaatacatgtttgggcccgaaaaatgagatgcaggtacctgtggttgtcaagactcagtgacattttgtgctgacttggagtcaagagtttccctctgttctggtgaactgagcacctgggttcaggccatctaacacctacctttctcaatgggatgacgtcaggcctcacaagatacccctgaaagcgcaaccatttgtctgccttccgcaggaacagtaagttattcagattccaggctctaatggtccctaggaatgagaaagttccctgaacctagtgccttctggagggagtgtgaaatctgtatgtatacaggagtggcctttggatttgatgtaggatgtactttgccaccctgattcagcctaatcaacttcttgtgtctcagctttcctaggtttttctattagtaaaaaaccagagatcatctctgaactacccaccattgcactttgagcgtcctcaaagacccccctttggtggtgctgtggtttcttctgttgtctggggtgataaacagcaaggtgaccctcccctctccactagcctgcaacagaaccacactgtagctgcctcctcaattcccagtgtgcatggaggacacctgctcatgatttgtaagagtctgagccctactctggggctagtgttagacatgttgctagtctcttgtaaaaacataagagatgtctctggagtgtggaagtctgtaggaatcccaaggtgagaggctgaggctcttgctctaggtaacaggaaaggtagacaagagagcagaaaagacatgttcccctaaggactgagctggtgggctaaggaagtacagaagctgaagggtaaactgaggaatgtgggcgatgcatgtttgcaacaggcaaccagcatcactggtgcatgggggagggggactgctaagagcactgtttgagtctgagcagcagtgacatgccatctatggggcattctctatcttccccctggaccctgactcccccagagaaggtggacacctcagtgagaacaaaaagaggccagaaaaagggcaagaaagtcagcagtgtcctgcttcaactctgctgttagcctcccagatggtgacaggcctgatacaaaggagaatagaagccatagctttgactgttctcctcaaaatgatgcttaaattgttgaaatgatatttcgggggcacctaaaagaggctgaaagggtggtggaaatggtaccatgcacttagagctagaaaagaagtaacatcgggagaagaaggcgaataaaattgttttgttgcctgtttggagccctgcatacccttggctactgcagagttggggctcttcactcaagggtccgccccgccccgccccgccccgccctgctagcatgtcctctttcctggaggcctgttcagtctccagattggtgtatctacttctctactcaaatacttctctttctgctgctctggggctaaacccccattcagccctttcacatcaaaaatgccaaggaagtggctcagaaattgtgcatgccatccaacatgtctgtttgccagcactgacctcccccagtcctcaccactggaaaacttcccagtgggcaatggggcttctgaagatgctaacaaagaggaccgactgggactgtgctctgcgggcagggtgcattggctcaaatcctagagagtctgtgtgggtcagctttgctcagagacagcatgagaagaacagtaacaaatgctgacgttagctatgaagtgttgtcgcgtctagtggagcatgtagcatctacctgcagaggccggctcgaggagctttgtcagtattttacggccagcacactgcctgtgctttgtagagagagaagaaactcagcaaagaattccccttgtgcctgaatccttgactcttagccctcattgcccttccattcccagctttgtttcatgagggactttgggtcggctctttagcacccttccccccagttacgttttatttgcttgcatgtgtgtgcctggaggccgaagaggcgttggatcccctagaactggagttacagaccatcatgagtcgtcatgtgggagctgggaattgaacctcagtcctctggaagagcagccggtggctcttaaccactgagccgtctctccagcctcagccagttcttcgtgaagttatactctctcttggctgagacttgagaagattttgaaagtatcatttaaccaactaccattctaatgtattctcggggcactaaggagaggagggggcaccggaactttctctgagcagagccacgtgggtccacatttccttgactcctggaggtgcccatgcggatctgtactagccaggttagtgacaggaacactgggaggccctagcagtatcttaagagtgcgggactccattagaccatgtcctgaaggtcccatggctgctgggttggcaggggctgcctggcctgaggtactctagcctggcacttaactactgaataactgatgggtggctctgggatgctggatgagtggatagggctgcccagacaaatgaagaaatgtcctggcacagagtccatgaaccaagtgcagagttgctcaacggttccaccctttcgtggctgttgttttatcagtgaaaagtgacaagaagagtggactggaggaggggtgaacgcaccatcataattcaaaaggaagggagcctcgggacacctgaagtcactctggccaaagggcatatgctgccttatgctcccgcagccgggcctttaaccgcttcctccaggagctaaacttctttgaaagtattttaaacagatgagctggagccttcgggataaaaaaaaaaaaatgtccacatattttaccagttttgtcatggccttgtttggttctgaagtaaaatcttaaaagctctctgagtctttcatcaacttccccatgtccagctttgctaagaagaaaactgctgcctggacttagaggaagagcgaataactaattcaccaacgtattaagatgggatgaatgggggcaccagatcatcactgatgaaagcaacttgcctcccagccagtctaggggaaatgattcttcctcattagtgcacagatatacgaacatgacctacatttaactactaaaaaagcacaaacacatctcctgacttatcaaagaaacaccagtaacctggggggcccagggcgtcagccaacccatttgagcccagcagccaggagccaggagccagtggctctctgtgaattccaggccagccaggcctacagaatgagaccctgtctcagaagtaaaataaaacagaggctggagaaatggctaagccattaagagcgtttgttcttgcaaaggacctgagcttggttcgcagtacactaatggaggctagctaacaactatctatagatttagttccaggggacccaatgccctcttctgacctcttctgggtgccaggtactcgtgtggtgcgcacatacacacatacatgcaagcaagcaaaacatccactagacacataaaaaatatttaaatgaaagtaaatattaaaatataataaaattaaaaacttcggaccaaaagatagctcttacaagtcagttagaggctagtaataggatgtattagtattcagaaataggatggaactgaccagctctagaaatagtttctagcatcaggatgtattcatttcattaacagaaacggcaattttcacacatcgcaccttgaatgagctgacttgtggtttgaaacaaatgaatgggcttaaaactagctaagaagtcagaaaagacagggcagtgaatgactgctcatcagaatagagaagaggtggggagagataggttttaaagacattcattaataatatggggaaggaagtgaactgcaagatcgtgtctgctgcaatattgttcccgttaccaaacacagtgaggagaggaactctagacgaatttaaaacccagcgcacaaagccatagacaaaatgagatggaaaagcagtcttgcagcttggatgcagaccttagtctgtaaaactcgattcctgaatgctttatattaaggaacaaagactagtgaagatttctgcagcaccagttgaaaaaaatgtcattcctaaagtgctccttcagaaatgaagtaattagaagtgacttgggatgaaaaggaagaggagctggagggccttagtggaacaatgtgatcatttcaaactccactacaggaagatgtcctgggagggaaaattaatgttacttcaaataaaattgtttttatatgttttagtaacaaactagtaacagagttcatgaaaaacaagggaagttagaagaacctactgtaagcaacagtattttttcaaagaaaaaaacaaaacaaaacaaaaaaacaaaagaaaagctagctttggaagtctacctggaggatgtcacaaaagttttcaggtcagacggcttccatttggacgactatgataacaaattacaagtgagaaatttcagaaaagggaagcgccacgtctgcagagcagaggaagttaagacatcactcattcatgcgtgagcacactgaaattgttaaagaatatggagtgcaggagataaaacccctcgtcgaccacctctccctccatgggagggggtggggaggagagctatgcaaagctgcctctctccttgtgctaggagggtttcatataatagaagtgatcagtactatacaatgactcacgtgagagccactgcccaggagagaaaggagaggaaaatgaggcaaccctcggccagacttttttctcttctcttctcttctcttctcttctcttctcttctcttctcttctcttctcttctcattttcttcttcttcctttgtttctttgtttccttctctctttctttctttctttctttctttcttcctttctttctttctttctttcttggagacaggatagctgtggctggaatggaagttgatatatagaccaggctggccttgaactcacagatattggcttgcaactgcctcctaaatgctggaattaaaagcatgtgtctccatgcctggtttaggaagccattcttaacaagttgttggggaaagtggctcaaagtgactgaggtaggaaaggttcgacacaggctgggtccaatctaagccccgaacacctggcggaggaatgtgaacttcattcattagtcatctgtagctggcttcctgacctgcactgctcgattgcttggtgactgatacaatgaatgaagccattcataaggtttttattgttgttgttgttgttcttgttgttgttggcttggtttgttttccacaaaccaaataagcttcctgggttttgctttagattaagattcattggtgcagaacaggaatgaacgaggtgggagacttatcacatgcgttcatgtcaagagcttgatgtggcatttactgaactaatcctactagatacgtcacagacatgttctcaacacttacttaatactattgataatccttcagagaaggaagacccagtgtaacatttcagttctgcatcagagaagcacatgcagatgtttaaagccataggttagctctgttcttagatgctagtcagaagcctccttttgcagtggccagaggtggatgcagagattcacaacgggccagagagctgagaatctgggactgagaaatgctcagccctagatgagacatccaaccacttctgaggtccagaggacttcaaggagggatggggcaggaaggaggatggggaggagagctatgcaaagctgccttctggacttgacacggcctttgtgctcatgaactccaagcagctgtgcttacctacacacgattaaccgggtcaacattccagccccgctgtgggaggggctcgtgagcaccttcccctctctgaggagctgtgtaggtagttaatgaatggctgctggggtaaggggaatcattttcttgaggggtgcaaccactgttcagttgctccaataaataagccttgatccacagccctaattagagtctatggcatgattgggcacttgtgcaaaaacacacacacagagtcacagacaattctctctctctacacacacacacacacacacacacacacacacacacacacacacacacacacacaaggatgaggacttttggggggggaaagaaggatctcagtaggagtgggagaggaataagggggtgaataggatcaaaatatagtgtgtgtgtgtatgtgtgtgtgtgtgcatgtggtcgtcagagaatacattttaagaaaatatgtttaaagactaatttattaggtatcttatgtatgtgggtactttgtctgcatgtatatatctaaacatcagagagggcatcagatcctatcatagatggttatgagcaaccatgtgggtgctggaagttgaactcgggaagagcagccagtttaaccacagagccacctctccaaccccaagtgggggaaaaagtccttttacaaagcttgaatatcactcctaaacatcacagctgtaaaaggataggataaggtttcgtataggatctacaaagccttgtctttgaaaaaaattgtattgtggacactcttcagatgaagtcttgtttttatttttaaagaattgccatgacagaatggaaaggagaagagagagagagaaaaaaagaagtttcatcagagggatgtgacaaccagagacactgtgaagagaaggtctagggaaatcagtctccagatgaaggagagtagaggagggaaaggccaaccgaaactaaggattatgaaaaggtcacaagtaaaccagatacttgatatgataatttaaaaattgaattaaataaaaggagtttgatggaggtaccctgtgaaagtagataaaacttgcgcagagaagctaaaggtcatcaaatgcaaaccctgtgctgggagtggaccatttctgttgttggtcccacaggcccaccaggcttccaagcaatataagcaatcaccactgtggttggtagcccaccagaactagacttgtgaagccgaagatacatgtgctgaagagaccacagggcatacagacatcaaggtgaggcagagaaggcgcttcctcccagctagctaacccctcatcatgccagaaggtgctattcaggctgctggtagagaactgtcatcagtaatcttactcagctggggtccctacttcctacatcactgacctgccaggcaaagggcacctactgacacactagtgggaagtctgctatgggggtgaccaaccacttcctgactgcaactccttcagaggaaattcacatctggtactataaacctgttaaaaagcctatggctggggaagtcacagccccagtagggcaggtacagatgttgttctgctaaacagatgtgatgtgtgcaccaagttgctttccaataattgtgcttgtgcataggaattcgtgaggatgtcatgtttgcttcgagaagtccaccccctcatgggcagtattaaacgcagagattcataactagtcactgagaataaaaaactggatgctcagccttaaataagacctgtatatcaccccccctcggaggaacgttgaggaaaagatgggagaaagagtgtaagagtcagaggatagagtggagtgtggtggaattttcttggcatgacatgacatggctgtcacattttttgtacaaagatatttctatttgtatgtgtatgagtgtttacttgcatgtatgtataccataatgagtgcttagtgtccctgaaggtcagaaggagtaggatcccctggaactagagttacagagcattgtgagttgccacttgggtgctgggaactcttctctaagtgctctaaacccttcagccatctcttcagccattctacctgacagcagctgtggttgtctgtactatacaagatccgtgcaatactgggagccaacatcctgtggtagggtgcaggaggatttacaaggatttttgacagttgatggttgccggaagagacattttcttcagtagtacagccactgttaagtttcctgtgctcctgtaattaatctctcgtctatgcttctggaaacaactctcataaactcattgaactaaaaaaaaaaaaaaaagtcttgctggtgtgatgactcagtgattaaaggttcttaataccaaaccagatggccgggttaatccctaggaaacccacggtgaaaggagaaccacctcccaacagccatccactgaccttccaggggattggaggggaagaaagccagctgggaggagaggaagggggtgcaggggatgtggacggcgatgaagagggtattgaatactatgcatacattaaacatgtgtatgaaaacggtatcacaccatgactgtgtataagtaagacataccaataaagcattaaacgttttaaaatagaaaaagccagtctctggcctgtggtgtgtgagctctgatttggaaagaaagggaaataccatttggagtttctgtttgaaacaacaaaatgcctggaaggagaggtaagctcactttctccaaggctgtatggtacaggacaaggggcaccctcatgcatcaccagctggactggaagtattgctcggtagcctaagacatccagcaagcttaggtcactccgtctgcctgactggccttggcacaagtggcttctgggcttgcttgtcgtctgttcactcttcccaggcaggctctccttgactctgtttccacaacttgcttcttctctctgtgtgcccttccaggttgaggtgctcatggtcttggcgccttctgccccgtctttttgccctagggccattcctatatgtctgaaaacattccttgactggctgactctagcacctggcaaagaacaaccctgctctattaaatcagtttcttccttcttagggcagcgcagttaaacctcaggaccaggaaatcatccctctcctcacataccagggtgttatccacacagtttactcactgtaaatagttcccttaagatagtggcaacaactagttgaagatttacaaacttcccagggccaatctactttctaaaaagcctgcttctgggagtgggaaagaggtcaccgttccgattctgaaatgcaaaactggtgataaactcaaaatttctctgggtctcagacaggactggacggagtctgtggtccttttcttgacccaactttttgcagagcaatgttcccagagcaaaggttgagtatgtggtttgtcccccacgtgccgcactgcgggagcatctagacaccgctggaagagtctctaatacatctcttgacgtttgccaaaatgccaaactttttcctggaacctggagtcattctgactggggacttttcttttccttgagcatctggggacctagaggtccgttcgtgggggacgtccaattctcagggttctggggatcacagcagggccagggttttcctccttgtgggggtttcagagcgcctctcgcgacttgcccagggaggcaaggcgaggcggatgcagggcgggcacggcgcgaggggcggggcgagtcagcccgaggccgaggcggggctacagcgaggctcgatccggcctaggcctcgctccggctccgccttgcccggctacgcaggcggtagggctggggtaggggccgggcggcaccatggcggcggcagcgcctgctgcggcggcttctcccgaggcgccggccgtctcgggcagcgcagacccggagacgggagacgaggacagtcgtgaggtccgagtgctgcagagcctgcgcggcaggatctgtaagcggggccggggctgaggggacccccggggcggcgcggagggtgggcggcggnnnnnnnnnnnnnnnnnnnnnnnnnnnnnnnnnnnnnnnnnnnnnnnnnnnnnnnnnnnnnnnnnnnnnnnnnnnnnnnnnnnnnnnnnnnnnnnnnnnnnnnnnnnnnnnnnnnnnnnnnnnnnnnnnnnnnnnnnnnnnnnnnnnnnnnnnnnnnnnnnnnnnnnnnnnnnnnnnnnnnnnnnnnnnnnnnnnnnnnnnnnnnnnnnnnnnnnnnnnnnnnnnnnnnnnnnnnnnnnnnnnnnnnnnnnnnnnnnnnnnnnnnnnnnnnnnnnnnnnnnnnnnnnnnnnnnnnnnnnnnnnnnnnnnnnnnnnnnnnnnnnnnnnnnnnnnnnnnnnnnnnnnnnnnnnnnnnnnnnnnnnnnnnnnnnnnnnnnnnnnnnnnnnnnnnnnnnnnnnnnnnnnnnnnnnnnnnnnnnnnnnnnnnnnnnnnnnnnnnnnnnnnnnnnnnnnnnnnnnnnnnnnnnnnnnnnnnnnnnnnnnnnnnnnnnnnnnnnnnnnnnnnnnnnnnnnnnnnnnnnnnnnnnnnnnnnnnnnnnnnnnnnnnnnnnnnnnnnnnnnnnnnnnnnnnnnnnnnnnnnnnnnnnnnnnnnnnnnnnnnnnnnnnnnnnnnnnnnnnnnnnnnnnnnnnnnnnnnnnnnnnnnnnnnnnnnnnnnnnnnnnnnnnnnnnnnnnnnnnnnnnnnnnnnnnnnnnnnnnnncgggcgagcggggcgccccgggagctcgggcaggacacttgtgcccgccccaccttgccgcggcggggacttgaatcgagagccggcgtgactgacggtgacttggggcaggatgtagtggcttcctgtgagcaggtctcaaaactcagtcatccagtccgcgctcaacccacttgattctctcccgtgcatttgtgagagccgcaccgatgagtgtagactcttactcagagacgggccagttcgtttgtcattgctatccttcctctttaaaacgaccctttgatattagatcgacttcccccagcttattgagatggtcccttttcactgtatgactggcgaatcagtagagtttattgttactttagttgaaaaccttttttaattcagattattttatccccagaatgaaatcggtctcctaaataatgcctggctataagagatattttatatgttgaaaattcaattgtgttagaatggctgatactgctctttctttggcagagtataaactttaattcttaaatctcgatgcttcttttggattctcccacttgagtttttgatgttactcccctttcaaggatttggaattttattaaaaccccaggagcaagcatgttaaatgttacttttcaattccctgacgtcatcctgggactcccaattcagacacttttaagtattaaaacttgggaaattacaccagagcagtgggtgttttgtgcgtcttaagttcccagtattttaagttactttcttagggtgtaaacttttcacaaattagctttcttacagttaatatttgcatgtatgtaatgtttgggaaaagccaaatacactagaattttcttcccctactaattaggtttttcaaatttttactactttatatttttctgtgacttgatgctagacactgttgaagccttgcgaatctataaaagcagattgtgttgtgggaagacagtgtgctctgttggagttgagatttagggttgggctgtttttaggagtaagttaccttctgctttgacctgatgcatagcaaaggttctgtgaacagtgtggtaaaaatatcactccaagtgaaattcgggtctgcagattaaaacacacacacacacacacacacacaagcacacaaaacttggtttctgtggcttaggcaatctcactcccagaaattgaccattaatttcctgggaatatttttattttaaccctagttaaactaaaccacttgtttctaccctagacagtttatttattttttattgctcatcttatagctcaggtcatgttgtgactgtttcacaaggatacatactgaaatcaagaacacccctcccatttcttgcccttcttttagctggtatgatcaaggttggttgccctccggatccttgtaaggaaatgcccttctgtgtttcctgaaactgacacgtgggctttgtaaggtgatgagaagtggcggaaacattagcaggtgctgaagtcacagaaatgggatgatggcagtttgacaatgaagaatctaagcagtttgcgagtgttgaagtcaccagtcctttctaccacactgagaaaccttggggagaacctggtagctccctgttagcctggagatgagctgttaagctcagaactgctctttgggagcctctcatctgatccacctgagaggaagcactcctgggtagtgtagtccgaatcatccttaagaagagcgagggtggcccgatgtttatattgtggaagttctagaggttagataatggtccacactttcttcagtgtttcatttctaacttatttgtgtcccatagatttcacaaggtataaatagtatcaagttgacagatcagaaaaccagcgggtgggggagatgggctcagttggtaaagtgcctgcttagcaagcaggatcaccagagcccaagtagaaannnnnnnnnnnnnnnnnnnnnnnnnnnnnnnnnnnnnnnnnnnnnnnnnnnnnnnnnnnnnnnnnnnnnnagagagagagagagagagagagatcaaaacaccagatgttggtctcaggcacccacacccatgggcatgcacatgcacacacagctagtgcacacagtcagtacattaacaagtacacacaccacacaaacacacacacacacacacacacacacacacacacacacacagagaccatcatatagctgttttcacacaaccagtttaaagaaatctattatcgcagacagtattttgtgttatagactgattagtgcccagtttcttagggcattttagtgtcctagatatcctgagggttttgaatgttcagcttccttacctgaattcacgacacaaagttgttagatatcttagaattttcatctgaacctttagtaaacaaaattaggagtatttttggtctgaactactttgatataagtagcatacctaaaggtagtttgtatgcaccccccctccattataccctatattcaggtgaaaaaaaagttttagatttatatgtgtgtgtgtgtgtttatgtctgtctgtctgtcttcaggcttgatatggcctcgtttttggttacccccttttctaattaagtcaactgtaaacattttgaaaggctctacactaccttacacagggcttttctctcagggataccaggttataaaggcaccagcctgcgaagatttgtgggaagtgtttgatatattgttcagtgagatctgtgagacagtgatgtggcccaagaactactcacttaggattttgacattttcagaccaagaatgacttccggctgtttgacaaaggagatagattaagtacttaagcttaggaggcctggtgtagtcagtaccttcagccccagccccctaaaaaaaaatctgggtcagccatgggccatctcttaggaaggagttaagtaggagataagccttatctgatgctcttgtccagcctgcactaacgtttcctggtgtagacagcaaattggaagcagaaagcccgtgttctgcttcatactgtgttaggtaatattcctgtgacttcaggcagctgtttactcttgagcttgtggttgtttttatctttctcatctttagagtggactagtgctttgtcaccagacacttggctcacgttgtttcctctgcctgagattgtgtccccccctccccttatttatgtcagagagccacatatccttccaatgcaatccaagtctcctctgaccagatttgcccttgtttctagccatatggctttgatgcctaaaaaaagaaaaacgtaattcatgaccattttcttcttataaaaatcatttgtatatgtcccctgttatgttaattttagaattcattcttgtttttaatatttgttgctgctggtggtgtgtgtgtctcagtctcactagatcagggcaggcctttagaaaataccctatctctcagtgttatagatactttcagagcactgtgtatctggataagaaagaatttccatatctctggacagattagcagggttagctttagtaaaggaaagcttcctgagtctctctggaagttctttattctttttcttgaaaagttgtaatgtctgctaatcttaggtttgaactgaggccaaacttgcctccttaggaaaaggattacattttttctaaatgctggcttattaattagaatattaattgtttcctgactgtgtccattagttttgttactaattggtccccagagcttggaaaagaaaatattaaactcatactttacctagaattgtttttatttgacatgacaggtttaaatgttttggtactaagatgtaaatcaagatgttttattgactacccaagggttgagaggaagagatttaaaagggattattcatgctaataattcattattatcagatgtttgaaatgagatgatgaatacttagtagaggaatttaaaagggtttactcatgctaataattcattattgtcagatgtttgaaatgagatgatgagttctttaggacggaagaagaatccatctttgagatggatagaaacagaggaaaaagggacctttgtaaaagttcacagagcattcagctaatcatttgctctgtgcaggacaggaataaacctcagggagttcatagagtttttgtaactgagaactctttgaatagccctggactgactgggaagtaatgtagctagaataaaaccaccatttttatcctttaattataaaccctaatcctatttccttgttaacgtgctttgtgaaattatttgataatatcagattctgtgctttacctactgatatatttatacccttttataccctagtaacagttttgttgtatagtcatgtgttattgttaaattaggaacattttgtgtatgttaaatttttatgacatctagttttgtgtaatgtttgttttttgattttttttgttttgtttttcgagacagggtttctctgtgtagccctggctgtcctggaactcactctgtagaccaggctggcctcaaactcagaactcgcctgcctctgcctcccaagtgctgggattaaaggcgtgcgccaccacgcccagctttgtgtgatgttttaatcatcaaaaatctctagctagattggcttcattctctttgtgtgtgtgtgtgtgtgtgtgtgtgtgtgtgtgtgtgcgcgcgcgcaggtacatatgcatgtgtgtatatgtagatgccagaggatgatctcagacattgtcctcaggaaacactgtccacctctcttatggcttggagccctactaattagtctagactggctggccagcaaactccatggatccctctgtctctaccatctctgtgctgggttacatgcaggacccttcacacccagcatttttgcctagtttccagggattaaactcaggtcctcaggtttgaggcaaccaaacatgacttactgactgatctctccccctagccccaaaatggcccattataaggttatatcaaatatgagccaggtggtgctgacataggcctttaatcccagcacttgggaggcagagacaggcagatatctgagttcaaggccagcctggtctacaaaccaagttctagtacagctagggttacacagagaaacagagtctccattgccacccccaccaaaggaaagaagaaaacatttttattattgagtgtggtttctttttcttttttttcttttattgggtattttcttttcttttttttaaaaagatttatttattatttatatgagtacactacagctgtcttcagtacatttcagaaaagtgcatcggatcccattacagatggttgtgagccaccatgtggttgctgggaattgaactcaggaactctggaagagcagtcagtgctcttaaccactgagccatctctccagcccaagccttctctccagcccgggtattttctttatttacatttcaattgttaccctgttcctcccccaaatgttatcatcccccctccctctgcttctatgagggtgttcccccacccaccactcctgtctccccaccctcgaattcccctgcactggggcatcaagccttcacaggaccaagggcctctcctcccactgaagacagagaaggccatcctctgctacatatgtaactgaagccataggtcctccatgtgtactccttggttggtagtttagtccctgggagctgggggggggggggatattgttcttcctatggagttgcaaaccccttcagttctctcagtcctttctctaactcctccattggggaccccatgctcagtccaatggttggctgtatttgtcaggctctggcagagcctctcaggagcctgccatatcaggctcctgtcagcatgcctcttggcttccacaatagtgtctgggtttggtgactgtatatgggatggatccccaggtggggcagtctctggatggcctttccttcagtctctgctccacactttgtctcagtatttgctcccgtgagtattttcttcccttctaagaaagatgaagcacccacactttggtcttccttcttcttgagcttcatgtggtctgtgaattgtatcttgggtattctgagcttttgggctaatatccacttatcagtgagtgcatagcatgtgtgttcttttgtgattgggttaacttacttaggatgatattttctagtcccatccatttgcctacgaatttcatgaagtcatggtttttagctgagtaatactccattgtgtaaatgtaccacattttctgtatccattcctctgttctttccagcttctggctattataaataaggctgctatgaacatagaggatcatgtgtccttgttatacactggagcatcttctgggtatatgcccaggagtagtagagccgagtcctcaggtaatactatgtccaattttgtgaggaaccaccagactgatttccagagtggttgtaccagcttacaatcccactaacaatggagaagtgttcctcacatatgtacagctttcctctttctccacatccacaccagcagctgctgtcacctgagtttctgatcttagccattctaactggtgtaaggtgaaatctcagggttgttttgatttgcatttccctgatgactaaggatgttgaatatttctttagctgccattttagccattcgatattctcagttgagaattctttatttagctctgttccccattttctaatagggttatttggttctctggagtctcacttcttgagttctttgtatatattggatattagccctccatgggatgtagggttggtaaagatcttttcccaatctgttggttgccatttagttctgttgactgtatcctttgccttacagaagcttcacaattttatgaggtcccatttgtcgattcttgatcttagagcataagccattggtgttctgttcaggaaattttcccctgtgcccatgtgagatctcagaagaagatggaaagatctttcatgctcatggattggcaggattaatatagtataaatggccatcttgctgaaagcaagctacagattcaacgaaatccccatcaaaattccaactcaattcttcatagagttggaaagagcaatttgcaagttcatttggattaacaggacagtgaaaactattctcaacagtaaaagaactgggggaataaccatctctgacttcaaactgtattacagagcaatagtgataaaaactgtatggtactggtgtacagagacaagcaggaagatcaaatgaataaaattgaagacccagaaatgaacccacacacctatggttacttgatctttgacaaaggagctaaaacaatctagtgcaaaaaagacagcattttcaacaaatggtgctgtctcaactggaggtcatcatgcaaaagaatgcaaattgatccattcatatctccttgtacaaagctgaagtccaagtggatcaaggacctccacataaaaccagatacactgaaactaatagaagagaaagtggggaagagcctcgaacacttgagtgtggtttcttatagtgctattaatgatagactaaccgtgcatattgaggagcccctactttacctcaaaaatgaggacttgggtgtgtctttcagaagatacccctcaaattatttaatagttgctttacgaagtgcaccatttgtcttaagataatacatcagagccctttgctttagacttgagtttgtttaatatacttgttttgtatttaatgcagtacttttaagaaattcgcctaagatttattaaggttgtttgaatcctaaacattttccagtgggcagtagttaattcagtagttgtatatgatacatagttgagtatctgatagggtatatcaacccctggtgctgagaaataggtctaagctgtgagtgggatgagaaagtctttactcagcgttttactctgaaatttatactaagcagtagcgttcattcattctctgcttagagagttagaaagctttagaactggaaggaaaagaacactgttgttctgttcatgtgtacgtgaagactagaggacccaagtggcacacgttaatcacttgttggacactagtgcactgttttttctagagtgctgttgatttattactatggatgttgaaaatgcactagatttaagctatgaagactgctttacctccccgatggtttttagagcggtgcagttgaggtttgtacccatgctcatctgctcctgctaagaacttagtgaggtgattaggaccagcaatgccgtgagctctgtggagataatctggatgtttactgtttgtgtcaaatcccaccttaactttttgcagtccatcagtgtctcttgaatacttaaaaacgtttgatatccagactctaaataaaatcatcattttgagggtctaccagcttagtttgtatctttttagaggtagtttaagcataaacaaataattgcttgtgtattgtagcttttccacttcagagaaatagaagcaaaatatgcagtgttctgcatctttttaaatataacttaaagatgtttttatatcctcacttaaaaataatatagtatgtataatacctcatctcacatcatctagatgtattgcattttaggtaaccagtcacctgttgattgcaatttaagttgtctcttgtctttgcaataacaaacattgccaccataaatagccctgtttatcatgtatatgtgtaaggtgtgtgtgtgagtgtggatgtgtgctactagggagaaaattcagggtcttatttgcactctaccatcaagccaagctgtaggccatgtgtgtgtgtgtctgtgtgtgtgtctgtgtgtgtgtgtgtgtctgtatgtgtgtctgtgtgtgtgtgtgtatgtttttggaagcagagtttctctgtgtagttctaactgccctaaaactcactctgtagacctggctggctggccttgaactcagagatccacctgtctctgcctcccacgggctgagattaccattgcctggctgctacatgttattttaaatgtgagctcttgctatgcagcccatgttgaccctgaatttgggataatattcttgactcttgcactggctgagtgtgctgggattacagctgtgcaccaccatgtctgggcttcatacagatttttaaattaaagaggttaatagaaaaatgaatgcaaagacactccacagaagaaaataaattatctagtaaatatatgaaaatgctggtgaaattgaccagaaatgaatcagagaaataaaagtataaatacctcaacacttaaaaaaatggaaaccttgtatatttcagtattgaatgaatgcttaaggaaacagatactgttcgtactttcattgtgattttacgtttataaaaccatgttagagcatttggtagtatctaataaaaacctagatgtatttttcttatgcttttacttttgccatctcatcctgcagacacaaagatattttgtgttgaccttgtttgttttttaaaaaggcacattgaagttctagtaacaggaaactggttaaagtggtttgttcataaatatattctatagcagttaaacagaataaactacatctatattatgatgaccccaaggtgtattattgagtgaaaaaaagcaaattgttagagtagtatgtatgtttattatctgtcatccatctatccgtctgtccatctatccctttattctgtctctatgatgcccaaggatcaagcctgggacatcacaaatgctaattaaattttctatcactgagctacaagccagccccttaatgtatgcttttaaactcttggaacagtgggtttttcccccctataaattagataaattttatttaaaaatgtctagaaagatgtatattgattttttccccaatgatgggcaacaggaattagtcttctgtaatgacttgattttcaatagggagtatagtatgtatttgagatgttatttcaattttctatttgtacaaatgaatttgatagtgtcagatattgtgagactcaatttaacttttgattgaatactatatccaaaatcagacttagtaacattttaagcatacattgaaatgaataatatcaaattttctgttttcaatttctacttactagtttgtatataaatgtatgtaattgtgtgggaaggtgtgtgtgtgtgtatgtgtgtgcatgtatagtggactacttgtaggagttgattctcttcttccagctccaccaggtcatcagcattaacagcaagtgcctgcacctgctgagttatctcaccagccctccttttatgtcttttgggcaattttaacgatgcctatttaatcatgaatgtgtgagtgcaggtgcctatgggagctaggggagttagaggtggttcggaccaccctgtatggatgcctggaactgaactcaggtcttcttcaagagaaacatgtgttagccccataattttattttgaggttaaagaaaatgaaactcagaaaaattcaatggattcctatgtactttgcctgtttgaccagttgcttatgctaagaagattgacttttcgaaaagttaatacttttcaaaggagtgttatataaaggtcctgaataattttgaacctgtgtatttggacagtcttatttatataaaaattgctcagtatataaggggaatgaagcagtgtttactgaatatttgctgctttcccgatattgggctaggatactttgcttcatttcgttacaggattgctgttctttaagaaggagcagcagagaggctctttagcaacaccagatttcagcaggcttgttgacaaggctcatgtccgttccctacaccaggttttctgtcttgtagtgtactggcatgaattcatttttgttgtcaagacatggtgatttctctaaattaacagtggcctaatgaatagagattaaagctagattgttgtcaaacacagtaaaaatgagtccagggatttgtaaaactattctttggttttcctaaccctgcttttgttggtttttctcttctannnnnnnnnnnnnnnnnnnncccctccctccctccctcggtccctctctcccttccccttcctttcttcctttctttctctacttcccttgttttttgacatgaaatctctctcactatgtagttctggctggcctcaaaccctcagcctagtgagagtgctagagctcaggtgtgtgccactgatctctctgttctttaatgcactttcttgcttttgagtggtccccctaatatgtacacaccttttataaatgggagttgggtatgtgtatcttctttgataagagttccattatcaaagataacactcacatcccatgtaaggcctgtctacatgccccgagactctcccagcatcagcttttagctttttgcttggcatttcaggctctttaggttgccttatgagccttgctaagtatcatggagctgtagggaccaatggcctagctcagcagagattacaccataatctctgattgctttctcaccatgcacaggggcctttagggacctttagggacctgctcgaagctgacaccagaagtgagcaaggcagaccacaggaagatcttcctgcacttggtaacatacgtctataacctatggacatttcctggcaataccttgtgaaactagccttttcacgtacagtagtttcctaacttcttgttctagactaagcttcagtcagaggtgagtagcatgatcacaatatagataactggaacagttattatgcattatctttgatctgaacgtggtggcttgaataagggaattttatatagatgctaacttttaagaacctctagcccagcaagagtactagttcttgttttgatttgctaagtacttactttgttttagatattgtgccaagtgctttaccacagttaatgttcacaacagtcctaagtattacctcctttacacaggaagttgaaactaaggacataacagattctaaagtacaaagcttatattgaaactcagatgtctgtcttaaaatgcactcatttaacttgctgtattgtcagtactacttgttttagaattccctggtgcagaagttgaaattaaaattaggagaacattttgaagactttactatatattatcatatcatacctagggttgtctgatgtatagttaggtagcattttaattttatctaagcttatcaacctgagtccgtattttcaaatattttaaagttttttaaagatttatttttttatcgtcagtgtatgaaagctttgtctgcatgtccgtgtttacatgtgtacctcatagcctcaaggaacaccatatcccctagacttggagttaggggttattgtgagccatcatccggctgttaggaaccaaacttagttctctgcagtagcaacaagtactttaaactgctgagccatctctcttgctcccacagtatatttttaagtatgtatgatccttctttgttttttgttgttagtgtgaatatatggtgacgtttacatactgtcatagctctcactatgtaaaagctaaaagcttctgtttaggttgacatctctgaggacatcatgttttgtgtcacttgagccagtttataccagattctatgaattctctctctgtagtttctcttcagttttttctttcatctctttccttttcattacctcagtctaagttagaactctgtagccttccattttaggttctctgttggcctccatcctgtatcctcctgttctcccttaatccccctgccttagtttgtgatattcactgctgccttgaagatgcttcttgttcccacctccattaccaaagatgacatcacatcccatgtaaggcctgtccgtgtggtaggccttctattggaacattgatcttctggtgttaatttctgtatttttttttttttttttttttttttttttacagttggatgatcttttttttttttttttttcttgtacaaagaaaatttatttctctatgttaacatttttcttaaaatgcctaggcttacttttcttttttttttttttttttttcccccattttttattaggtatttagctcatttacatttccaannnnnnnnnnnnnnnnnnnnctttcccctgtaccggggcacacaaagtctgcgtgtccaatgggcctctctttccagtgatggccgcctaggccatcttttgatacatatgcagctagagtcaagagctcaggggtactggttagttcataatgttgttctacctatagggttgaagatccctttagctccttgggtactttctctagctcctccattgggagccctgtgatccatccattagctgactgtgagcatccacttctgtgtaatttctgtattttgaaaaaaaaatgcaccattgaaagattttaagtaaaataacatgacattctttaaaaatctgctatgtgtaacatattaacttattaagtaagtggtagctttttattatggtttggcttgactttttcctgctccaaatagtctttattattattattattattattattattattattattattattactttgttcaggaccctgacctattatgatttcctctgaggcttgatccctttaggatctatgtttggtccttttcttctttgttttaaaggtatgctttgaagtagggctgggtttaccaagtctctttcagacaaggatagtctcagaactactattttcgaaaatctttaagaatagagtggaaagatagataatcatgctattggcttttgactatgatttattcattgatgctcttgctgctgcagatttactttataaaaaggaacagaattgcttacctaatagggttgttgtacaaatcaaaggagacatttgagaaaatccttagttgtgggtcatccagatatttaagagatagtgtatccagtactatgctcacctagcacattcttaaacaacaataaaacccactgataagtatatatacagaatcttccctaaaacatctacataaacacgtgtacacacacaggtgtacaaaccacacttatcaaagtaagtgtgagcagctttgatgtaagtattctagtgccaggtacaatttatatggtagactaggaagatggctcagttggtaaaatgtttgctgcaaaatcatgagaatcttagtttgattcctgcaactcacataaaaaaaaaaaaaacccaaatatgatgagatgcacttgtaattctctcttgggggagatgggacaggaggactcctgggacttgtgggttagttaatctaggcaaacttgttagctccaggttcagtgggaggctctgttccctaaaaatttacatgataggctctaaacagaagcatgcccgcatggagttactgtataatctacacagagaggacaagcatcaagacaaataacgtcggggctggagtggaggctaagcagttttatgagcatatatactcctcttagaggggatgtgagtttaaaattctcttagagaggatgtgagtttttaaattaatttaatataaaaactgataatagctgagaatggtgataacccagcacttgggaagaagaggtaggagggggaagagtgcagggttatctctgtctgtccaaggccaacgtggaagctctgtctcaacaaaaaagggaaaaattgtgtgtgtgtgtgtgtgtgtgtgtgtgtgatgaagaaaagctatatcttattggtcagctaaaactgctgtcatataatgtgaaggtgttttggccaacttacactgcatctatgaaagaagaaatatctaatgaagagtttattttgttcatctctgaaaatttgtggtttcataaaagggacaatgggtgccccgtggatttcttcttttttgtttgtttgtttgttttggttttggggttttttgtttgtttgtttgtttggtttggtttttcgagacagggtttctctgtatacccctggctgtcctggaactcactctgtagaccaccaggctggcctcgaactcagagatccacctgcctctgcctcccaagtgctaggattaaaggcgtgagccactacgcccggcggatttcttcttaatacatacgaaacctgtaactggtactgcttgctaccagaaactaccaaaactcagtgtccttctgttttccagttttctagtgaatgactctgattagtggaacttaaattagtagaacttagaaacataaacatagcggcaagataggttaggagaatttctagctttagagtctccataataccagaaagcacacaagtaatgctgtaccgctaactcaccatatcttgtatgagtataaagttgattcttcttaagaatagaactcagtatgcagactggagttgccttgaactcagagatccattcacaaaacttcctgagtgctaggattaaaggtgtgtgccaccatgcatggagagtctttttattttataatggcatgttttaaaaatacctaacagtggccttcctctgatgaattaaatagtctattccaagtttcctcccatttaaatatgctctgtagataaaagcctaaatgaggggtaaaacaaagaccgtttagcaggagctgccaaacagagggtgggttagtgctaagatactagagagtggccacatactctggtattgacaggcagtaattcgattcggaagtgcttagtgttactagtgttcgtaaaggttctaggcaaaggaaggtctgaagctaattgtagaaggctagggtatgagtgaaagaggagggttagaggatgggtgattttgactcagtcatgtgagttatagcctaaacttgcctggaagtggtaggaccatctgtgggaaaatgcaggcttcaaatgtgcttcactttgtactttatgtacttgatggtggagggtgcgctggcaacaccttcttctgcttagagatgcagagaggcggcagtgctttcgttcgaaccatcgcctagggtgctttatcagtgagcagtaatctctactgtagtttggaattacagtttaaaactcctcataactgataaacattactgtgattattttggagaactgggtttgatgggatgaattttcaaaacagcttatttgaatgtcaaccagtggtaaatagtgaaaaaaaaaaaaaaacatcaggaaaactacttttataaaaagtggtgctgggtgcatttcttacactatctgagacttggcctttgattattttaagtaaatatctggcaattcagtttcattaaattctacagacaaagtaacccttgtttctctcttgtggggtgggactggtagattatttacacattatgccccattattttctaaccagtgcttagcatgaataaaacagggacacgtcctagggtaatgatttaattttctaaactctcttttacatatggagcgtatttattgtagtcatatgtgtatgtatgtatatatatatatatatatatatatgtatgtatgtatgtatgtatgtaactaggtggtgtattatggactctataaactttggttttaaaacaaatccattgtgttattcagaggcaaaggaaattctgaagaagtttgacagcagtgaaaatagaattgttaagcaaggtcctatgtagggagagaggagggacaggggagagaacctcaaactcacagggatcctcctgcctctgactccagtggctggtatcacaggcatgaccaccattccagccagttcattttgtttttgaaatgtggtttctctctccctgtttgttttgttttgttgttttgttttcccttaagatagtttctctgaatagctttggttgtcttggaactcactctgtagaccagcctggcctcagtctcacagagatctacctgtctttgtctcctgagtgctgggattaaaggcatgtaccactactacctggctgcaggttttatcttgttgacgccagagcttctgggtgggtctcctgtgtcacctcccatcgtcttactgtagaaacactggaaacattatgtgcactccagcttccagctagtcaggattgcacacaaatgttcccacccacttaggcttcttactggccccttcctcactgtcttagatttgtacattggtatgggatttcagtatacacatcaagtagacacttgggtgtcgtccttttggtacacaaatagctcatgagaccttcaaagcttgacttgctgggttctttattccttcaacaaacatatcaccagagttttcctgttttagatcttgggcattagcaagttctcagaccttgtacaggagctgcagaaacccttaacagaagttcagcccattacaaattctctcaaggaaaccaaacctaagactaattagggaaaaggtcaagtgtcatttgaggtcaggactgaatgataagaatgtcccagccgtgtaaagagtagagagatccgggaagaaataaacttgataataaacttgacatggctgatgaatggagaaaagtgaaccaagggaagaacaaaagaaggagtcagaagggatacttagggtcatgcagagtgtgatttagagattagactttattctcagacaagtgggatgagctgagaagtgactgagttcaatcttatgagaagatcatgcttggtctggattatggctcagcaatagagcattcgtctactctgcattcatgcagacggcttgggtctgatccccagcatgggaaaggagagaaaagatcacatctcctggtgaagaacaggttggtgaagagtagcagaaacagaagatactgccatgctcctctgcagtgatcctgtttgggtgattctagtgaaggggagacgtagctgggttttagatgttgtctttttgaagatcttctggatgtgctaatgagctggattgtgtgagggagaggcaggaagacgataagtgagaaggaagtggtggtagaccaagggaagagcttatagaagaggaaataagattggttttggggacttgctaaatatgagatacctgccagatatctagtggtatgaatgagggaaggtcaggcctgcaaacacagaactgggagctcctagcattaacagtgtgtactgcagtagtttatagaaaaaggaagggatggtctagaacagagccctgaggcagttacagcatttcgatgaggagatgagtggaagacataggagaaaggccagaaaccgtgtgctgtggaatccaggaacagggagcttgttacatgtccactctgttagatgctgcaaaggtgtggatgtagtaagaatacattggacatgggtgagccaacatcctttgacattggtggccttgactaagcagtttcattgtcactttggaaccggaagctgattagagaggatcacagcgtgaatgggaagtgagcaagtgaggggcagtacttagaagaaattctcctttgacagaggagtctggaagtggaggtgtggcacgggagagaagccggaccgaggataacggtctgctgcttttgtttgtcttaattgtggagtgttgtttatatgctgctgagagcaaacggtagaagggaaattaatgctgactcaggagagattcattgcaggaaaattcttgagatggttctggtgagacaggagggagagaaactgccctttcatagaggaaggatgcagtgatgtgtctatacatagctcctctggtctttttacttttaaacacttaggttttttcttgtaataaaaaatactcatttttatagacttctcaggaaagttcaccaccttttagctcatcccccagtcttcactagtctcctttagaccccctgacctctctgagcacaagttgctttttttccctgtactccatattatgccttcttccagactgaattcatttataagctttgggtgatgtaaataaaaaatttaacatcaatttaaacttttgtgtcaacagatgaagcaaaaaatttattgccatatcttggacccaacaaaatgcgcgattgtttctgcactataaatttggaccaggaagaagtttatcgcacccaggttgttgaaaagtctttaaggttggtagaaaaattagaaattattcatttgatgtatattcatggttttatgtattttccagatttttatcaacaaattgagtttcttgatattgaagctaatattttttatttaaaggttttgtattctattatgaatttattttttagatttatagaatgtaagcatttaaagaggccttgaatgtcagtaagctgcactgacaacattgatctccttagcagtagttctgggaagtggtcatggggcatctacttcataatggttcagtcaccaagaagttcacacctcctaagtaggctgcttggtctttgaactcttctgactcagaaagtgcttatgtttaattggttagtgattattaaagtgacatccagtcacgtgcccagcgcttgctcagttctgggttctgttcactcatgtctctaagagtgaccccagtgaagtgcttgctctctcatgtggcctttcattgccttaggaagtagtttttcttagttgtcctagctctgtcccttagatttctggggaacaattttagtccatcttttatgtgacagcattaaatgtttgaaaacaactattataagcgttcaatgtgctctctaggctaaatagtgcctatttgtttgagctttcctcaaagcacatcatttttacttctccagagaacatattagctcaaagttcacacaagttgaagctagagaggtcgatggctttcttggtaaagtacttgctgcacaaataggaggtcaagtgttacatccccagtacctatgtaagaaagccaggtacagtggctcccatatagttcccagtgctggggacatggagggaggagggtcccaggaacctgctggccagccagtgtagacaaaccgtttaacaagagtcctgtctcaaagaataaggtagaaaatgattgagaaaggtgatggatgttaacctctgggctacacaaacacaccctttctccgcatctgcatagatacaagttacttactaatggattatcagggaataagctcttggattgtttttatctgtgaaagtgtaattattctttgaaagtactgcatacagcaaattctttgcctcctctgccttgtagcagtgtttgtgtttgtaattttgatatagaactgtgctaaaaccaggtgtcatgatacaggctttaaatcccagcatttgtgaggcagagctggtcaggtctctgctgaggttgaggccagactggttcacatagcaagtcccaggccagtcgggctacataaggagagtctatctttaaaaaaaaaaagaaccgaaccaaaccaaaccaaaccaccaccaaactgctgaaagaaagtcttcagagacaaagcatggaggattctgggacttgttgggacaagcatggtgaatgaaacagttgtcgaactgtattttatcccattggattctggaggatgctatggtaccttgttaccctctcccacacacttgcctgtgttttcctgtgacatttgcctgtgtctctttcctgttctttctttgtcttttctcctctgcccttccttcccttttcctttcctcttctctatgcggggtctagccttgtagcccaggttggcattgaactcttactcctacttcagcctcacatattggtggtgtaggcaggcccctctgcatagctctttgtcattgggttcttacaattttgatctcttcataagaaaactatatagaactaaaagtaacccttgtagtggctccgtcagtgggtgaaggaaccagctgtcaagcttgaaacttgaggtcagtacccagagcccacatggtggaaagagaggaccaactcccacaggttgctctctgacttcacatgagcgccctcctcaaaaaatgagaatagtacataattaaaaacaaaacaaacaactaaaggtgccttagtagcccaaaaatattgagagtaatgaatttcaaagattttgtcacaagccttatgcccatatttagaatcttaattatttttcacacttgtgcattcagagtcacagatggcctttttctttgtttatgaatgatgaaatgtcacgggaaggctgcatgatgtgtcatataatgaaggaaggtaaaagcacagctgggatttgagacctgaaaatatttaaatttcagtttgttacaattttatatcacaaggtaatcagtgattacaaaattcaatagtaattttgtaaattgagtccataaattgagtacttatagtttgtaatatctagccatatatgagaaaataacccttaacctttctgaacgtttgtatagtggaaaaatgatgaaaccagttttctttatttctttccacctttaaaaagaaaatcatttgaaagataatttcaagctagctgtgtcactgccttagatcgtaagggtatagctagctaaactagataattcttgcattctgaatgcctccaatcttactttctagaatagggcaaaaataatccttcttcaacttgattttattataacgttcttaatacttgtctaaattttgatcaaccattaaattggaagtatctacattgtaggtctttctaactttttccacctttggaattttttcttcagtttttataactctgaattataaaacaggaaatactttagaattgtaaaaagatttaagagattttgcttctaaatatctctaaatcagagcaagtgcttaataattaaggattttaaattttaagaagattcagatatttcataaaggaagatatacaagtatctccaagacacatggaaagagatccagttccatgagccaccaggaaaatacagtttaaaaccatttttgtcactattaggacataatctgtaatgatagaactttccccagttgactggctgtctgaagggtgattgcagagggtacagggaaatttctgggggataggtgataggttttatgtttaattctttctctgaaaattccatacgtaaatgttttgtttgtaactcgtacccactccgttaccctccctcatctgattcccatgcacactctctgaattccttctagcaagctctcctgctctcatgtgtttgtgggtatgtatgggacccactgagtttaattagggctgcttgcatacgggtaggtggagcatgatgcactggggcatgggcaacaaacaaatggctacaccactgaggaaaatgatttcccctttccagtagccactaacttccccagccatgataggtcagtcagtgaagtgcttgtcgtgaaagcattgagaacttcagtttggacagttagcactcatgtagagagccagacattagtggtgtaatcccagagctgaggtgtggagctaagaagatccttgggacttgctggccagtccatatagccacgtacatcagtggttcagctagaaaccctgtggtttggtttggtttggtttggttttttaaaataaggtaaagatagatgaaggaagatgcttaatatccacttctgatctctatactgatgcacacatgggagtatgcacacccacacacaggtcacacaggtgcacacacaggtgcacacaagtcaaatcactgagactgaaaaattagctcagtcttgttagacaagcatgaagacctgagtttggttcctcggcacacataaaactgtattgcagttgtttgaaatgagctgggcttatatgaacaggaaggtccctggaactaggtagccagcagtgtggccagacagggactttcagattcagggaaagaccctgtatcaaaaaattaggtgatgacactcaactaggtgattgacctctggcctttatactcaaaacagtcacacttgtacacatatgtatacatatacaaagaaatcatatcactgggctaagaatataactcagtaaaagagcactagtgttataaaagttaaaatgtatacagtatttagcttaatcagaatggggggagatgtaaaagaattttaatccagcatcatgcctgttctggcaagggatcacatccaaagccttctaggactctgtgatctggctggagtacaggctcacccttagcacacaactttaatcctaaacaacgaaggtaaagttaatttgtagaaggaagcagccgtgaggggcagacaaaatgacaagtcagagaaagatttgacagaatgagtcagtgatggcatatgctcagctctcacaacatgagaaagagaggtgacttaagagagcagcatagaggggtggggagaattttaccaaggtaggttgcagataaaagacagagaataagaaggagccagaagattagaacagattgccagagttagtttgaggccaagcagagcaattcagtcagatgctaagaggagccagtgtgaatcagtcagcttggagaggagtttggttcagaacagctgagttgaaccagccagccagagttgaaagagctgaacagatgagattattcaatagtaagcctctgaaacaacaactgtatctggcaaataaaagatacatttacatacttgcatagcatacacaagctccctggctcaaacctctggaacccacccccactgctcagctatctaaggtgctaacagtattctatattttgattgaggtagaagctacacaggtttgtaattttatcaaagaccaccagcctctatagatcagatttgatattatataattcaaaattaactccggaaagataataaaaatgcttaatggtctatttctaatataattaaatattttatatagcattattcattttagatattcagtattatacagctgttgccggttatatctttctaagataataatacgaatggctttgtcttgactctcattcatgtcagctttgggtgagcatggctaggcaggtactaactcttctgttcacaggaccttctgcaaagctgtatgtttagaattcatttggcacctaaagtctcctcagttcacctcgatttgtatagaatttgtttgaaattctcaagaattttagtttataatttcatggatgtttgttgaaagtaaaatttgaatgtgattttattattggtaccattttaatagtgataataaatatatattatttaatataatgagatttctcttttctctctagtccatatttcagtgaagaattttattttgagattccaagaactttccagtatttgtctttttatgtttatgataaaaatgttttacaaagagatcttcgtataggtaggtactattcataattatttataattacaacattagtattatgttcattctttctgtaagtctttgatatctgcttattaaagtaaaacccatcaggcatagacgttcacaccaagagactggcagaaggttgctgtctgtccgtccatctcaggctctctattgtgacatagagttgctgtccatctcaggctctctgagttacagagtcagacttcccatctagagaaaaagaaaaccaaacaaatatttttattaaaaagcaaatactaattttaagaaaaacgatttgtagttaaaaacaaacctatagggcataagcagataatttacttctgaaatgttatacccggggtctgggttgtcctttgggaagatgaagatgtcaggtgtatttcctgtgatctgaaacatatagtaggaaagactcgttcctgtgcggcttttaggccatgcttggttaaatagtcttaagttgaggcaaggtggaagttgagtcactgcttgtaactgcaccgatgtgatttttagaatgtgggcatgaattgctcaaaggaataagcatccacataaatattttaaaaccctcccttttaaggttgaggacttgtcttgttttcccttcatttctcagcttaaaattcaatttaaaagccctgaagtacatctttctagtgtcactttctacaattctaactgtcacacaaagattttttatctttgtattagatttcactcaaaatatttaaaagaaaacagattcataggtttaaagatttttgtgttttgaattttgtgtgttaatagactgattggattttcagtctcttgaggactattgctgcagttgccattctactacaaatctggttccgtactttaatgtttgttctttaaattatacatctgaaaagccaggcgtggtggcgcacgcctttaatcccagcccttgggaggcagagacaggtggatttctgaattcgaggccagcctagtctacagagtgagttccaggacagctagggctacacagagaaaccctgtctcaggtattgagttttaagttataaagagctaaacataaaactgtaatatgtttttaaaagtttaagtaacaactttattaaggtataagttatataccacaaaattttttgttttaaagtatattatatttaaaacttattttttaaagacttagagaagggatcattgtacatttacatattatacacatacacatgcacatatcagagcaaaacatacgaaaaatgataagatttttggaaatcctgggtaaagaaaatagttttatgtagtgttcttggcagctgttttttaaatttgaaattctttctcccccctcccctttttttgagacagggtctttctttacagccctggctgtcttagaatgcaccatgtagaccaggctggcctagtgctgggattatcaagataaaatatttgtaaaatttgaaatcacacagtatgacaattgtataatcaccacctgcttccagaaagaaaaaaaatacacacacatacacgcacatatgttgttctgtttgtttttctatcttccttttcacttgataatttaaagttgatacagcttcacataaaaatttatcatttctgttttcaactgttgaactaaaagtaaggttatgttgtaagacataacatacagtttgggatacttaaaaggaaagtatgtgtggagcagagactgggggaacaaccatgcagagactgccccacctggggacccatcccataaacaaccaccaaacccagacactattgcagatgccagcaagagcttgctgacaggagcctgatatagctgcctcctgagaggctctgccggtgcctggcaaatacagaggtggatgctcacagccatccattggacagagcacagggtctccaatgaaggagctagagaaaggacccaaggagctgaagggatttgaagccccataggaggaacaacaatatgaactaaccagtacccccagatctcccagggaataaaccaccaaccaaagaaaacacatggtaggactcataggtcccgctgcatatgtagcagaggatggcctagttggtcatcagtggaaggagaggcccttggtcctgtgaaggttcgttgccccagtataggggaatgccagggccaggaagcaggagtggggggttggtgagctgggggaggggggaaggatggggttttttggaggggaaaccaggaaaggggataacatttgaaatgtaaataaagaaaatatctaataaaaaaaatcaaaaaaaaaaaaaaagacataacctaccgttgggatacttaaaaggaaagtatttttaaaacaaggaaagacgtgaattactcttaaactaccctgtatctcctttgttggagcttttgtgcggtctttgaatggttagtcacatgcaaaacgatgcttcccagggcttgcattgaggaaggaagtgctttgccccagcacaccaagagcttcatctgaacattatttgcttcttctctcctttcatcctcctttgttcacggtatttcctctttccctgagacacaagcgctttagggagcagctttgatggctaaagcagtagagctagcttagtaatgtttgataaaatgatctttgaggtactttgcacatttgttagtaataggtaagatactgtttgtcctttcacttaattggagcatataacttcttattaaatgcaggtgttactgctcagaattaacagcacacacacttcatccacagtgcttcacaacctggaaaattatatagcattgccatttagattctgtttttatcctgaatattaatctgaggaagtgctaacacaccatagttacattaagtccagctgagtccttctactgccctgattcagaatgacccacaaaagggccttccagtgggcaagcagaaacaggacatttcttctttaaggtataagaaaaaacaaactttatagaaacaaattttttaattctgtaatctcagcactcagaagactaaagcaggaggattaccatgagtttaggtctatcttgggctaaatcgcaagtaccaggctagccagggctacatagcaacatccagtttcaaaaaaaggagtaacggtggatttttatatcagcacatacaaattaaaatattttctgtaaaatatataacaatgcttatgaaccataaggttatataaactatggtttctcatcactttatttattttctgtaggaaaagtagccatcaaaaaagaagacttgtgcagtcatagtggtaaagaaacttggttttcactgcagccgattgactcaaattcagaagttcaggtaagttaaataatcaggagattataacatgaaaaaccagtgaaaaccaactaattatactagtttatactgatagaacttgtaataccttattttacattctaataccaaacatagaccttaaagtaatagagagctggaaggaaatggcttttccatttggatttttttttattttatggatatataagtacagtgtaactgtcttcagacacacttgaagagagtgccaaatcccattacagatggttgtgagccaccatgtagttgctgagaattgaactcaggacctctggaagagcagtcagtgcttttaactgctgatccatctctccagccctcgagaaccaactctcatctctaacttccattcatgtgcacggcacctatatacatacatatatatacatgtatccatacaggaattaaccagaaaataataaattctcatttgaacgcatttactccatttgtaataaactagatttgtggagaaaaaaatgttccttatttaaaccatgcctgaatctgcaatgcatagccttcattcctacctcccctcctgtttacctccttttatttgaaggggtataattattcttgttaatctattctttttccccttgccacataaaaggccttgtataaattctatatgtgaacagaaatgtattgttgaagtttctaaaaagcttaagtctctatgacttaaaaattaattctaagggaatcaatctctctctctctctctctctctctctctcttatttcttttctttttttgtaaacttattaactatggtaatgattgtgtagccattcacaagggcataactccaggcaggattctttgtctcttaagcaggctataatttgctgctaagactcagaagtttaaaacaaagagacaaaaagcatacccacagatactttgcaaataaaatacgtctccatttcttcataaccttttatgcagtctctgtgattaaattctaaaaaaaaaaaaaaaaaaagtattgtgtgcaaaaatcccttcttaaatacagaatatagctaagtactttttctgttttatctactctaccccgttttaatcttctgtctgtccatttgaccatatgtatcattcagctctcaggaagagcattgttggtgccaagggagaagccatgtgaggaagtagaatgggctgatggtgttttcatatgttcagtttaatgaccttgagcttcatttctgtaaaaggagaataaaattcaccatgcttgactaatatggatcgagaatactttaaaacttgatttagggctgggttgtagctcagttggtagagtgtttggctcgcatgtacaaagtcctgagtgccatccgcagtaccacagaaactgaatgttgtccacgcacatttgtcacctcagcacctaggaagtgaaggccgccaggctgcataaaccctgtctttaaaacaaacaaacaaacaaaaacctgtttgcttctatacagatgtaaatttattaccactactcagtctggtggtgccctagttagggtttctgttgctgcagtgaaacaccatggccaaaagcaagttaaggaagaaagggtttagtcggcttacgcgtcagtttccaaaaaagtcaggacaggaactcaaacagggcaggaacctgaagacagaagccgattgcagaggccatggaggagtgctgcttactgacagcctgctttctcacagaacccaggttcacagacccagggatggcacaccctacccacaatgggctgggccttcccccatcaatcactaagaatcttacagccacagctggatcttatggaggcattttctttctttcttttttttaagatttatttattttatgtatgtgagtacactgtagctgtacagatggttgtgagccttcatgtggttgttgggaattgaattttaggatctctgctcactcagtccctgctcgctccggcccaaagatttatttattatacataagtacactgtagctgtcttcagacacaccagaagagggcatcagatctcattatagatagttgtgagccaccatgtggttgctgggatttgaactcaggaccttcggaagagcactcagtgctcttaaccactgagccatcttgccagcccccatggaggcattttctcagttgaagtttcctcttttcaaatagttctagcttgaagatagttgacttaaaactagccaacacgggtggctttctaatatagctttaccagattatccattttcagtttttgacacatgacttaatacattttccatctacgcccacatggtgtcagtcatttgagtatgctgctcatgtgtacttgaggttggcttcgatctcacagtgctctcttaatattgggattctaggcgtacaccactgcacccatctaatctgtcagtgatttgaacaagaggaaagagaagaagaggcttgtaagattttgatctgaaatggaattacttagaagattcattacagtttatttatttatttatttatttagtacgttcttaatgaccagcatacatttttctagatttaagaatttgattctgggggctggcgagatggctcaggtggtaagagcactgagtgcttttccgaaggtcctgagttcaaatcccagcaaccacatggtggctcacaaccacccgtgatgagatctgacgccctcttctggtatgtctgaagatagctacagtgtatatattaataatagtaaatctttgggctggagtgagcagggactgagtgagtagggttcaacgaggacctgaccagagcgagtagaggtcctaaaattcaattcccaacaatcacatgaaggcttacaaccatctgtacagtgacagtatactcacatacataaaataaataaatccttttaaaaaaagattttgattctgaaaatatagagctctatgtgttctttgtgtaaatcttggaggtgataccagaaactaatactagagcacaggctttatctgacagtgtatctataaagccattatgttttatatatagtattggcatttacatttttagtactgtttgcttccgtgcccattagtcattagcctttccagaacttttatcttaaatggtaattagtaagacttacccactacttaaaatagattttaaaagaaaaatgctgtaggaggtgggagggagggataatacttttcagggtaatatgctatcattgggaatattattatttagccacaaacaatctgaaaataccacactagccttgtgagtataaaagatttgaaaacagcttgaaactaatatagagcctactcaggttttgttgtttaccctgtataagttttataatatcttttaaagacatgcaaaaagaaaaatagatggcagcatagaaagcaatgagattacatttagccaggactcaatctaatgattacttttagtaattataaaatatgtaccaagtatagccgtgagtacttaatatacattatctcatttaaggcccatagtagcactatgaggtaggtatattaacctcattttgcagattatattaataggattaaaggacttagtcatagaagatgtgatcccattagagatctgcctaactcctagtcacagcactgtgctgtctttcagtgacgtgtactcttagttatagaaagaattcaacagattagaattgctcagggagcatcaaaatataagaacagaagcctacccaaattagtgggcaaaggggaatgcattagaaagtgtgtagggagctgtttgaagtcaaattacaggaacttcctcgggaatgtgagctacatagttcccagacatttgcacagatacttcgtggtaatggcagttaggttctgacagtagcacacaagatagaaattcacataagttaaaaatgatccttgaagtgactaagtcttcataacatggttgactgccacagagaacattagtttttatctggggctttgatgaacaaacgctgtgtagtgtcattcttagcagtagccccaactcggcagcaatgtactgtaaggcaggtgagacctgtgatccactggttgatttttttcatgtttgtggcttttcatttttcattttgaaaaaggaatagttatgttttcttctttcactctcttttaaataactatatacttgcaaaataaagagtgtagccgtgaattagttaaaccgctttggctcctagcaggttgcgctctcactgtacccgcccaagagctcagattcccaaataaaagacaaacacacacatgccagttaattttgatatgctttgactagctgaatggctggacacttctaaacctccccatggctagcaaacactcccctctgatatttctgagttaacatctttaaaaatctgtatttcatctctgctaccccagacccaagtggggaagtggccccagatacttatttgcctgcaggcctataagtttcatctttttgcttccccatccttgggtcccttgtccacacaagtctcgccccatctccctgtccaaccattggctgcacagcaattcttcattatcagtcaaagccagtagggggcaggaatcctcaggtatgaagaaagcatgacttttggaagccaaaataagaccaaacattagaaccaatttccaacaaaagagaaaaaagattctgggtgtgtgtgtgcaggtgcctgtgtatgtgtgagcttgtgtatttagagaaagaataaccttgggtgtcattcttaaagatacttcaactcggttttcagacagggtctctcagtgggacctagagatcactattgctaggctcgctggtcagcaagtcccagtgatctacctgtctctgcctccctaggacttccaagtacaacactacaaccatctttgttaaaaattatttctttttttttttgagattatactatagttatattatttcccctttcctctttccaagccctcccatatatccctcattgttgtttttcaaatttatgacttcttttttcattaaatgttgttagggatgtgtgtgtgtatgtcggtgtgtgtgtgggtatgggtgtgtgtgtgtgtgtgtgctcgcgtgtgcgtgcgcgtgcgtgcgcatgtgtgcatatattnnnnnnnnnnnnnnnnnnnncgtgcgcatgtgtgcatatattcttagcatgtactaccacctatttaatctgtataaggctgggctgactgtttggtgtcagatgcccaattggtgtagccttctgggtaagggcttcccccgcctgggctacctcaccccagcccacaaaggcgtgtctgttgtcatccttgttccgcttgtatttaggcagtcatttctgtgaaacttcatgggtgtaccttctgacattactgggagacataattccatagcaaactctctgatcctctggctctcacagtctctccacccctcactcccctttcacaatgatccttaggtgcaggagttgtattgttgatgaatctgttgggactgggttccacggctctgcattttgttggttgcggttttctgtaatgtttctagtcctttgtaaagagaagttcccttgatatgcaggatgaggatataagggcagatattcagaatgtattagatacccatctttatttatacacctgttttcctgggtggctggtgggagttactcatcttcaggcaggcatggcagacgctttagcaattgagctatctcctcacttaatgattcctaaagatgtcaaccattctttttatatgcctaatgagagtacatatctcttcctttgtttctttctgtgagtttactcttagtgcctcttgtaaaatgctatattcatctttaagtctctttgtccatataccttcctcatcctcaaagatctgactcaatttacagagagaagttagctaaatttttgtcactgtccactaaagtctaatgaggttggagacattgcagggcagttcattctggagtctgggttaggcccgtttgtttaggggattgagtggatgaaatgatcagcatctttatctcggagaggaagcagtttagttatctgccattaccactaattagtatttgtaactcaaatccgtaccgatttgttggtggaagatcacttatggaatgaggacctcggtgtaaaggaccacgtgtctgtggagatccaggaagtgacacgtgtaaatgtcggtcactccttgagtgaggagcttcactagtaactcccatttcataccacgcacttgattgttatcttagccttttactttatctcttgcttattggacttactgattattttcttcttagaagctcatggtagcaggatttaatgagtgcattttctacctttttggacagaattttaattaaaaaaatactttatgtgtatgtatgttttgcctgcatgtatgtctgcaccacatgtgtgcctagtgtctgtgaaagccaggtgttggacccttttaaactggggtttcagacagttatgaaatgccttgggggtgttggaaccaaggtcctctgcaaaagcaagcagtgctcttaagtgctgagccatgtcttcagctccttggcaggatttttagaatatttattgtctgtgtctgtgtctgtgcctgagtgtattaggggcagcacgtgtgtgcaaagcccacagaagtcaaaaactggcatccgatcccctggggggcaggagtcggatgtggttgagagtccacgctgggttctgggagtcaaatctgagtcttctacaagagcagtgcttgctgtctgtcaactgctgagccatttcttcagccccttttctacctttttaataaaatacaaatctttttcttgactctgttttttgccattttcccctctgacatgaacccttttcttttgaaaccattgtagtgtgccttcagactcgcttcttgggacttgatgcccctaagcaaatgggcacgtcacttttatcagggctccactggctgcctgctgctctggttttgaagcgttctcttccttaggctccagtcctggttatgatcctggctgtcagtctgttccagttggtgtacattttctttattctcttccatacaagtgatgataatacagccatcctcttagctgtgagatgctgaaactcacaccttataagcattgttccattctttatttcctaggtacctcgataaaaaacatgctttgcataagactgttgattatgggtggggtctcacacaacatgtacaggcagcaaacccacatgttatgccagatgcaatgttagttatgtcctttcgatgcaattacttagtaagtcttatccaacaggataagcttgaccatctggatcatactgtaagttatcgatcggtatatactttttcttaatggcctttgttttactgttttgtttttttccgagacagagtttctctgtgtagtcctggctgtcctggaactcactctgtagaccaggctggcctcgaactcagaaatccgcctgcctctcgagtgctggaattaaagacgtgcaccaccactgttttaaatagccagttaagaagaaatcaagacattaaacacatgttcagttaagggatcataatataaaagcataattcattattattattatagattgattttaaaactttgtgaatttgtatatgggaagtaacagaaatgagccattctatttctttttagatttttttatttttttgaaaaaaggtctcactatatagtcttgattggcctggaactcactgtgcagacaaattcagatctgcttacttctacctcctcctgaatgctggaactaatgacatgtgtgggccactgtgccccactctttatctcattattaaattattatttaaggagaaaaaaatcttgccattaatataagagatattataaagtaaagttttgtctttcatctgacaagcagttgtgtctaaaattatttagaggcaatttctataactaaagctgtcttagctgctgtagcgatgcatgatgcatgcctgtagctccagccactccagaaactgaacagcttaggcagtgtagccagacctgaactcaaaacaaccagtgaaactctgtcgggagccataacgtcgtggtggtggtggtggtggtggtggtggtggtggtgttagttggtttatttgttcctcgcctcataagttttttaaaccaattgaaacatacagagttcttttttatttgtctctaaggtctgtgtgtttgtatgagtatctacatgtgtgcatgtgcaccgtatgcctatttggtactcttggaatccagaagaagcatcgggtgtccgggagctggagttacagacatttatgattggctgtgtggtgctggggtcctctgtgggagcagccagtgttcttaaccagagagcagtctcatgctgaaacagtctcagtcatttttatgaggaaattctcaatatttaaaatgttctatgatttaaagactatttagatgtgagaggattttatctttatgcattattttttgcctgtttttacaaacctgttttctgtgcattttttgataccaggagatagcagctgcactaaggttcctttttatcttttcagctgtctcactagtgctttggtatgctgtcttcttatttatccaactgatatgtttttaggagattttgaatctgtaacgtaatgtctttcacaggtcttagaaaatttaaagcaattctctctggattctcccgtctctgactttctgtactgggattccaggctccctgtactagaaccagactgttgtgtatgtgtcttatgtctcctaagcgctcccctcctctgtacttcatcatgaacattttctattgatgagcctttcactcctgtttattctcctttagctgtggctgatctgatgttagatatatctcatttcagttactttagtacttagctctaaagttatcatttaattcatttatagtttccagttatttgctagatttttcactttattttctgttagaataaaaacaaggcaaaataaacaaacaaacaaacaaacaaatgggtggtatatattttaagtttgaggctggcctggactaaatagcgagaccctatgttaaaagaaattaagataactattttaaactcccactccacttacagtcttctgttcttgtctctctctctctcacacacacacacacacacacacacacacgtaacactaaaaattactacatagtatagaccttcaaggtcagtatcaaaacgcagaggttgtaaatgctcaatgcaggaatagtgaaggaccgagtttgtaagatatatatgattttatcagtatttatacctaaatttttttttctggactatttttttagttccatatttatacctagattttttttctggactatttttttggttccatatttatacctagattattatttctggaatatttgtttctgtttagttccaactctacatgactgctcgttttctcattgacgccttttgttgtttgcgttagagcgtatctctctcattcagacctttgcactatgactcataactgtatattgctcattgtgtagtagtcatctagcctaaagttcacagctaatggtcctgagattcagtatcataagaaaagtcggcataaagtaataaaggtgattcagattatatctttaaatgaatgtctagaagggctctgaagagaagctgtaactagagtgcaaatatccctacccctgatactatcactcagtacaccaggccctagacatcacaccccaagatctccacttggcactgggaatttgtcttgtcagctatgtggaggtaaggcagcactaattgttaaccggtttaggattgctcatcgccagtaagcagaagagatacccaagctctggattacattgtccctaagctctttcttgaggaagctaatgccttgagttccttaaaacgtactaaattgcgctttcaattcatctcttaccagctgtgtgtaagagagaactctattttattccaattcttccatcagtgctttgaccgtatagtgtcactcttacagtctctctggctaggtcatgagcttctggtcagtagtgacggtgtcttacacagctgtttgctcctgtgtattcccataggacttcctaaaacatagcagattctaaatcaatcttcagtagttgacaaggtatattttaaaaaactgattcttactatttttaacttaatttcatagctttagaaattaatttattttatgttttcaaaaaatataagtgccttctttaaggaaatactgtggtcattgcagtatataaacatttattaagcaggtataaagttcctaaatttctacctgtcatatttcatataaatattagaatgttttctctcagaactttgctatatatgcgcatgcatgcacatacattggtgattattagccatttaacaaataaatctatgcagagatatgtaatagtggttagtgaataattatgtgtgccatttggatagaagtacattgtaatattttgttagcaaaataaaatagactgagtttgatattttctttttgtcctagggaaaggttcaccttgagttaagactgaatgagctgataacagagaatggaaccgtgtgccagcagcttgttgtacagtaagtatatcctttttattcatttatttgtttttgtcaaaaccacctagaaataattctgttttatactcttagactaatttcttattttaaatattttagaaacttcaaaataaagctctcatgcatcatttctttaccaaactgagaatccagcttattttttcatttaatccacttaagctatggcaagtcattaattactcaacaaagttttaatgaatgtgggttgagcaacaaatgtatgtaagcattaaggcatgaagggtcataggaaggagcctctggcttcctagctgcggagactcagaaagtgtttccaggggattcttctccgagcactcagtcactacgcagagcttcagggagccagggatcagggtgaggaggtcatacgacgtgatgctcaaactacgtgaccacctaagattgctagcacctttccctctaggaagctctcagtagtcagtccaactctgttgtgaggtcatgttctagcctagtcttctacttcttgcctctgtaaacgcttgctaccaagcgtttctcattctggaactttctgtgtctttgcctcagttgatatctgaatgtccctgaggttatgaggttcatatctacataccttaggaaggagttagagcagttgttactttcctattgctgctccacactataattcactctcctaatgatgaaaaccccaattccttgaagcattgcctttctgtgttgtgtgtactatatgatctgaggtgttcaacttctttctgcttttattagctatctcaactaataaataataaagagactaagcgatttttgctgtgtgtggatgacttaccaaaacagtatgcttaaggcattttttcctaaaagctttataatcatggtaacatttaatagattaataaagtaataaaaatttttttatttactaacagtttttgtcttactgattttcaaattccatttgcctattgaaaatagtccaaagccaggcattgtggtatgtgcctttaatcccagcactcaggaagcagaggaggtggctctctgtgacgttgaggcaaccagggctacatagagagttctaggacagccagggctacatagaaagtcctaggacagccagccagggctacagagagggttctgggacagccagtgctacagagagagttctaggacagccagggctacacagagaccctgtcttgacaacaagaaaaagacagtagaaatgagtgtgcagacttcgcccgcagactgagagcctgtagtggaattctttggataaggccctcctgctcctcccttccctgcttgggtttagtgacagtagtcagtcatttgaagtactagtagttggattagcttatttgcatacttgtttaggtttttctcttgggtgcttggcttagtttttatttatgtatattgtgtgcttgtgtgcgtgtatgccatacatgtataagtccttacagaggccagagatgttggatctcctgaagttggagtcataggctgttgggagctacctgatttgagtacttggaacttacctggggtcctctggaagggtatccagggcccttacctgctgagcatttctccagcttcctgttgttatattttaggatgtagaatattagcatgatttcaaaggaaaaattgtatcagaaggcattattcatcggtgtggttcagttccctcttcctcacactcagccctaggcaaccacagtctgatttctgtgtctgtttttactttttggttagactggtttgatatatttagtcttttgtgtctggcttcttttacttagtattctccctttcatactcatttacatcgttgcctatagtagtagagaatcttctttccagtgtttccagtgtctcctgagctaggcacacgggttctaccacccagacaaaccccagccccttattttttcccatgacttgacagataactcaacaatgtacatgctacttaaataagcccaattccatactcttgagtttcagggctagatttcagtttttctattttaatgttttaacttgaggttatggatttacaaagtacaaacaggtctttgtgctctttacttagtttcccccagtatttacatgttacatgactaaaggaaatttttattcctacactttgttgtgtatataccacttggttacatgtatgaatgtatgcaaccaccactacaatcaaggtacagtacatactgtcttctgaaggcttttattcatactacagctgatagtcatgctcctctctgccactctcccgactcttttcaaacctcttttctgtctccaagtctataacattgtcataacatggtgtgagagctggaactgtgactcactgctggaacacggaactcagtgcttccttacacgctgtgaggtcctgcgttcagtcttgagtaaacacacacaaacataggcacacagaagtaggagaaatagaacctaattgtgtatagcctttgagattgggttttgtgcaaatccatatgaattatgtgtactctcttgtagatagaccctatcattgtaaaaagtcgttctgtgggaaggcgttgctagagagatagctccatagttgaagagcacttgctgcatgtgcagaggacctggactacttccccagctcacaaccgtctttaattctaactaggggaacctaagaacatggtctgctctctgtaggcaccaagcaggcatgtggtaaacaggcatacatgcagacaaaacattctggggctagagagatgactttgtggttaaaaatatatacttctcttatagaggttccaagttcaggtcccagtgcctgtaaccgaatggctgacaactgcctgaaatgccgtaactcccatgcattaaacacttatatactcgtggatacatgacatccttccagtatacatcaataaataatagataaaaactatttgtaaagagccatgttctgttctgtgaattttttccatttatttttaatgtaattattgatagacttaactctgtcttgtttctgtatactgtcttctattttctgaacttacctgaacataagttaaaattatgtttggtttttcttggatattttctttacatttcaactgttttcccctttccaggtctccccttcggaaaccccctatgtcatttcccctccacctgcctctatgagggtgttcccccacccacccactcccattctcccaccctggcattcccctacactggggtatcgagcaccctcaggactgagggcctcttctcccactgatgtccaacaaggccatcctctgccaccatgagccagcaccatgggtcgttccatgtgtattctttggttggtggtccaatttccgcgagctcggggagtgggggggtctggcctgttgacactgttgctccctctatgaggctgcaaaccccctcagctccttcagtcccttcttcaactcctccatcagagacccccaagctcagtccaatggttgactgcaaacttcctcctctgtatttgtcaaactctggcaaagcctctcaggaggcagccatatcaggcttccatcagcaagcacttcctgacatccacaataatgtccaggtttggtggcagtatatgggatggttcctgggtgggacagtctctggatggccttttcttcagtccctgctccacactttgtctccatatttcctgttctatttatagtgtcttattacataggtcctttaaagtggttgtcttgggtatcagactatgtgtacataacatataacctcctgttgtcaacagttcaccagttacagatatcttgcctcctcttttaccttttccttgctcccatgtttaatatatttttgtattaaacattgagaattgtgctagtgttagaattctttgcatcaggcatttaacttaatccagaaaaaaggaaagcatagtattatttacacatttttctctgtccctgttcctttctttcttcctgaattaacattccttttgtcattctgtttaaatatcctccccgccccaatttcccatacttctagggtagatctagggtgacaaatactcctcattttccttctcagaatgttttgatttttctctatacacacacacaagctacaaccagttcctctctcaccagctaagctttgggcgtgggtgtgggtggtgatagcattagttgtttttcatttggttggttggtttttggtttgtgtgggttttttttgtttgtttgttttttgttcttctgctttttgctttttggttgaggagcaagtggacattagcttatgaaggtttgttctgttgggtgccctgtttcttgctctcctttggaggccgatttctgaaagacatttgtttaaagatacaggagttggggagtagtgtgtgcacaggattattcacaaatgtgtacagcatcaaagctgaccaatagatacttacatgacagaaaatttacatattctctcatactttagtaccgactggccgtgtgtggctgttgaagacatgaaataaggcatatgtgactgatattttgttaaattttaatgtaatagccaaatatggttagtggctgcaatattagtatagctccaatagaaagcagaaagcctggaatccttgttagcaatggctgatctagggctggcttaaggaaatatatgatgaagctagaataccttatgaaattagaatgtaaggaaatactccaaaaaataatggagagataaatgaatgagagacattgaaatcaatctgaataagtttcagaaggccaattgtgggacagcttcagatttgaggacagcctcaaaattagtattaataatggactaaagcttgaagaataaatattcatgaatcactactgatacaatacacacaatcgtgtagatacataggaagaaacagttacttttccttacagtataattctaattaatgaatttaggaagggtgatggagattgaatcagcactggcaaataccacagctgggttcaagcagagagacaagcactctatgctctcagttatatatggatgcacagaaagcctttatcaaggaagccggtacagagtagttgttcccagagcctcgggaagatgtaggggaaggattgggagaaggaggattgtttaatgggtacagagctatagcgtaggaggaataatttctaataatttatagcacagaataattatgagtgacaactggatatttcagcacagctagtagaattttgaacattccccaaagaaattatgtttagatgttagatatgctaatttctctaatctgatcattactgtgtgtgtgtgtgtgtgtatgtatacatatatgtgtgtgtgtgtgtgtgtgtattggtctgtgacactgtattcataggtatgtacaattacatgtcagaaataaaagcatatatgggggctggagagatggctcaattgttaaggacattgactctgctcttccagaagacctgggtccgaatcctagcacctacatggcagttcacaactacctgtgacttcaagatctgatgttctcacatagacatacatgtaggcaaaacattaatgcacataaaacaaaaaggtaaataattgaaaaataaaagcatataattaaaatataactgagatctggaaggatggcacagtggttaagatcacttgatactctttcaaaggacctaggttctgttctagcacctaaatggaaggtggctcatagcttcatttccaaggggatctgataccctcttctgatcttcactggtatcagacatgtaggtggtgtacatacatgtatgtaaacattcatagaaataaatagctaaagtataataaataggatgagaagtatctaagagtactaagtatgttagcctaagtatgattgcatttttgtatagtctcaaagaatctccctctgaagttatttcatagataactcttcacagtagcatatcaggtagtcttggtactatgtacagaaaagaacagcgagctatctaattgaacagtccccctccaataatagacatggcccccagtggagggatggggccacccatcttcaaaatttttgacccagaattgttcctgtctaaaggaaatttagggacaaaaatggaacagaaactgaaggaaaggtcatccattgtccatcccaatttgggatccttcccatgtgcacacaccaaacactgacactattgctgatgttgtgcttgtagacaggagcctagcacagctgtcctctgagaagctctatcagcagctgactgagacagatgcagatacttacaagccaacactggactgtcggagacacctttggaagagttagggaaaggattgaagggggctaaggggatggcaaccccataaggaagaccaacagtgtcaactaactgggacccctgcaactcccagagattaagccacaaaccaaagagtgtacataggctggtccgtgccccctcccccaatccacacagaggactaccttgtctggcttcagtgggaaagcctactcctctagagacttggtggccctttatctatttttaaatatataaaactatatttaagctgggacattcaccccaaataaaacctctttgggagtagaaactagacatgtgtctgatttatttaaatggtatttattttgataaaaatgggggggcatctgattccattctggtcaagagcaaatgtcagacgaacttagattaagtaatgtgaaagcagttatcacaaggtcagagactgggaggacatggcagctgaatgcagtgtagaatcccatactgcatcctggagttcagcaaaatttgagtggcatctgtagattaattagcgttagtagcattaaatgtcagtttcttgatttcagtagcttcaccttggttacacagaatgttaacattcaatgttagggtttatagaaactctgtatgttgttcttacaactgtttcaaagtctgcaattataactaagtgtgtttgttttgagtcctggtctcctatagccactgtactgtcacatagcactgccactgtcacacacctgaacttttacacattcagtttcaggtttgttcaactcctttccagagtcttagcagatatttgagtctacctgtgtttctttaatcagaccttacattttttccatttctagacctttgttttattatggaaaaatgtttattttgaaattttttaaatttagaaatagaaaacctcataggaaggaggaaagaaacaaaaaccacaaagcatccaggcagtgttttacttcatgaacatgtcaccccctctggctcactcgtcccatggtgagaaaggaaggactcagccacccacagcaatgttattaatcgggatatggatcagtttcacgaagaagccagtgaaccccatgatagcaaatcccatcgctgtggccatggcagtcttctggaaaattcttttctatcaagtttggtacatcttttagtcagccgcattgagtcttttacaaactcctgactgggctctacagactgcattatctgatccatgtgtgtgggatgacggtttgagagggtagaggcacgtagcctaggagagaattgagccctagacctttatttcttaaggctttctgtgtctatggtgtgtgaggtaaaaattttcagtgttcttgtctacaattactttttgtcgtttctgcttctcttttggtggtttttcttctcactgtaggccatgcttattcattgtttgagttggacatagaagtcactagctgctctgtgttgctgtaatgtacttgaattggtttttaggtatcagttaacttacttggaaacaattcattctgtttataatttggttttaagctttgtcagacagatgagaacagcatattatcatagagcttgcaagaggcccacccagccacagaagagaactggtagtttaagaataatgccattagtgggaaaatatgaaccccaaagtatttctttgggctgtactttttttggttagtttcagaaatttgtgaattttatttttgatgctcagtttagcagaaatgagtcttgttttcaattttctctttacttggcaatacatcatttgcagttcacccatgagtgagtcttggagagaaatagaggatgtttctcagtaggggtttgtgaaacaaaaacaaaacacttggcatttatgagcctctgtgagggagcaggaaatgagactcagactttaaaccaactaacttagtaataattactgaggaataaaccaactaacttagtaataattactgaggaactgtgagaatcgcatcattagagcgtgttctttgcttgctataaatacaaccatagtccgtacagtagattggatggccttgggtttgtagtgcagttcattttgtacagagtgatataggagctgctgttgagactcagcatgagagtctggagaactatgtgaggcttgccctatatttatgaatcagattttaagtaaaaccacaaccatttccttgtgtgtcattcatgctttagcagaggatatggtgccacagagctggcctggtttgtagtttctcatgtaaggctacaccactttcttttccgttttagaagccacagcagttttgatgtattatcaaaccacaaaatgtaccttgagcatttcccaggaagaactgtgctatgctggtctgagtaccgattgtccttgctgggtggttctttttgggaagtactcatgtaaataagtaatttggagtagttgatacattggaactacaaaaatggaaacagtgttacggtctttgaatatatagatttctattgaaagatagtgttttaggtttggtagtgcagctcagttgcagggcacttgccctgtgtatatgactgaagccagggactgttcccagtccacaagaaggaaacgagagggagagagagagggggtagatactatgttatgatgttagtgctaacatattaagatctgttttgttctaccttagcatcaaggcctgccatgggttgcctctcataaacggacaaagctgtgatccttatgcaacagtgtccctcgtgggcccctctaggtaatgcttactgaattgttactgcattttcaagtttaaagttggatttaagaattggaaatgtacagttcttagatcaagtgctgagtaactgacataaaataatgctttaaaagaattttttgtaagttctagagcacacttggtaaacaactgagttctgttatcacagaaagatactgggtgttatttcaaatctgctatgtgcttattaggctgtggtgaaagcttcaatcttatgccattgtaaaatgtactttaaagtatattcctgggccaggtatgggggatgcatgcctttaattgaagtatttgggaagcagaggcaggtggatctctgtgaatcaaggccaccttagactgtatagcaaactacaggccatccaggatctaaaacaaaacaaaaaaccaaaaaaaaaaaacaaatcatatacacctggctgcctttactcattaacattcttactttcaaatatcctcaattttctgtaagtaaaaaaatcacattttagtgattgtcaactcaaaatagcaaaacagtttccataccagtatctgggaagccgcttaggactgagaactgccttttctgttcatgtgtcggtgctttgtgaagagagctccaaactctagaagaactactgaggtcccaggccatggtgaagtgcagcatgatgttgagtaattggtctataatttatgaaaaaccagtaacactttgtggtatctatattagataacttcattgtagtttctttacaagactgactagtctggagtttgtgtgcaacttaaagctctttgaatcaagaaacaaaagcacaaaatttgttatcaccatgactcccctttatcacctaaagctgtagtctttgttttttcggtcatcaagtcttaaaaaaagtgtgtgtgtgtgtgtatcaaagcacctgataccatggagcttaaatactgatatgctattattacagattggttttaaatttaaaagcaaaaatgtatatggcattaaatgctgccaaaagacttttcacatcaatgttaaaaatgttcatcctcactggatattggaagcataatgataacccctgtacctgggcagcagacgtagaggctcacacattctggccagcctgcactactcacaaccatgtctcacagagaaatgagaagggaaaccagccagcctagaagagctgcttgtttggagtaaacctcttttgtagttctgtcattgaaccagactattgttactaagcagttactctaccagagagagattctcaactcaggaagttgttcttggtttctgtttaatgatttctatctcatgacaaattctttagtggagcttttaaagtaacatttcacaagaactatttttttaagatttatttatgtttattttataaacattggtgttcttcctgtgtgtgtgtgtgtgtgtgtgtgtgtgtgtgtgtgtgagagagagagagagagagagaaagagagagagagagagagagagagagagtgcatgccagatctcctggatgctgggaattgaaccaagatcctttagaagagcagccagtgctcttaaccactgagccatctctccaacccgaaactttttttttaatcacagttgattttgctattatactaccgttgcacagacattcccattggttgagtctagtcaaagacacaagactcccagtacatttctttataactgcctctgaaattgtccattcactgagaattagcaggctttgtttttttttaagtttctgtcctggctgcggccctcagaagtacactgggttcagagttacctttcatgcttctcaggtgttccagcatcagtaaaggcttggaggcttgggcctttcttctcaccactccttctggtagtgtaatcggatcagcttctcctagccgtggagacagtaacccaatcttgccatgtatagatatgtaaaacttgcatcctgtgtgtggatattcatcagattcaagtttgtgaggtttatatccttggcttttttcctttgcataatatgtaagttactgtcttctctcagttgtcctaaaatgtaggcagaggttaggcatcctagctgggaatagcttgttttataattgtgtactattaagttctacaaggtataactctactacattggaacaggaatgaccaaaagaagacaaaagtaaagaagaaaacaagcaatccacagttcaatgaagtcttctattttgaggtaatttcttgttttatataaatgttaatgtttgatatgtaattctagttgatttaatttcgtaaaccatagccatcaaaattgttttattaattaatgcagctaataatctctacccagagatgagtagagccataatgtcacacatgcagctctggttggtttggaagtggggagggctagagcccctaccacatagtcacattgtcacagctcccttgagagcctccccacactttccagtctacctgacacatagtgacttctgagcagactgttggaaatcctatagaaatttaaatattaccattcagaagatctgaaaccttttcccagctgatattaatgatcaattaaatgtaaaccctgccttccatatcctgtaaaagggtaattttataaggaagaacggtagcaaatctgccaaatatgagactactttgagagtttgaaacagtttacgattatgcctttttaccattaagttctctaaatctaatttactctgtagatgtagcttgttcatgcggatctccagctgccttgagtgaatcctaaccactggaccaccaagcttgcatcttcagctgctttgaaattgccccaaataaagtgctttggcattctttaaagtatttagtcttttttcatattaattgaagactatagaaaaactaaaaatcaaaatatctaaaaggttgtaataacagaacaagttgcaattgatattaagatgtgagaacaggttgtaaaagtgggtaattacatcttgaagtttttattttgtttttttcctctgttttggagagggcaccaaagtaccccaactcatgcctgattgttgttctttaataacaaggagcatgagctgaagaaaatgccaaaggtgacataggaaactgggggtggggtgggggacaagaaaaacctactgagtcaagaggcttcctttcctggctgaggacttggtgctgctttctacatttattaacagctcttatgtctaaccatgagaatgagaagaagatgacagttctaacagctcctgcccaaagtcactcactgcatatagttcacacctcaggtggcctggaattcgctccttaggaagaacctgtagccagagggtaactttctgaaagttgaggtcagaaatgcttgccttaccaatttacctctcaggccttaaactgtttattcatctagtcctttgttagattggttgtacagacaggcatgctcagtacaaccagagcaagacataagaaagcacacacaggtgcatatacacagctataatgtggagcaagacataagaaagcacacacaggtgcatatacacagctataatgtggagcaagacataagaaagcacacacaggtgcatatacacagctataatgtggagcaagacataagaaagcacacacaggtgcatatacacagctataatgtggagcaccctctctcgagctcagggttaaaacagtccaaagctagatttttgcgagaacagaaataatattacagagacagaacactttgggcacagagacagaaaaactgaaagttatacccagagaacatcaagtaaagatttaactaagtttagtaaagtaaccaaaaaagatgggataaactggtaagtgtccggcggtgctttagctttagccattaaactagaaagaaataaccaggatctgttagcagagcccagagaccttcaaagagctgagagcggggcagaagtcgagataactgatcgtgggagaaaagggagaaagaaatcaaaagcatccatggatctgtgtaaaattcctccaccaggcgtcagatgtggtacatgcctgtcatcccagtccttgagaggtgtaggcaggaagagcagtttcaaggccagtctcagaccaccttatctcagaaagcaaatcagatttgctaacaggacagttcatgactgaagcatggtaggtgataactatggatcacaatacaggatttggtacagagccaggagagccaacagtgaagagatgcagcagaggagaaacccagtcagctctggtgcttactaaccactccgcttcagacgtgctgatgaagtttgtactgtcgcttcctcatttttaaagtgaggggaataaatctagctctgcctgcctcaaagcaacagtctaatgagtccagagatgtgatagcactgagtaagccagacaacatggtgtggcgttaagttacatttagaacaaaataaaacaaccttggagaaccacctgtgcaattccaaggaggagtagagagcaagaggtagcaggctagcccacaggtaaaccgaatgcaaagaacttgtctgggactagggcgggggagggggagggaggaaaggagagaagaaagaagagagagagaggccaaggacactgacaatcttagactagaaagaagtgatcagacagctggacttagagtagaccaaacgcttataacacatgcttgttagttaatactgtggtgaaaggagcaggcttggggaggtaatcttagaaccatcacctcttcagaagtcctgagggtgggggaagtggatgctcagcttggtggcagttgaggaagttcctgcccagtggccttgatattttcagtaaaaactgtgagaaggaaatatgagtaggtgtgacccgtgcagacagagcgttgtaaccagggaaccagatgtggctctaagtagaactgacggtgtggaggcgaggaggcctctgatttttatgccggactttcttaccttctggtgcatatttggtacatttcccatgctttggaaattgcattcacacttgactctttatatttgtaattgaatattttgggaatggtcatttttgagctcatgaaggaaagatactttaaacagtctctactgaaatccttcgtttgtaggtaaccagatccagcagttacagcaggaagtcccagttccaggtggaggaggaggacattgagaagctggagatcaggtcagtgccgtcctgtggcgctggagaacggcttttctccatgcaaacctccatagagcccttcatagcaagctgatcgatgaacttagatgaacaggcatctaacttaatccacttagcctttcaaaatcggattcttctcagaaatatcaagtagttctcttgtgtgagcaaagacagcctaatttcacctagtctgttttcattttccctgatttaattgctccttcactacctggattatagtataatgaatggaagactgattatatttaatccaatttagaaataattgttttattcttcttaacatatctgctgactatcagacatttcagtgaggtaaggcgatacccgcacaggtgcatgtgtttggagtttgtggtatttcctaggccttcaatatctatgctgttttggaaaggaaacttttgcaaatgcatgtgtaggtgtggtgttaacagtgtgttttctaaaaggcatattaatcatgtgttcacattgttaggcaatatttttctaaatcaccgatctttatgtattaattaataacatattgatttatcatcaaagaaaaagtgtggtcttgttttgtttcctcaattcagtaaagtaacccttttgtcctaatgctacaaactaaaaacaaacaaacaaaaaaaaacaaccctagactttcaaacttagtttctccttttatactgtttagaatttggccaggaagctggcctaggtgggaaaggcacttgctgccaaacaagtcttcctgagttgtattccttggaccctcacaacggaaggaaagtgccaactcctgttaattgtctctgacctccactgtgcacagtggcatgcatccctcccccaaaactagttaataaggatgtaaattacaatttaaatcgtgatttttttttcataaaaattgctgtagtaatttgctttcaatgtctagataatgcattatatgacaatgctaatctaacatctcttttaaaagcatgtaaaaatatagtacaaatcaaaatcacttgaaactactcagtgtggtttgccaaaactaatgctaggttttcaattttcaggattgacttgtggaataatgaaaacctagtccaagatgttttcctgggagagattaaggttcctgtcaatgtgttaagaagtgattcctttcatcaagcctggtaagaagacagatactctaatgaaccaaatttaattctctttaataaagaatataaatatatgcttgctggaaataagtaaaaagttactgatattaatttggttatgaatttgttattagaggaaagataagtactttaatagttgtatcacttgatctgtgatactgagataaagaatttagttgtctaggaatatttttctgtttaagaataaaatcttggggctgtagaaatagctgaactctcttctcagtttggacggggtttcagatcctagcacctacctcagatctctcaaacaaagggctttaactttaggtctaaggaatccactggtctctttggtcttgatgggcacctgtacatggacacacacaaacacacacacactaaaaataaagtcttaaatctaagaaatgagaaacattaagacatcgaatgaaccgctcgttgatgcttgatcacatgtcatcatctgcagtttggatgcttttcggtcaaagaattgtgggtagaaagcagagggcttattgagaagacacagcagtcttctgtgtgaggcagtgtatgattttcagttatcacacatttacaaatgcagataacctcgatgtgttttctgagtgtggggtattgactataatgtcatttggccttttcatggctctaatagtgatactgaattaataacattaatgttaataaccttaatgttttgacattaaattcatacttatttcaatgtgaaactttttctctatagcccttaaaaactagtgttttctgtctcttcgtgtgtctgagcccatgtttcttcctagattgattggtatgtaggatcatgctttctcagttgttggtgcttgttgatgctgctatgtgagcatgtaggtatgcttacactcatgcgcacatagagaacagacttgacactggatatgttcaccagtcactctcagtttctgaagagaggacttcagaaccaggagctcactgattagctaggctgggtgggcagtgagctccagggactgcctgtcttttcctgccccgtgcaaggattgcagatgtgcacaccactaaacccagcttttacatgggtgctgggaacctaaactcggattctcatgctctgcagagcaagcactttatcagctgagccatttctctgacctctgtctcttccctttaaaggtcactttttaaaatgaaatgtaatatttgtgcctgcttattaagtgtaatagtcacttgtatatactgtgtaatgatcaaatcaggatagtcagcatttccatctctcaaataccatttccatgttggatgctggagaattagactgtgctgaaccgtgacatcagttgttacggaccatagtgaacctgttggattataaacagagctgctactcccacgctgcattgagagcccgttctaataataatacctttctctgatgatctcccctcctgcctctagcaacttacagtctttgtttttatgtggatcaactttagttttcacaaaggaataagaacttgtggcctttgtctttctgtgccttacttcacatgataaaatgacctccagttccagatgggttaccataagtgataggatttcactctttaatagcaaaccgtctgttgatgagtaaatgaatttaaataacgtggtctgtacacactgggatgttaacataagaaccgctctttagaactcagctgcctagaagaggagttggtgttgactgtttaggggttgggtttttgtttttgtttttgtttttattgttttagtttctgagacagaatctcactatttaaccttgactggcctagatcttactatgaggaccagactgtccttgaactcagagatccacctgtctttgccttctaagtgctgagatctaagctgtgcacactccagctgacctaggacttagacgtttctctttggtctcacttgcctttaaaggagcctgccaccagacagtcctcattgggattctgctattccatagccttccttagagagactgtattttagactaattttcaaattttattttttaactcttccaatgcaaatctaaatgtattagtctctctaaaaacattttgtgtgttttaatttctaaatgcatccagagaaggagaaaaatgactttaattgttgagaaaaatgtattaccgtttgcctcccctgcccccatgtcatatttcctcccttctccatgaaaattcctgaactcagtttttaagtcttgaaaataacattccatacctttagtacagaagaaaaaatgagttgttgtgtctcccaggggcctccacaatgagcctcagacctgcccccacagtgtgacacagtctttccatatactttcaaatttgacagaactttctaccttggccaacttggaatattaacagacaataagtaactttatttcaatttcttctatcaatagtataaatacttcatgtgctcttgagtgctggtgtctttgaggtcagagtcgttgaatcctctggagctggagtcacaggtgatttgtggctgcctgattttggttgctaagaattgaactcgttctttgtttatgatctcaaccattgagctagttctctaggctccaataaaaatattttaatttaaagtagtctgtcagaagcataaatgctaaaatttatgtagcataaaagagaagaatctgctaatgtatatgaattaatgtacattgtatggaagtataaaaatgttaatgccattttaattgaagatcttgatctcctttatcacttatagagctgtagcatcctctagtggtattaaagataactgcacaaaacctcattccattcaggcatagttatttctaacgttgatattgcaaagggtcataataacttattagtaggcagtactcttgctttaagtttttctattttcttttttccagtaatttccattagtatttgcctattatattgtatgtctaaaaactggtttttgatggtttagtttttttaagatttctattttatgtatatgagtgttttgctctatgtatgtctgtgtactgcatgtatgcctggtgcttgtgggggtcatcagatggtgtcagatgccctgccacaggaattagagatagttgtgagccaacatgtgggtcctctacagaagcggcaagtggtctccactgctgcatcatctctccagctctacttcctatttaattttatttgcagattataatacaatgactcatgccactttcccttgctttctaagacgtcttttgttgcccttatgtacatattacttttatgtgtgtcccttgcgcgcgcagcctgtgaatgcctgcaggaattgttctctgtttccaccacttgccttctgggtattgaagtaaaggcatctctgtttaccttgagtcggttcttggtggtgggggaacctgggagaatgaaacggactacagtctcgtgctagccagccgcactcagagcatcacacatttcatactcggagtgatttacctccttaaccttgattgttttttaattggtgataattagattggacgttagcattgtcttttttgtgttgatattagctaattttcattttgccatgtgtagataatagaacataatttgattgtttttttaaataagttttttttaatagaaattacaccattcctaggtaaaaagatgtaaaagagaatcctgcctccttccccagtgccacttgcctaggtcctatttctgagccagcctctgttctctagattctgggaatattttctatattcataggcaaatgcatgtatatattttcattcgttgttttgttgtattgaacctgggtttctgtgtggcctgggagtcataatctcccaagtgcacacacgaccacatgcccacctgtactatgcctgtatgtttactcaacagtgtagtagaacactatagataggcgttgactcttgatggtggtttacaacttatactctagaatcagacagccttaattcaggtcccatcctcgccagtaaccacttgctctgtgcttcttatttcgtgggcacagtgagggctgaatgtgctgagaacacagtccgcccatgagctgcagtctggccctggcccgtggtttcttcttcagtagctcagctgtctacttatcccgcttgctcgttaactcactaccatcacgtgtagtaccatcagctgtacttttactttaggtacttgctacagccaagagacaatggaaacaaatcatctaaaaccgatgacctgggatctcttctgttaactctctgctatacagaagactgcgtgcttccatcagagtactatggaccgctgaaaactttgctgctaaagtcaccagatgttcaggtactttaaaaatctttttttttccccaagtgttttgtgatttgttctggatttgtatataggtacaaagcttcaagggataaacccagaaaaacggtcagcttcatccgtccacatgtcggaggagcccttgtggtcagctctgggaactactttaaaaatcttatatgatccccaagtggggcagtctctggatggtcgttccttcagtctctgctctgaacttggtcagactgccccacttggggatccatgccataaacaaacccaggcactatggcagatgccaaaaagagcttgctgacaggagcctgatatagctctctcctgagaggctctgccagtgcctggcaaatacagaagtggatactcacagtcatccattggatggagcacaggatccacaatgaaggagctagagaaagtacccaaggagctaaaggggttttcagccccataggaagagcaacaatatgaactaaccagtacccccagagctccctgggactaagccaccaatcaaagaaaacacatggtgggactcatgtctctagctgcatatgtagcagaggatggcctagtcagtcatcaatgggaggagaggccctaggtcctgtgaagattatatgccccagtataggggaatgccagagccagaaatgggagtgggtgggttggtgagcagggggaggggggagggaatagggaatttttggaaaggaaactagcaaatttcatttgaaattaaaatatctaataaaaaaaaagaaattaaaaaaatcttacatgaaaaggctaaactaattctgcaaatgataaaagatttcatagtgtcagctcttacagagtgctgtgtatttgatttctctgaacctgaatactgatgtgcttcaaatcttatctctgattataatttagaaaactaaatactatcttacctctgatcagttataattaatgagtgtgtttaaatttcatccacaggttagtgattacgcatgcaaccatggttccttgattctgtccttgtttttaccttctttatcctagccagtatccgcctcagctgcttatattttgggtgaaatatgtcaagatcaaaaggatgctgttttgccccttgtacgactgttgctgcatcacaataaacttgtcccttttatcactgcggtggccgagctggacttgaaggatactccgtaagaactgtatttcattaaatgtttaaacttcaatttgccagattgtttttatagtctcagttcttttgtattgaccaagtttactatacactaggttaaaaagaatcgcttagtcagtaacaaaagacagttcttagagttaccaaacagaatccggctgaccgtaagaaccagttatgcagacatgtgtataagtcagtggtgccatttcctttgttactattactgatctttgctcctggatgcagtgattcacatgtcacagcaacagctctctatcacggttgttacactgtaggcacacgtagagcgttgtgaagagcggtcagtgcctttccatttccatcgcagtgagacaacaccatcatcttatgcacacagacccacactacaccatcatcttatgcacacagacccacactacaccatcatcttatgcacacagacccacactacaccatcatcttatgcacacagacccacactacaccatcatcttatgcacacagacccacactacaccatcatcttatgcacacagaccacactacaccatcatcttatgcacacagacccacactacaccatcatcttatgcacacagacccacactacaccatcatcttatgcacacagacccacactacaccatcatcttatgcacacagacccacactacattttttttacattcataaacatagttttgataggtttagaaattctaatggcagcaaacattgctgttaatagtagtaaaggttactaaaattgtgtatatgttcaaagtcaaattattactgtttgaaacttttcttctttttgctgtcaatggtttttgtctctttctatttcagagatgccaacgcaatatttagaggaaactccctggctacccagtgtctgactgagatgatgaagatagtgggagggcactacctgaaagtcacgctgaagcccgttctagatgaggtacagagtagacctcacaggcagagcctgtgaccagctagagcagccttctcaacttgtatgtcctgaaaagccctttcacagatcatctgaggcgtctgcgtgtcagatgtttacgtcatgattcgtaaccacagctaaatacagttatgaagtaacagaaagagtaaccttacgcaggggtcaccccaacatgcggagctgtaggagagggccccagcagtaggaaggctgagagccactgcagtagagcttctcttttaagaagtaatgtgttgattaaaagggtctgtccattcatgggctactggaggaataggtgtagacactttgtaagtaaatttctttgccctctgtggattcattcttactcacaagacacactgatctacattattgtttgttagatttttttttaactaggattttgatatagttctttgggaaattgtttatgctgctttaagttatcttcaggtggaagctttaaattttgttagatttattttttataatatcagaagaagaagaattatattcatgttgttaaatcacctaggaaagaagagtaactgagaaatacttgtatattccagatatgtgaatcctcgaaatcctgtgaaatagatcctgttaagttgaaagagggagataatgtagagaataataaggtatgattatacagtgtcatttatatctacattaatttttatcttcatgtgatacctgtctcccataaatggtttattttattttctatgtatgagtgttttgtctgcatgtatgtcagtgtgccatatgtgtgcctggtacctgtggaagtcagaagagggcattgaatcatctgggaatagagttgaggtggttataaaccattatgtgggtgctaaaatcaaacccaggtcctctgcaagcacataagtgctgttaaccacttagccacctctctaccctccaacatatactcttaaactgtgcttcttgtgaaaattactcatatattcattcatttgtctagaaagtctgaatttaacttaataaattaaccttaatgttgatcggcctttaacctgagttgggactagaagcaggagactcgagagtcatcttctaataagtctcatacccattatttgttctcatgaagatattgaagctgtgtgacaatcagaatcttagtgtttactttgttaaaacctgcaggagaatctgtactactatgtggacaaagtattcaatacaatcgtaggatcaagtgtgagctgccccactgtgatgtgtgatattttttattctctgaggcaaatggctgctaagaaatttcctagtaagtgccttggtatacttaatcacattttctttttctatttttttctccatgctgctcatttggtttgtgtgaaatacttgtgcataggtacaatcttctgagtttttcaaaatggtgctagcttctttgtgagatttaatgatttattttttctagaatctcaaaacatgcaattcactttatttcaatataatggcaactatataaagagctaatcaaaatcattagttttaagaagggacagtttgcatctgtacagttttctataatatgtaaggaaatctttatgtgtcgtatagttaacagattgtagaataaacccgtgtgtaccagctattttttccagttgcagattttcaaacagtagtaattggtagttttatacaattgactagatttgacagcttgaagatactaagatgtctgtggtgagatgtcttttcagaaatagtctttggctttacaaatacttgtcccacaatccataggatgatcttgcttcaggttttgcaaaaatatctatattaagattttgcttggaaaggctttataaagttatgagatctacttcttattgttagcacttggaaatactcaaaattttagttcatttctgttacataaatgaatttgccaaaactcattgcagatctgcccataacacagacaaggcaactatttacaataataatcaggtttatctatctgcataagactgtaaattaactttcttagccatccaacgagattttgttatttcattatgcttccattcgtcagaccctttatttaattcactcatactaactgctacatgaattcgggttttggtctcttggctaattacaataaagagataaaacatttagctttaaataaatatatctagtcttcataatcaataaaggaggcagagacttgattttgcatacataaagatgaaatagcaattagattctgttttcaaatagtgagctagatcataaccactttgcctgcttgctagtctgtcttatcctttactcttaacatgtttgaaaccattacccattgattagccaatgaaactgaggtctcagttgttgttactacctggagctctgctaccctgctagcagggcaggcagtcataatgatggacagcttgacagttccctactgggtgatttgtaagactaaaccccacgtcaaatccggagattctttccctcactgccctttctctggcgtctgattgttgggttagttgttgactccagtctgaaacaagtcctgacaatgagtgatcattgctacaagtagctttcaattcacctgcagtttatgtgaaatattggtagctttaaaagtactgtctctacctaattgcttttagtctttaaattgttggcttttctttttgtgacaagtacatgagagaaacaacataaaaggtaattgtgggttcatagtttcagaagcctcagtccaacacccacaggctccgttactttagtcaggcctgagacaaggcaaagcactgttacggcatcttgtagcagagaccgcttgtctcctggcagtgaggaggcagagagagggagggatgagccagggccagaatacacccttcaaagacatatccaaagtcctctgcttccgctaataagcctccagcttccacagccccaccacctcgtacaacagtctattgcagttggaatccgtcagtgtggtgaacgttgattagatcgtgatctagtcatctctggaaacattcttacagaaatactccagatggtggtctactggtcttgtaggcatttttcatctaatgaactgaataatcaagactaaccataatatagccttagacaccatgaagatttttagggtgaatttaaaacaaaaatataaaactgaaagctagtttttggtattcagtgttgtcactaggtagtactacgtagggctttaatgttacttttttttaaaataatttcaagaatcttttatatcaagaagctatttttcaaattaaaagtatttctttaaaaacagcaactttgctttccgtttgttattttaagttacagcatttttttctcttagtttagccacagtcagcatcatttcacagctcagtttttacaagttattttcctttcctacatagtttacatgatttttttttttgctttctcctctttggtttataagtagtgtgtttgcatgacgtttcccattttatccctgcagatcaccctcatgttcagtactctgcagtgagcagctttgtcttccttcgtttctttgctgtagcgatactctcacctcatgcttttcatttgcgacctcattatccagtaagtgtttgctcctctcaaagccttgttccatttttatttattttttgtaaaatgaagaagaaatatgccatttttctttttcggtgataagacatttcacagttggcagaatgctgctaagttgatgtctgctgatgagcagaggggagcactcctcagggcctttctccggctgctgcacacgggctgcggtccttagttacagggagctggggatgctggggtggtaggtggagttggggctggttgttagccgaccctctcctggtttattacagcagcttattttttatttctatattctgaggcagactcttgttccatagcccagatggaccctgactcacagtcttcctgcctcagcctctagagtccaggagtacaggcattcccaccgctcctggtttacggtggtttaatcatggcagtattttaagatctcagaaatgtgaaggaaaatgaagaagtttatttgaaaagtattcaggaacctgacttacttggtatctttgtgcttttgctttctgttcacctaagttatatcaaaagatgagactaaaatgaagttctgttcagttacctaaatctacatctgcgttgaatatatacctcttcatattttaaggtttcctttttcttttaacctatttctagtccttcatatagcatatttttagtcactctttggtctttctctgttgtaaatattttatatatactcttgatgctttagctgctgctgtgtacagtagaataggaaacatttagtgatgaccttgttctaagctttccttgaatcactttctatgtctaactcgcttaggtcttcctagtcactgtaggagtaaattactttattagccccatatacaggtaaggaaatcaccatgcaataacttctctaggctcatataactaagacatcacatttggatcctacacaatttgtactagattcaaatgggactagttcagtctccacagtctataagcagactggtattgaaaatctttttttttttttttttaatgtatgtgagtacactgttgctgtcttcagacacaccagaagagggcatcagataccattacagatggttgtgagccatcatgtagttgctgggaattgaactcaggacctctggaagagtagtcagtgctcttaaccgctgagccatctctccagccctggtgttgaaaatcttacagcaaccactgtcacagtgctcagtgctggagacatatgcagccttaattgacattccctacttcaatgtacccatggtccatctagtagtgcagtgtagggaaaacttaggggcaaaactggcttctgaatgttcacttcccctccgaatagcctcacagtgttagctgagagccatgctgcagtggcagaagatggatgttctgtgtagcctgtatccttttgttcatggagaacccttctgtggctgtgttaactaaagctggaatgacctggggcagtgagagcttgccagccacattctatacagaagtagaactcccacctctccacttgtggctctgcttgtattcagacttggaattcctagatggaatttgaagaaaatccctctaacacaaacacttttaggtcacttttcacgcaactttattatttaaagttttctttttgttgttatttgcccccatccccaatacctcagcatctccatccagtctttagccataattcttcattttaaagaaaatttgaagtagtgggaatagagacaatatgacatttgacattggtgctgtagggatgagcatagctgccttctattaaggtagaactattgcatcagtttaaagccagcacatgattagccaagtaaaaagtaatagtaagcactgctgtacaggccgagaatacagagcaatcccagactctgatggcttcatcaggaactggaagttacaaagtaatacaggtgcagaattgatcaaatgctactgaattttatgtttagaaatccttttaattctaagaaactaattatagaagatgttttagagtagacaagaaagaataaagaacaggtagctaaataatcatagcaagggcaggagatctgagcggtgcttgctgacagtcaagggatgtgtgcacacacatgtataaaaactgttttgaaaacattagtttagtaaaaatgaaggcatgggctggagagttggctccgcggttaagagcattaactgtacttccagaggtcctgagttcaattcccagcaaccacatggtggctcacaaccatctgtaatgagatcagatgccctctactggtgtgtctgagaacagcaacagtgctcacatacacaaaataaataaatcttaagaaagaaagaaaagaagaagaaagggtgagctggattgatggctcagcagttaagaaggcatactgctctttctaagcccctaacttcagttcccagcaccacgtcaggcagctcacggccctcagtaacacctattctagagggtctgacccctcttctgagctctggggacgtgcaccctgtgtgcacatacctacacacagatacacatatgcagataaaaaataaggttttaaaataatgtaaataatgagatggactaagggctgggactagagctcaatgttcagtcatttgccaagcatttgtgaggccctacattcaattcctagggctgtaagaaaggaaaaaaaacggaaaccttcacttgaacctccttggtgattgttgtgtgttttttttttaaatacagattatgtaaacattgattttgtaaaccaatgttgaaatttcaaaaggaaaatcattagatgattcttattaaatccctcattcttccttgattatccctttgaaggccctcctgctgaagacctcttttacccattggtttactttctgtctgttgtatatacctgtaataccctgtgcactctctctccctctcatggcattttctattctggctagtaacatctgtgtataacagatctctgcatacagactgccaggatctccagaacaagggaggaccttttcctaatatgtgtatccaaagcatgtggtagtgtctaagacagtcacatgatcagtttaattaataaaaatgatagttgagagaaggaactcatcaagtgagtcttttcttaatggagaaacagattcatggtttaaatacaggggaagaggcaggcactcgaaaagagggcttgctgcctccaggtcagaatcctagaggattctaagcaaaggtgtaagattagaaccgagcagctgctcttttgaaagataacagcaaacttgggacattagtttttttgtagaccaaagacagtcaaatggcaccaatgaaaaacaagagaatgtgtgctgagttactttgaattaaaaagtttaacattttggttgactttaataattgttacatagtgtttgctgagttgtgtactggaagccaggtgaggaaggtcctgggtatacagtgatgggaaatttttattacagtttgcatgtatacagtaacgagtcaaagcagccgagtgacgtggtactacagtagccacggttatgtgggtcaaagcagccgagtgacatggtactacagtagccacagttatatgggtctaagccagccttggtgacctgacactgaataaaatgagctctgttccctcttgctagttcaaaaaaagaataacctaaaacactgaatttaaaaaccacgtttaagcccggcagtggtgacacacacctttaatttcggcactgaggaggcacaggtaggcagatctgtgttcagggccagaatggtctacagaaagagttccaggacagccagggctacactgagaaaccttgtttcaaaaaatcaagaaaacaaacaaatcaacaagtttaaatggagaagtcttgtgaaattcaattcaaacttaatgttcccggaacttctaaagaatgttaactctcttcccaggtagagctgtagtggggttctcttacaggtagaacagagtcccaggtgctccatctgaagtcatttttagataaccataatttataacttttaccagatatatcataatggtcatataccagatattccttctccggatttcctcatttcttggtcatttcttccccactacattcattgcctgcttttaatatgagatattgaaagataaaacagtattaactataataattgtattttccttgatatgtcttttgataatattgtttactgtggtaagatagttggttatgtagacatgtaggtcagtaagactcatgagcgaactgtgttctgtccatttattatatgtactttaatgtaaattacactactatcaggtagacagacctgaaagataacgtggctaacagacccaaacagttaccttccagtacgttcttatgtgagtgggtgactccatttcctggtctgaatttgtattctccctctgctcccatgatgggaacagttgattgcagaagtcttacgtgttctttgaatatgcttagaagtagactgggcacagaaagttggaaacacctctaagttagaaaaaaaaaataggtatctctgatattccaaaaataaatagatttggagtgtgatccagtctttcgactacacaaagcccttagatacagttgattacattatgtttttctttttttctaagtccttagtattgtctttaaagattgatttatttatgttatgtgtatgagtaccacattatgtttttcaaagggaacaagtcattaagtgtttaatctctgacttttttttaatggtactgagaatggaattgaaaggtcacgcatgctaggcaagcattccaccactgagctgttctaccggccctctttactctttatactgaggcaaagcagtctcattcggttgcctggactggattttctctgtagctttaacagacctgagtttgcagtccttctgtctgagcctcccaaggaattgagatcgtagacctacaccaccaacttctttcattgtctcccaacccaagttctataagttgtcttaggcttggctgcatcttaactatctttgtttgaatgaacatttttagccattattttagagccatatagcccattcactctattctgctttttatataaactcaacttcttgaaaacttaagaattttgatcattcttaccttttctaggatacacagacagttaggacattgactctcatctcaaaaaccattcagattattggaaactggggatgtcagtccagaaaaaaggtgagtttataactgtttcctctttgcatacttaacaaattttattatatactaagattccttcttcacttacttccttacatgttaaaaataaaactgaagagaatacatattcacatgcaataatggtcttttagtgggtgttctactgtagtcaccttttgaaggagacggtgatacttaacctgatatacccgtggtagggaaaaaactaggaagaagacacaggcacagctgagttatgtggtggtctgtgccatagtcacctaacagcactggaagaagccttcagctccaggatggatgattcatggagacatggacagctttatccttagcttcaaaatacaggcccgtcattgtcttgtgttctacctcagagcttcataaacttgtcactcatgaagccgtttacttaagaaacttatgcaaccttacgtataaaaatcaaacatttactgataataacttactttagcattttgaagtcctcagctcccagtgctgaggagttttttcttccatttgcttttgcaactgctttcttggggcttttccctagtttaagacctagaaggaaaaggtcaaacagtgactgccagttcaaagctatatgcaggctctgagggatattcactgctcctcggttcctctctcaccaagaatgttcatcaaagaagggagaagagccaggctcagatcaataaagtaactgcaggtcactgactctacaaaaaaaaaaaaaaggctttgctggcaccctgcatctggcccagcatgaggtatctttggctatcagcagctggaatcaacagaatgtgaatggagcctgatcatgttcagggagaggctgagcatgatatcccatgtgctgtgtggggaaggctaaagaccatgagtgtgtggtagccatgatcctggaacattctgggttcgctgacttggaggaatgctctctaggagagctctgaacaagatggtgaatgtggctgtgagttcccagcccgcctgctgtcccacatggagaagagttgaagaagctctctatagttgcttctgagccacgatctggcctactacacagatgaggcagcactcttggccctctggctgcagacctggctccttaaggcacccaagtgaattgccatgagtaattatgactgattagccaagaggagagacaccaccttacttgctacctgacatgaatgaaatctgcggatcccagaggattggggaaccagaagagattgtgccgcgctttcccggagttggctcttatcagtggggagaaccgcatagtggccagctacttccctactctgaagaaagtagacttgagctcatctggggaaacaaagcagttggtatggaagctggaagccttaagaggaagtactttgccttgccctggaaacctgcctaggacacggctggtatgaagagccaacaaacacacaaagaaaagctaggattgggtgacctacacttgctctgatctactaactaacctgtattaggtacctttattatgtataacaagaggagttagctgatcttaatgggaagtctctgtaggacacagtctcaggcagtacttcctgaaggaggaagttgtatttgctagtttctggtcccagtaaatggaaggttttgccatttacaggggtctgaggcaactacagtccttgacagggctatgttcttgccatcagtccacattcaccctgtgcttcatctgatccccacactagagtgttgtaagttccaggttctatagggaaaatttatgaagttgttcacaatttttcatttgtgataaatacatttgaacactcctaagctgggcccattcctgtgtggctggtgggagcagcccctgtgagctggaggcctcacccttatcactgtctctcacgtctcaggatctttctttccctccctgccttcttcctttcccttgagactagaaatcaaagggctgggctgtatgtacctcagtgggagagcccttatcttttataaatcagaccataggttcagtccccactactaccatttttaaaacaaaaaagaaaccagacattgggctgcatagcttccatccagatctgcatccctccctgtgtttactctgagcctctggagagccatgagcttccaggaggcccttgttttggattcacagttgcacttgtcaggagacccccaggtagatttttatttcttacttggtcctttagaccttggagtaatgatggctctataccttattgtatgctagttaaacctatccatgcatttgtaagtacttttcaaattctctgttacatttttcattttgtcatataataataatacaaatttatatatgcaatgttttaatacatatttacattgtatattggtcagatattttaaaccactctttgtatatataattttaccacttattaaagacaaaatacaaatttgcatactaacgagaaggatatacttgtttatgtttacataaataaatactagttgaatatttagagttgagtatatagagcatcttcagtgtttttcagagttgattgtattttgattttgtaatcattcagtttacataaacatatagtacaaaatggcagaagtatatttaaggccattttttaaattgttggaaattttgtcctaatctcaagctagaatttacttagtgtttctttggtttttggttggttggtttgggatttatttgtttgtttagtgaaacttaagtcagcaacataagcaattaaagtcaaacattctaataaaatccaaaactactaattgatacatgctgactaatgatgtgggagaatattataggtttttgtttctgtaattaagccattatgtttttgttagagcaaaagccttcatgtctagtaaaaatagctcagttcctagtatacggtggcccagtgctttgcgctgaggccttcagggcagcagtgactggggatgtgtgatgtattggcatgcagagtgcaaagcatgcgtgcggtaccatgcagcagaaacacctcagagttggacatgtttgattttgaactagttcttgttgtttgtgtctttagaaacctttattgttgataagtttctcatgaccacatgtgagacacgactaataatttaagaactgtgcgtatttaacatacacaaatcctgtatttgttttctcatagtcacggttcaaaaagtcagtcatgtgtgaatttctcaaaatgtttcaagaagaaagatattttacagatgtgaaaaaggtatggttctttcttgtcatctagtttaaagaaatcaacatctcatattcttccaaagagtccatttccagctttaaaaaaataaaatcatgttgaaactgtcaaccatgaagtcttttttgggttggagagatggcttagaggtttaaagcactgactgctcttccagaggtcctgagttcaattcccagcaaccacatggtgactcacaaccatctgtaatgggatccgatgccctcttttggcacctagggcatgtatgctggcagaacactgtgtacataataagtaaagaaatctttttttttttttaaaggtctttttcttccaattctatcaaataaagctgtgagattaagcaagtcttaacaataactactgtaagccttaactctataaatacagatttctatgcaacactattgacatttggggctaggtagttattgattttgcatcgtaggatatatggcaacatccatcaattaaatgtcaatggcatatacccagttttgaaggccagaaatgcttttagctattactaaatagatgtcccctggaggatggaactggctttgttaagaacctttgttctaggactaaagcctagtagagcttgttatgtagtagagtgggtactcacttgccatagcaaagcaaaatgggtcaccaggatggctcagcaggtaaagggacttcttagaggaccttattgctggggtcacagtgattggaaggagggtaccagctcccatagttgtcctccaacctccatgtgtgtgctgagacacacacattcacataaagtcagaaaaaaatgtaaaacagtgttttcaatataatgagtatgcatggtagtaactggaaaaaaataagtaaaaataaaaatatataaatgcctacagcataaaatgtcgatataagacctacaatatgtaaaaaggagtgtgactagaaactgagaagtctttttaagtctttaattttttggtccttaacttgttattcattcacataaaatacattattataaccctgaaaaacttggaacaaaaaattatcttaggatatagctaaactaaacttgaagaaagtaatgtttcgttatcacaatcctaacttagtgaaccaagttagcaaggctagtcttaaagcctgttgagtttctatacatgatttagctgttgatggccaagaacatttttactgaagtacctgtttagactgaagacatactttctcgaagactctatgagtgaaaatgctcccatcagatagggcttggttttgttttatttttacagagtctcagtatatagccttggctatcctagttcttagtatgtagacccggctggcctcaaactcacaggtagccacctgcctctacctcctaagtgctgaaactaatggtgtacaccactatgctgaacctaaatttttttctcctttagttgaaagcttttgagaaaatttaataatatgcttttaatttgtaaaataaaattacaagttttgtatannnnnnnnnnnnnnnnnnnnnnnnnnnnnnnnnnnnnnnnnnnnnnnnnnnnnnntacatttactgtctcatgtatatctgtagtcctgaggtagcataagatagtttgtcctaaaatcttaattatcgccaggcagtggtggcacacgcctttagtcccagcacttgggaggcagaggcaggcagatttctgagttcgaggccagcctggtctacagagtgagttccaggacagtcagggctacacagaggaaaccctgtctccgggggaaaaaaaatcttgattatctttgtgtgtgtccatgtgtctttctgtctgtctatagatcggacctaggattttacatatcctagactgttctgtctccagcctctataattaaggaattacgagtgtccatgtaactcatcccatactggcatttatactagtgacttttaagtgactcgtaactaaatcatacgctgttgcccacacagtaaaaggaaaggtaaccagcagagttctggatacaaggtggttatgcagtttggtgacagaagcacagcactgtgagggagtgaagatgtttacagctctaagtagagtgaatctaaaccagctccttacctacagttacttacgtctgagtggtttcacatcacacattggcttttatctgatacttcttcatataatgctaagaagtgagatattcaagtagccattaaactccactggtggatggcccatctattagaactacagatgagacagcatactttgttactgttgtccctggatacttgaacctgcaccaccaagacaaaaaggattctgttcttggttgttcacttaccaagattcccttccagcaaactggaaggaagcctcttgagtgagtgctctggtgggcgaatcacagcacccatagccccagcttgctgcgccttcagtcctgtagaggaagcactcgtcccttgatgtccttcttataaaactatgtgcttttgtcgtgtgtatcctaaatcctaaacaaaataaagttaaaaacaaaagcgaagacagcaatacaggccagacaactgggagcataatatctcttggataagcagatagataggattcctctctaagagggggaggtgctttgtgaagtgctgtttcctctttccacgtgctgggaagcccgtgactagtccagcttacatactcatgaagctaaatgctgttcactgagtggcctcctgtttctagcaatggatgctacaaattttcttgagccacatccttatattctgcatagaaaatttgtaaatatttatatttgattttaggttagctcatttgtcaaggtcaccagttatatataatagaaatcagcaagctattttctatgaataaccaatgaatgggagggcttattggttacataagaccaataaatccttgtacttgtattaaatatccccctttggttccatccagtagtcacacacagtatttatttgtcacgatggaaaacacactgtaaaatagtacatgagagccctgtgccagtgtttgctgcaaatcaaagatgagagttttaaaagggaagaaaaataaatgctttgagccaggtggtggcagcacatgcctttaatcccagcacttgggatgcagaggagggtagatctctgtgagtttgaggccagtctggaccacagaatgagttctaggccagccagggtaccaaaaatatggataagggccagatgtggtggtatatgccagtcatcttagcactgaggaggctgagacaggaagattacagtgtgtttgagttcagcctcagaaatagtgagaccctgtctcaaaacgaattacagttaaggattatagattgagttatttctctaggtaagtacattcagaatttgagtaagttaagaaacaatttttgcctttaatcccagcacttaggaggcagaggcaggcagatttctgagttcgaggccagcctggtctacagagtgagttccaggacagccagggttatacagagaaaccctgtctcaaaaaaccagagagagagagagagagagagaaacaattttttagaacgcctttcttttgtaaattgggaactttgtataaccaaatgtattttatttcatagattactataagatgagcctctttgatccaaggatgatctaagatctgaactattgcaatatttaaaacttcttgagtggacatgatgtcacagtggaaaattaaacacttcatctcaagtgataggtcacaaactgcaggtgtagtaaaacaaaaactatatgaaattacccttaggctatgtatatgaattttgtttagatatgagtccagtccccaagataccttactatatatgcaaatgtttcagaatcctaaatctaaagcactttggttctaagcaagagatttccaacctgcatatatatatatactttagtaataagaaattccctaatataatcagtgacatgcaagataaaagtttgtttgttttttaagacagagtttcttggtatagccttggctatccagaaactcattgtagaccaggctgcctcaaactcagagatctacctacctttgcctctggagtgctggaattaaaggtgtgtgctgccaccaccacctgacagataaaataattttttataatataccttatttactcacacactgtaatacttccccatctccccatttagttcttggatgaaatttcatctacggaaactaaagagtccagtggtacgagtgagcctgtgcacctgaaagaagggtaattaactaaatgagacatgaaagttataactcactgtagacagtaagtacaaagaacatggctttgagaaggaggacacctgagttttcattctgttccagagcttcctaagcggcttcagccaggtaaatcaccctcacggccctgtctgctccgtcttaggacagcacacgctgactacacagtcccaggctgttctgtagttaggaaatggctctgtttccttaccgaggagtggttgttactaggaataatgagatggaaataactttcctggccctttttattctgtatagcacaattctaaaacgacattacttagaagaggagaggtgcctcactcatggttaagagaggtagtggctcctgtagaggacctgggttcaattcccagcacccatagagcagctcacaactgtttgtaactccagttccaagggatctgatgccctcttcagatttccacaggcaatgtacactgtgcatagatgtcatgcaggctacgccattcctaaaaggagaactaagacagccctgcattgatagaaggacgtcctgagtcatccccagacgtcactgctgtgcactagtagccgtgcatggccgcgatggcacctaacagtcagggtcagcttggtttcagggcagtggtttgcacctctgagggttaaatgtttgcttctgtctgttatgttggcagtgagatgtataagagagctcaaggaagaacccgtattggaaagaagaacttcaagaaacgatggttctgcttgacgagcagagagctcacctaccacagacagcaaggtagagttgtgcttgggcttcgttgtggctttactctgctggttcatggtgccgcggtgatcgctgcacagtaaatggttcagagtgtctgtcccacagtgacacacaaaactgaactgaagtgtttcttttatcacattatgtagtatataataaaactataacgtaaaagcctggtgtaaaccagtttgagaataaaacaactggacttggtaagtaagacagtataacaatacaaagcagaaaggcacagacttaacaggttaactaacaaccacaagcactcagctaatctgttaactcatggtgctcagtaggttttgaagtcccatgaaatctgatgggtaaataccaactaggagagcttctcctatgaataccgaaatgatgacataaaggcctgatacaaggtactttgagagaatatagagtgcttcattgggaattcctgaatagtagaataattgagaagagagatattttaaagagatgaggtcttgacccagaactctgggcttaagcagtctcttgcatcagcctcccaaatagcagggactactggcatgtgtgcacatgtgcacacacacatatgagcagtttaacctgaaggaatgaatagacatgtatattccaagtatattaataagaagttttttacagtgtgttgcattttaggcatctgcatagtttgttacagtatataatatgtatacagtatataaatatgtaactaacgatcagtaggcttacctttgtttttaaagctgtctttgaatatttcagaattctagtttatattaaattttatataaatattcttacctatggataccatagttgtgtgataatggttattttaatagcacaagcacaatttaaaccaggcatgggggtacatacctctaatccaggctctaaacagtgggtggagttataggacagagacagacagatctccatgaggtcgaagccaacctggtctacattgtgagtccttaaacagcccagataacagagagagactgctgcttaaaaaaacaatcaaacaaaaaaccctaataattataacaacaatagtgcaattaaataaaatttaagataaattagtcatcttctgtgaataaacaagttatttgttcctcagttaaaacactatctagccaggcggtggtggtgcacgcctttaatcccagcacttgggaggcagaggcaggcggatttcttgagttcgaggctagcctggtctacaaagtgagtttcaggacagggctacacaaagaaaccctgtcttgaaaagccaaaaaaaaaaaaaaaaaaaacaccaaaacaaaacactatctaatctaacccagcattccaaagcctgctagttagaaagttgttgaagtcagatgatagtcatggtgaatttcctgagaatcttactatgtacatatacacatggagtttgcataggaatttcatggacctcagaagcctcaagtgtacctacagttgtcacatttagccttttgttctagccagtgatgctaaaaaaggatggactttcacagaattaagctagtagaactgtaagaatggatgtattagatctgtgttggttttatgttggaggaaatacacaggatggtgagattatttgccaaagcttacagttctaagcatgaataattgttgttttaactattttgatggatttttttccaaattggattacatcctttcctgctgtctaaaaaagaattcatcgaacataagttcacattttctgatttcttggggtggtcatgggtgatattactgcatttttagagtgccaaagggtaggtgcagctgttttttccagctgacagcctttgttcccagttaaacacctcagaagctgcgcttttgtgtccgtgtgtttgctttgtacagtttatctctcacctcttttagtcaggctgttatcttaagtttcctttgctgtcagtgacgtgtctcactcccatccctgtagccagccttcatcccttatggctaatatactagggattaaggtgcagatactataattgctaaactacacctaagatctaaggcttcgaaagcagatgtaagggctttccctcataaataaagtgtccgagctttgtatttgctgcttgctcagcttacttctatcttctggctgttttcttgatagcctaaactagtcattattttttgttgctacagctactatattaaattttgctatacaataaattttgaggtgccgggcgtggtggcgcacgcctttaatcccagtgcttgggaggcagaggcaggcggatttctgagttcgaggccagcctggtctacaaagtgagttccaggacagccagggctacacagagaaaccctgtctcaaaaaaaaaaaaatttttttttacatttggtttggattttctatattgatacagattaaggctatatttcgttacaacatactatgaatatatgtttcaactcttgtttaaggtgttgtatctatgcaatgcttcaaaatgcaatattaagttccatataatgatccttaattttcctcagaactttaaagttataatactctgacctatggccatagtatcatagttccattcttagcttacctcagaaaataagtagacccctaacctagttagtagttagatggaaaactacttgggaataacaggtgctgtaggtgtgtgtgtgcgcatattttatttttatatatattgctccattgttaatagcttccattgttgctagtgaaaatttttatatctgattattaaatttctgatgtgtctctctggaaactcttgtaacatttctttagtaagttttgctattttgtgacccataatttagaaatttttcctttttctttttcttctattcctgcctaacacttggtatatctttccatttagagactccttatctttttcttaagggcatttagtcacttgccaacacttttaagtcctatgagtctaagcttgtattattgtttctatgtcattctgtgttgtagttttggaaacttcttggagagatcttttgtttctaactcacattgtaatgttatcatggttgacagaagtagccttcatagtgtaagaacagataggtagcccctagagcatctaacatttgtagtattagaattggttccaaatgaataagtacaactttagagtatggacatgttgtaaatatctaacagatttaaagaaagaatatttttaaattatctggcctccactgtcctgtatagcttggtacccaacgctgtctctctgtctcctttgtcccccagatcatacctctgattcattccctcagatgttctctgtatgtgtagctctgctttcgaatgctaattttcctatctatttggttaccgccttgacagtttgctcatcttgtgttctacagtccatttacctaccttagggttcagtaacatactcacaatgatcatgttatctcattgcactgccctgccacccagctacagccttgcttcactagcctgtgtagtttggcctgatggagctcatctgttagttaaccatcctgctatgtctgaggctccagctccagcctgctgtgcctgcagctctcctaacttctccccagctgtggcttccatcagcatttccttccgaccctaccttctgtcctcgccaatgttatcttgtctgcttttcttttgttcctgtagatgactggtatttgttgaatgttatttccacagggaagttctctaactgcccaatctagagtaactttccattacattttgtcacatcacttcagtttatcttcgtcacagtgtccatctctagttaatattgctctaccagtcttttcagaactcaatacagatttcactaggaacctattccctgtttattgttctgtcttaaattattacaatagtacctggcatatagtagacattcaagatgtatctttttaaaagtacatgccatgtctgtttgaatcaccttaaattttaggctttgtaccaggaaagtgtctgaacaactattttgtattaatgtctttatttacagcaaaaacaaaatcacaattaaccagatactgttctttgtcaaaaaaaaaaaaaaggtcacagcattaatcctttgaatagtgtaaaatagaatgtttttagcttcttatatttcaacccacacgtccttaaagaaaggcttgaggaagaagtagaaacaaagctttgttggtgtaaaaatgccatcacaaaatgacagaagtcaaaactgcatttgtcattagcttcttctataactggatgagggacagatacccaggctgtactgacatgcatcatcttagaggaggccctttaacaaactcaaattcccttacctacgtttcagattgtaaagggttagggattccatctgctccataaactctcacattgtctctagcacctcctaagcaaactttgtagtgtctagctagtgactggctaaccggtgacagctgtaaatagtttaaaccatgctttggagctagcaagatgagtcagagggtacaggattgactgtcaccaagattgataagcagtccactgtctgggacccatatggtagaagaagagaactgatttctgccagttgtcctatacctctgtacatgtgctggggtacacgtgcaggtacatacatgtgtgcgttcgcacacacgacacacacacacacatgcacacatatacacacatacactcaaacacatacacacacactaaaataaaatgtaattttaaaaaaatttaaacaaggctcatggtgctcatggtggcacacgcttttaatcccagcacttacaaggcagaggcaggtggatctctaaatatgaggccagattggtatacaggatgcgttccaggacagccaaaagagactttgtctggaaggaaggaaggagagagagaggggagagggagaaaagagagaaacttaagaattcagtgcttttaaccacttggttttgctcagtttccagcaccaacatggcggctagcagtcatctgtaacatcagtctcaagatatggaaagccctcttctgactttggggggcgggggagagggaattgtttgttttatttttttgagggcactgggcacacatgtggtacacgtatatacatgctggaaaacacatccacatgcattaggaatagagatgtagatcagagctagagcacttgcctaacatgcatcatgctttgggtttggttccttgcacatatacacacactaaacgatgatgttgttgctgttgctgttgttgttgttttgagggctagtcctttaattaaatgttaggttgacaaacagaaaggattctacttgaatagtcatattcactgtggtcatagctcctgagcctgggcctcaaagtgggtctctgtcactagacacattagttctttcagctgccacataattagtgttgcaaatttgtaatagcatagaaaataattgtccatataaagatcaaacttagatgcttttccttgaaaatattttcatttatgtgttaaaaggcagggacattcctttacattaaacatcaaaattctctttccgggctggagagatggctcagcgggtaagagcactggctgctcttccagaggtcctgagttcaaatcccagcaaccacatggtggctcacaaccatctgtaatgagatccgatgccctcttctggggtgtctgaagacaactacagtgtacttataattaattaattaattaatcttttttaaaaaaattctcgttccatattatacataaaccatccagaagtctattgtggatgcatatgcttctatcagctagtggaattagccttgcagaattaacatctcatctttatggttattacagtaattcttttaattttgtcgtcttttattatttaggcaaagatgcaatttacactattccagtaaaaaatattcttgctgtggaaaaattggaagaaggctctttcaacaagaaaaatgtaagttgcataaatattgaagcattttaagtcatcaggtgtacgtaattttggtatctaccattcaggtctctcaataatgtcccaagttaggccactcagctggtgcaggaccctccagtccccaggatgacatctctgttccttagcatctcctcactaacttgtggttcccccaggttctcctgcatctgaaattacctttttgttcttatgcagacagtggcctcctctgcacttgtatggcatctgcagtctgtattgttctgcttagccccattggctaagatgatctttggtactgacctgcttactgcaccaattcattccgacacattagcagacatttcttagccaagcaatccaggtctcctaagtgctttttctttttgtatagtatatgttgtttttaaggtttctctaactttttattttaatttgcaataaagatgttccaagtgatacatacagagaaaacgctgtacatccaagcaaacaactgtgtggaagccaatgagtggatagatgtcctgtgcagggtgagcagatgcaaccacaacaggctcagctctttccacccctcagcgtatctcaacggaaactggctctgctgccaggagacgagtgaaagcacaccaggctgcaagccgtgcaccgcgtgagtaactcatgactgcatgcgggcgtgggtgtgagagcatgacagacgctatgtagaagtagctggacagaggccgcacggtgctgaagacatttctataaaccgtgtctagaaaggcttgggttgttgcccagtggtagagtgtctctctcacctgacacacacaggggctttggtttaattctagtaccacaaaaattaaaatacagagagtaagtaaatttctatagacacaactgtaagttagtggtgcccaggggctagattgatgcattgttcggtgaacaactataggttatatatatgtttattgggactggggagcagttagtgcttgttgttcttgtagaaagaagactcaagtttagttccaaaacccatgtgacaccagctccagagcacagatcagataccgtcttctagcctctgcagaggcatgtataggcacgcacgcatgcgcacacacacacacagatatacatatatacattaaaaatattttttatgattttacttcaaaatctttttcaagacttgagtccttaacaaccagaccttgtgatcctgttg

SEQ ID NO: 68 - DNA, 2547 bp, Mus musculus
atggcggcggcagcgcctgctgcggcggcggcttctcccgaggcgccggccgtctcgggcagcgcagacccggagacgggagacgaggacagtcgtgaggtccgagtgctgcagagcctgcgcggcaggatctatgaagcaaaaaatttattgccatatcttggacccaacaaaatgcgcgattgtttctgcactataaatttggaccaggaagaagtttatcgcacccaggttgttgaaaagtctttaagtccatatttcagtgaagaattttattttgagattccaagaactttccagtatttgtctttttatgtttatgataaaaatgttttacaaagagatcttcgtataggaaaagtagccatcaaaaaagaagacttgtgcagtcatagtggtaaagaaacttggttttcactgcagccgattgactcaaattcagaagttcagggaaaggttcaccttgagttaagactgaatgagctgataacagagaatggaaccgtgtgccagcagcttgttgtacacatcaaggcctgccatgggttgcctctcataaacggacaaagctgtgatccttatgcaacagtgtccctcgtgggcccctctaggaatgaccaaaagaagacaaaagtaaagaagaaaacaagcaatccacagttcaatgaagtcttctattttgaggtaaccagatccagcagttacagcaggaagtcccagttccaggtggaggaggaggacattgagaagctggagatcaggattgacttgtggaataatgaaaacctagtccaagatgttttcctgggagagattaaggttcctgtcaatgtgttaagaagtgattcctttcatcaagcctggtacttgctacagccaagagacaatggaaacaaatcatctaaaaccgatgacctgggatctcttctgttaactctctgctatacagaagactgcgtgcttccatcagagtactatggaccgctgaaaactttgctgctaaagtcaccagatgttcagccagtatccgcctcagctgcttatattttgggtgaaatatgtcaagatcaaaaggatgctgttttgccccttgtacgactgttgctgcatcacaataaacttgtcccttttatcactgcggtggccgagctggacttgaaggatactccagatgccaacgcaatatttagaggaaactccctggctacccagtgtctgactgagatgatgaagatagtgggagggcactacctgaaagtcacgctgaagcccgttctagatgagatatgtgaatcctcgaaatcctgtgaaatagatcctgttaagttgaaagagggagataatgtagagaataataaggagaatctgtactactatgtggacaaagtattcaatacaatcgtaggatcaagtgtgagctgccccactgtgatgtgtgatattttttattctctgaggcaaatggctgctaagaaatttcctaatcaccctcatgttcagtactctgcagtgagcagctttgtcttccttcgtttctttgctgtagcgatactctcacctcatgcttttcatttgcgacctcattatccagatacacagacagttaggacattgactctcatctcaaaaaccattcagattattggaaactggggatgtcagtccagaaaaaagtcacggttcaaaaagtcagtcatgtgtgaatttctcaaaatgtttcaagaagaaagatattttacagatgtgaaaaagttcttggatgaaatttcatctacggaaactaaagagtccagtggtacgagtgagcctgtgcacctgaaagaaggtgagatgtataagagagctcaaggaagaacccgtattggaaagaagaacttcaagaaacgatggttctgcttgacgagcagagagctcacctaccacagacagcaaggcaaagatgcaatttacactattccagtaaaaaatattcttgctgtggaaaaattggaagaaggctctttcaacaagaaaaatatgttccaagtgatacatacagagaaaacgctgtacatccaagcaaacaactgtgtggaagccaatgagtggatagatgtcctgtgcagggtgagcagatgcaaccacaacaggctcagctctttccacccctcagcgtatctcaacggaaactggctctgctgccaggagacgagtgaaagcacaccaggctgcaagccgtgcaccgcaggcatccctgcagacatccagatagatatcgatgaagacagagaaacagaaagaatttattctatttttaccctcagtttacttaagctgcagaaaatggaagagacctgtgggtctatagctgtgtatcaggggccacagaaagaacctggttattctaagttcaccattgaggattctgttgcaacctttaagacaattcagcaaatcaaaagcaccatagagaagctcgatgaacctcatgagaaatacagaaagaaaagatcgagtagtgcaaaatacggaagcaaggaaaatccaattgtgggaaaaatatcatag

SEQ ID NO: 69 - DNA, 2547 bp, Mus musculus; identical to SEQ ID NO: 68

SEQ ID NO: 70 - DNA, 96596 bp, Homo sapiens
  misc_feature (19512)..(20471): "n" at positions 19512 to 20471 can be any base
  misc_feature (41369)..(41388): "n" at positions 41369 to 41388 can be any base
  misc_feature (85221)..(85596): "n" at positions 85221 to 85596 can be any base
cttccttttcctgatcctgcccaaagtgaggaggtttgttaagcagataggggaaaggctgagggcttcggagtactgcatctttaggaccctgggaggagttcaccttatcggttgcctgacaccaccccagaagtggctatatcaaagtttaactcaatagcacagcatagcttgcagggaaaggggtgaaatataatttcctgagcttcccccaagaccagtacggactagactggaccaaggagtttccacatactccagagaagaggcgtggaaagcagctgaggtggtagccaccaggcttccaggcactggccatcacaagggaaaggtgaatcagcagcgaggctggggagagatattctagtgaagagccagatggaggatgtagggtctgagaggcagccagagtggagtctgagtcatcagggaaaacaagcaggcgctgccaagccaggaggaaccaaatcacaggtactatagatacagcctcaatagcaggccctcacacaactcccaggattgagcccgtctcaccctcaaaagaagtatccagaaagtatccagaccacccacccacaacagaaatctgcaaagatgcaaaagatactgcattgatacaaggaccccacctcttctctgtctctatggggtcatttagccacaactccatcaaaaactcagacaccatctcaaaaaaatataaaaaaagaacgcagatatctaagaggctgagcattatttacctaaatggatggaccatttatataatgtctatttaggtcgctgacacctgtaattccagtactttgggaggtcaaggcagaaggattgcttaagcccaggaatttgagacctgcttgggcaacaaagcaagacccccatctcaacaaaaaataaaaataaaaataaatggcttatacctatagtcccagctactcaggaggccaagatgggaggatcccttgagcccaggaattcgaggttgcagtgagctatgatcatccactgcactccagcctgggtgacagagtgagaccgtgtctcaaaacaaacaaacaaacaaactggtgcatcagaatattttcccctctattcagttattggagactcataaggaagagaagaacaattttagagaaatgaagatgctacatcttctttgcacatctgtgggtaggatgaaaaaaatctgcaacccttcacacatactagtgttgccagtttttcttgtcctcctccccactgctaaatttggtgctgcttgggctgctcagttcctcccatccacccacacccaactgtagagaagagcgtggagggtccagaccggatctttgggacttttgatgcaaaatttaaaaaaataagagaggaatagaaatgacataagccacatgggtacattctagggagaaaagaatcaaagccaagcttttcttgcaagaagcaactgagagtgggggccattgatgtgctcaggggcatcaagtgggagcaggaggacagtcagagatagaaagagagaacgggtgggtgggagagtgtgctactctggggaaagagggtgagggatcttggttttgttggatattggagaagataagatgaaaaacattttgataagaactgctccagcctggtgctgtgacacacacctatgatgccagctacctgggaggctgaagcaagagaatcccataaacgggagttcgagactcacctaggcaacatagcgaaaccccatctgaaaaagaagaagaaagaagaagaagaagaagaagaagaagaagaagaagaagaagaagaagaggaagaagaagaggaagaagaagaggaagaagaagaggaagaagaagaagaaggagaagaagaagaagaagaagaagaagaagaagaagaagaaggggaggaggaggaggaagaggaagaggaagaagaagaagaagaagatgaggaggaggaggaggaggaagaggaagaggaagaagaagaagaagaactgctctagattatatacttgtatctcattttttaacagtagaattactatcaggactttgcttctttgaactctacccactcaggcactgaacaacgcagacctcagctttgacaggtttacaaacacaatgaccctgttaatacaaaagatgtattaacatacagcagagattctcaacggggcggtgatttatctcccagaggatatttggcagtatctgtagacatttttgatagtcacaactggaatatgctggtggcatctagtggatagagtctagggtgctgctaaatgccctataatgcacaggacattccccaacgagaaagaattacccatcctagccaaaatgtcagtagtgccacagttgggaaaccctgaaatagagaaatggaggaagggcagttgtttccttacagcttccctttccaatgacaaaataaaagacagctttgtttcattcgaaacacgttctcaagtgtgtgatattcattcttaatcagcactacatacatataataatctcagccaaaccatataaatcagttccctaaaaccctttaaggtaaaagaattcccattgaagaattccagatcctgtggaaaaaacggagttgaataaagaaggctccagaaaattttggaaaatctttataaatatttgtattttcaatatgaaatatgaaaatataataaaactagcacagcaaataaaatagctatgacatgtaagacatgcttattatgggtaatcaggttactctctatgctttgctcattctgagagaatcctcagaatctagcttatattccatcacgccccttgagaaagtttagctgaggtgttagtacgtttgttttgcctcattgcagataagacattcactaagaaggattatttggagttaagggtgctggggacagtggtatatttggccttccatacagatgctctataaatgcctctggatttttatttcaatctccttggcccctctctccaacagcccttcccagttctatctctgcacagacagcccaagaattcagtcctaaggacccaccttacatggcttaaaacaacaatacacaaactagatgttttacattctggtggccatgtcgagtaattatttgataggccacgagctttcatttgtggctgtatatccaagtcagttttccaaaattcagttatatgattataaaataagtaccaatgtctttagaactagacaaaatacaatttattaaaatattttatctttatatatgtgataaggattgaggggttcactccctcattccatccccaatcttgccctcttttagatgaaaggcaggaggcagttgcctaggagagggcaaccaatagccctggcctaggcaggtcaatgctggcctctctccttcccttggaccctcaactgtgagggctaggataccaggccgggctgttcctaaagactctgagcccaagcagtgcagctgggcctagaaatggggaggtaacccttcttgccaactttgctgaaaatgtggaagccccgcgggttctgaaggataacgctctcggcttgggccttgatagtctcatagcaggcatcataaagtggtgagggtccctttttgtgacagtggcagggggagccagagcaggagaggaagaatataacaaatccagcaaccccatcatgttccccacaccctactctgccaatgtaacccactgggcactcctgaaaatcaataattgggaagaggtttaattatttgggcaggtagaaagtggagacacaatagagaactgcggattatttatgttaacaggatttcatttgtagccacagactgacatgctgcctagatatttggtcataataacaagtatgaaaacaccttgcaactttgaaatcagttttcccagcttctacaaccacccacaaaaaattgtatctagcctacgtttagaacacagattatgatcgatgagcttctgctctccttggctgtctctgacaaaaatgagctgcttgtgacagacgcagccccagcccagtgtgaggattggaaacctcagaccctgactctttccctttctccttccttatctgactcctgagctattattgccttttctctgcacctaagctttctgcaaagcccagacccagccagctggttctgtggtctgctctgatttcccttgtggattttaaattcagaattctaggctcatttgttagcagcttctctgaacacattatctcatttatttgctcattcattcattcgttcatttatcaaacatttaataagtgccttctgtgttcttctatattttctatgcgctagggaggcaaagacaaaacattgtccagtctttgagatggtttcagacaggtaaacaaacaggaatagtaaatgtgttatgagcactacaatgattatgtgtattcttatatacatggtacataatggcctaaaggaaaaagaggccagttctgtgagacaaagtcaggaggtgaagattgggcattaaatgtattgaaatattttcatttgaacttaggcactattattggaagataagtatgttgatatggtgaacagagttggctgcctactccatgtcttactgctcccctttctgtgtcacaagaaaacactggtttggttcaggcttcaggtctcaagtagcaatgtactttgggaaggagggttcatccccagacccaggggtatcaatgttgcttagactaagaaaattatatattccttgtgattgtaaatgagccttaagaagatacctcatggtggtgatttacaggaaagctacctggaaaagcgttcctccctaatattaggttggtgcaaaagtaactatgatcttgccactgaaagtaatgaaaaagacattttagaaaaaaaaaaatacaccttcctgccattggatgttgagatatttggaggtacaggagccatattgtgaccatgaggcaaaagccaaaagaattgcaaagaagctaacccaataaagtcctgtttatgaatgaatacagagtagaaaatgaaacaagtgaatggctgcacaacatttccagttttctttttacacttattgttttgtatgtttttatttgtttggttggttttgagttttgggggtttttgttgtttttgttttttgatttgtttttttaatagatttggggtctcactatgttgcccaggctcgtcttgaactcctgggctcaagtgatccacccaactcggcctctgaaagttctgggattataggcatgagtcaccatgcccagcctacacccattgttttgttttatcactaaaatgacaagaatgcactgcagatggaatggatatggcaaaatagttcaaaaggagggggattgagaaataactgaagtcacactgacctaagggcatcagctgtattgtgctcagatattcaggcctttaaagttctcttgcaagaggtgacagaatttgaaaaaaaaaaaattctatttttagagacagggtctctctctgtcacccaggctggagtgcactgggatgatcatagctcactgcagcctcaaattcctgagctcaaacaatcctcccacctcagcctcctgattagctaggagtacaggcaggcacgtgccaccatgcccagctaatttatttatttatatttgtagagacagagtctcacggtgttgcccaggctgctcctgaactcctagcctcaggtgatcctcctgtcaaagttggtattacaaccgactgttggattacaggcatgagccatcacatctggccttgaaaatatttgtaccgaaggagttggaggttttaaggtaaaaatttgtccacatttttgtccacacagccttgtcaatggccttatttggtcttcaaatgaaatgttgaaagtatgttttctgaacatttaaggtctctcctcacctcctaccactccaattttattttttaaaatgccagttggatttagagatttttttttaataatgtaattagtgcataatgcttaacatcaaacagtactctgatggggcaaatggggaaaccaagtcatcaatgatcaaaggaacttgctttcccaccagtccggcagaaacagttctgtctcatgagtgtccagccctatgaaaatgatctacatttaaatattaaaaagaaagcacatttctcttcctcctactcgccagaaaaaatgtaataaataactcaaggccaggagacaaccccttacaatgccatgttataggttggtgggtgctgattcaaaaatatgccgtaacagacaagttatggaattagtttctagctgcaggttatagtcttcttattaagagacaatgtagttttcctacatcatctgccataaagcaagccaatgtatgggttgaaatgactgaatgagtttaaaactggtgaagaaataggaaaagacatagtagtgaatggttgctcatcagaacgaagagtggtagggatagaagggatggcctttaaacacattcattaataatttgaggaaggaagtgaagttcaagtttgtgatgatgcaatattgttccagttactaaacatcatgaagaaaagagaggaactctagatgaatttaaaacataatgcaagggcaataaggggaatgagatgtaacagccttctcgtaattatactgtatgtcttgttagtctttagaaaactttattttcggccgggcgcggtggctcacgcctgtaatcccagcactttaggaggctgaggctggtggatcacgaggtcaggagatcaagaccacagtgaaaccacgtctctactaaaaacacaaaaaaaattagccgggcgcagtggcgggcgcctgtagtcccagctactaggaaggctgaggcaggaggatggcatgaacccgggaggcggagcttgcagtgagccgagatcgcgccactgcattccagcctgggcaacagagcaagactccatcttaaaaaaaaaaaaaaaaaaagaaagaaagaaagaaaactttattttccaaatattttatattaaggaaacattgacattacccaagatctcttcaaagtaggcaagtatcagtaaaaacagaataattagaagtgacttcggatgaaaaagcaatggagtttggggattttagtgaaacggtataagtccgaaatctgcaaaaggaagactgtctggaagaacaaaaaagtggagtgtccctttatgtaaaattgttttcatacctttagtgaccatttagtaacagagttatgcacttggggttaagctagtgaaaaggaagggaagttagaagattttgacactaatggacaaagatattgatactttgtccattggatacgtttgtccattggatacatttgtccatttgtacattgatactttatccatggatacatttgtccaaaggttcaaataatttctctgtttattggagaaagaaatagatggatgaggcatcgcttggccaagcaggaggaaggccagaatcaggctggtgagaaaaggggctcagtgtggctggagatcagaggagtcaggtacgctggatccagttccaactcttggctgaagaatttgaactttagtcatttctagcattgttcattacctgtagtgtgctcttgctagctggctgaagggataaatgaagccactgatgtcctcttgagcaggcaactgataagctccattttttttgttaggaaagttaatttaagtggtatgtaggaggaatgagagggatgggggacttattaccagagttccagtcaaaagcatgaggtcagttactgaggtaatcctactacgtgctcagcattccactagacacttaacaccctgctcccaatacttatttaatcttaataacaacccttcaaagaagaaagtttagcatttccactttactgttaaagaaacaggttcaaccgggcgcagtggcttacacccagcactttgggaggctgacacggatggatcacttgagcccagaagttcaagaccagcctgggcaacatggcaaaaccccatctctaccaaaaatacaaaaattaactggacatggtggcgcgcacctgtagtcccagctacttaggaggctgacatgggaggatagcttgagcccaggaagttgaagctgcagtgagctgagatcgtgccactgcactccagcctaggcaacagagcaagactgtcaaaaaaaaaaaaaaaaaaaaaaagaaagaaagaaagagaagaaacagaaacaggtttaggaaggttgagtaacttgcccaaatgtaaaaggggtagaaacaggctctatgtctgattctaaaaagggatgcctttaaaaataagggggaaaaaaccctgtaacacgttgatactctttaaatgagaataattttaacaagggcaatgacagagaatggaaaggaaggaagagatttcagcagagtcagaaggatgtggcaactgaaaacagcattgggacaagggataagaaaaagtcaaagtttctggcctgagtaacagtataagatgtgaactcagatttggaaagggagacaggaaattaagttttggacttatgtttgaaatgacagcaaaacattcatataagaggaagtggttcactttatccaacaagtgtaaagatcacatggggaaatagaagtcacctgcaacacaggcagaactggaagcttcgctggccaggtccatgttaaactctgaccattctctggggctgtccagcctttgcacaggcggcgcgtttgtcttcagttttcaggtttccccgtcctatttcttatctcccagtgcctctggccttttctgtgtctccctccagaatgagctggagctctcttcatcttgacctttgtgtagtctctgaggtctgaggccatcactatgtctgaccctcaaaaaatatttgttgactgactggcttattcctgttgttgccctggaaaagaattaccctgcccgattaagtcacagtttcttccttcttagggcagcgtagttaacaacctcaacaccaggaaattgtcttcctcatcacataccagggtattattcatgcagtttactcactgtaaagagttcccttgaaataaagctaacaattagtcaaagatttacacatttcctagggtcagtcaactttttaacaaagccaacttttagtagtggtggcggtggcgggggggagcccttctttgctttttctgttcctgaaatacaaaagtgatggtaaatgcttcagaatttctctatgagagggtctcaggcactgcactcacgctggagttgggggtggctggtccttttcttgaaccaggttttgcagagaattggtcctagtaaagagtatttgtgtgggaggagtttggcttgctggcggggagtatttggataatactggaagagcctcaaatgcatctcttgcctccttttgaataagatacttttgaggtccacccacctgccaaattccattctattttcttcccacagggagtttccctgattgggaagggcctgtatttcccgcgagcgttaggagatgtgcaggtctattcattgggggagcccaattcccgggaggatttagggatcacgggagggccggggcgttctcctggtggggattttaaggccgctcagagccacgactgggagctacccttagccagcgccccaagccgggagtacggttctctgcagggtagcccggctcgggggtggcgaaggcggtgaatggagacccggggggggcgggggcggggccgcggcgggcggggcggggcggggcgagtcgggccgaggcccgggggcggggccaggcgcgcggctggcctgggcctaggccgctgctgggctccgcctcgcccggctacgcaggcggcagggctgcggcacgggccgggcggcaccatggcggcggcggcgcctgctgctgcggcggcttcttccgaggcgccagcggcgagtgcgactgcagagcccgaggccggggaccaggacagtcgcgaggttcgagtgttgcagagcctgcggggcaagatctgtaagcgggggctgggctgaggggacgccctggcggcgctgggcgcgaggctgagggggcggcgggttcgcggcggtggcggcgccgagctgcgctgggatcgcgggcccgggagggggcctgggccgggcgcggttgaggctggaagggggtgtgttggggggcggcgtcgcctcgacggggcggcgtgggccggggctgctgctctccggagggagtgggagctggagatgggcctggggtgggagagcccgggctgcgccggcgtgaggggctcggtcgtggggagcggcctggacgcggggacgctggagtccggggcgcggccgggggcgcggtccgggggcgtgaggagcttccggccgccctcagactcaggccttcgcgcggctgcgggcgctggggagtggccccgcggtgggagccgagcagtaattatacggaggcgcggcccgaggaggtggcgggctgggaagtggggctggcccgaggggagggggctgttcgtttcctgggctcggcgagcctgggagaggttgaaaaaggcgccctgagctgcaggaaacgggccgccctggggcccgagtggctaccgcgcggtctgttcgcgggtgagcgccccgggaggagctcggcgggacacctgtacttgccccacctcgctgcggccgggacttgaatcgagggacggcgtgacaggcgggactaaaggcaggatgtagtggcttcctgtgagcaggtctcaaaacacaatcacccagcccgcactcagcccgcttaattcccttccttctcatgcgtgtaattgctactttagtgagcgagcctaccagttgactaaatacgaaattttgctcagagttgtccgagcattactgtggacagattatttgagttctgtcatttgaacattttagttttaaaaacgaccttttggtgtcaggttgccattttttttttcacagtggtttatttagatgaagtgctttttgttttctgtttgtaagagagatcaataacatttatttttgcatttgtcgaaaattagcattattttcttcatgcagtattctcagattggaaacatgcttcatgtttcttataaataaccctcaattatgagggcgtacttttcactttgaagaaaattgacttgcattaaagtggctaacaattctttcctgggcaggatgtaaaattttcctctcctctaataccagtactgttgagctcacattctcccacttttcctcttttcaggtggttcacgtatttgggattttatgaaacctcagaagcagacatgttaacttttcttatctttttattccctgaggtagtcctggggctcttaagagattacagttcttaaaacctggaaagtgacaccagagaggtagatcttagttcccaaaattaaagttactttctagggcataaaaccttttcagaattcagattaaattttatttattttttcttttttctgtaaccttatatttgaggggaaaattttattttcaacttttgcatatatctaatttaacatttgggaaaactgtaaatgggccaaagtttctccctttatatgattttccagatttttaccactttcttagtgccacttgatgctaggcattgtctattggagactcactggtacgtaactgcaggttttaccatggaactacatatacacatgtcttggaattgagggttagggtttccagaaggacttagttgtcctgtgcttttgtctgccccatgccaaagaccactaagaacagttttgtaagtgaaacttgggtctacacgttaaaaaaaagaaaaacaaaaaaccactttgtttctatggtttaaagcaaccctggcttggaaattgatcatccagctgctgggaatgatattactgctttaaccacagttgaagtattctatctgttatcctagtcagtttcttgctttttaaattgcttatcttatagctcaggttatggagtgtctgctttctagaaaaaaaaaatgtatttgtatacttatatacagaagctctcttcccatttctttgtcctccttttaaatgatgtaatccacagttggttgacattcagaaccttgtgaagagatgctgttttctgtttccctgaaactaacatgtgggttttgtagggtggggactgaggggttggaagagtcattagcaggtgtcaaggtcacagaaatgagatggtggtggttctgacaagatattaagcagcttggggagggtgtaaccgtgtcagcttttctcttcaccacagtaggaaaccttggaagaaagcctgatagtgcccactaggagatgtgctggcagattttatactactgattgagagcctcttttctggagagttagagatctgtaggggctgaaaattagcctgaagaaattttcttatttctggacttgcataggacttttaaactgcacatcaccccagtgaaaagtgaggatggattggtttatgtatcttgaatgttcaagagataatagtccataaccttctttagggatttcattcctgtaattatttccccttatacttcacaaggtgaaatatctgtcagttggacagatatttgtctcttggacaagaggaaacttaacaaaaagtggtaaccaaaaaggtggaggtcacaaaataacaacatgagacctcaatatatataaaggatgaagccccaataccccttttttgcttgagtgtacttttttttttttttttgccggggggctggggaggagggaagaagggacatgcaaatatgtttcaggtgttttatatgcgctcaaacgaacccagggaattcgagatccatctataagacaaaatattgtcagcaaccctggatttgctgcagtttgcgctaggaaaccatgacagttctgaattgtctgcttccttaaactttttcaagaggtgagtttggttgtttgatatcctaaggttgtcatatgaacccttgataaaggaaattaggggtgtactcgactccattcttcggtctgcactcctgtgtagcgagtagcaagtatgctagaacacctgaaacacatttgcatgctccctcctcccctcaaaaaaaaaaaaaaaaaaaaaaccgtattcaaacagaaaagagggattggggcttcctcctttatgtatcttcaggcttcatgctgttatttggtgacctcctttttgattagcacttgttaagtttcctcttatccaattacattagattgtaaaaatgttgcggagagcacccatgccaccatatgtgtgggcttatctactcaaggaataccagatcaataagagagccaaatgggaaaattttgtgtgaattttcagatgtgtggtacagtgcgagatctgtgggactatgtgttccaaaactcacttagtttctctggtgtcttcagaccaagaatagcctagggttatttgacagagtagggaagatctatagggtatggttaagtgcttgagcttagaggctgggtgaaaaagttagttacctgggtttgaatcttcacctaatttccaacttttgttaatgtctttgggccttcatattctcatatataaaatggggatagtaaaaatacctatctcacgggttgttatgaggtttaaataagcctccctccctactctgcccctcctcatctctgcctgctctttctcactccccaggatctgggtcatacaccgaccatctcttaggaaggagtaaagtaggagataaaaactaatcttcatctgatgttcttgtccaacgtatactggagtttccaggtgtacaaagctgattaaaatctgaagacctatattcttctttaaacgttgttaattaatcttcatatggcgttagccagctcacttatcttgaagcttaccttccgcatcttttaaatgggaatgatgcttttccactatccattgtatacaggttgttccctctgcttgggattgtctttcttctttactccaccccatctttatgtcaggaagctcctactcatccctcaaaagcctgctctatgtgatctccttcccaaaaccttctgagacacttccagtgccatctctggccagcatctctgctgctggggaacacaattccttgctcatttccttattatagcacatttcatagaaatcatttgttcacttctcctgttagattgtgagctctttcaagatagaattgattcttgttcatttttaaaaaatcatcccagtgtcagcacaatgcctagaacagaataggcctttagaatatgccctacctcacaatgttatcctgtggataattactagatatgaaaggattttataaattatatacctaaaaaaactagaaggtgttagtattaagagaaaactgtatgagtctgcatcaggaagttcatccctttcaaaatcacagtgcccactaagcttaggtttgaattgatgccaaagttgccttgttaggaaaaagattaaatttttcttaatgctctgattacttattattagggcatttgaatattgttactaattggtcctggagcttggaaaagaaaatctcatattcatactttacacattaagtgttttaatttgacatgacaggtttgaataaaaccgtctatttaattctgtgaagtataaatgaaaacattttattgactatccagtaaagttgagtggaagagattaaaaagggtgtattcatgctaagagttcatttttatcagatatttgaaatgagatgatgagttatttaggatggaggaagaatccatctttcagatggatagaaactggggagaaaagggttctttgtaaaagttcacagagcagtctgctaatcatttgctctgtggaagacgggaggtaaacctcagtgagttcatagagttgtttttttaaaacttagaactctttgaatagatccttaagtgactaatatagccagaataaaaccatcattttatcctttaatcatagctgctaatcctatttccttgttaatgtgctttatgaaattatttgacaataatatcagattacatgtttttgctactaataaagttctattctcttttgagaactgcaaacaaaatgttgtatagtcatatattcatgtaagttaagctttttatgtgtattaagacatttttatggcatctctttaggtttgtatgtaattttagttatcaaaaacccctatctaaagtgataaacattaaaagtttgtatcagtacacatacagagaaccataaatgacaaatttgttttcctgtcattaatgacaatgactttgggcaaattctttaaccttgctgagcccgtatttccttacttgtaaaattagaggtttggatatggtctttaacatcccttctaccattttgattattgctttttaacttgaaccatttgctttaaggcagtacatcagatgctttattttagtgtttaaatgtatttagtacacttgttttgcatgattcactgttttaaaaatatttaagatttattagataagagcgtttgaattctaaattttttttctgtgactgttaattaattcagcagcacgtaatacatatcgaagggtctgttaagagacgctaacccactggactgaaatgggcctaagctgtgaatcggatgaaagatcctattttatcctaaagtctatactaagcaatagctgtttttagacatctgtattcttagacaattatagaaatttaaagctggaaggtagagaacatgaaggtagagaaaataaaggttcttacccttcattttacaaatgaagaatctaacagagacagcaagtgtcacacagttgatggcctgttcggcactagtccactattatcaaagttctttctagaatgctatatgagattaacttattactatgaatgttgcaaatgtactacatttaatacacagagattatactacttatctgtttatatattgagaggtggtaagattttcactgtgccgtctacacactcttaactgttccttcttaagaactttgtgaagtggttaggattagtgatgaaactatggttatgacctaggtggagattgaacctggatgtttagttacttgtgccatggtctacctcagctattttcagttctgactgtctgtcaccatcacctgtgaactaaaaaaattatgatgcccagactgtaccccagacctactaagtcagaatttctggtttcaaaagttccatagggggtgatgttgggcagctaggatagtgaatttctgcttttgtcacaaatagattagccacataccctacctaaatgatggcaacctgctgtgctatcatttaaaaggtatcagtagaaaggttggtatagttacagtgagattttagtttgtttgcatatatatttgatgtattaattctatttgattagataatatgaacacttggtacaaaattcaagaggtacaaaacagtatatacattgaaaagtattccttcctttcattatcttctagccattccctcccaagaagcaagcattaccaatttgttatatcctttttgttgtgtgttcttccagaaattaagcatttacaaacataaatttatgtgcactaatatattccttccaccaacatacaaattatagcaaaatatatacatttttctgtatcttgcttttttacacttaacaacatagcttgaagattttttcacattcacataaagagagatctgccttattttttaaacaactgcataatatttcatcatttggctgtaccacagtttatttagccagtcccctattagttgacacttaggttgtaaacagtcattgctattacagacattactacaatgaataaccttgtaagcatgtcatttttaatatgagtgtctttttgtaggatacatttctagatagatgttaaattgatgaattgaaggatatgtgcatttttattttggaaagacaatgctaaactatagcaatttaagctctcaccagcaatgtatgactgcctatttctttatacccacgtagggtgtattttaaaacttcttaatctttactggtctatgaaataaaaaggaacatttaatttgtagttttaatttgcacttttaaatgagagtgaggattgctctgtcaccagggcacgatcttggctcactgcaacctccgcctcccgggttcaagcgattctcctgcctcagcctcccgagtagctgggattacaggcatgtgccaccacgcccagctaatttttgtatttttggtagagacggggtttcaccatgttggccaggatggtctcgatctcctgatctcgtgatctgcctgcttcagcctcccaaagtgctgggattacagccgtgaaccactgcgcctggccctaatttttaaattttaaatttttctaaggcttgaaattaagttataggatctcttcatatttttaagagccattttttttgatgtgctatgtgaactggtctatttcttttgtccttttttttctggtgagttacagtcttcttgatttgtgagaaaatgctttatgctgtaaggaagttagctattattttaaaacctgtgcaaagatttaaaaaatctgtatactttggctgatgcctgaatttattcttaagttgattgtgagatccagtgagggcagtcagttgtaagtttcatctacttatataacgtctgatggttgagaaattgagaaagaactgcttgaggaaaggtaagtgaagacttataaacaaaagttaaaagacaatagattgggagaaaatatttgcagtgtatccttcagacaaaggaaatgtgtataacactgaattctttgccaggcactgttttaaagcactttatgcgtattaactaatttaatccttacagtaactctaaaaataccattattatccccattttacacattatgaggaaacagatacacaatagctaagctaagtaaattgaccaaggttagatggctggtgaatggtggagctatcaatcagactgggcagattggctctagagtccatcctgttaactcttaacctactgtgctattatgcctctctatttattatgtccagattatataaataattcatacagacttaaaaacaagaggccattagaaaaataaaggatacgaataggcatctcacaggaaaggaaatacaaatgtccagtaaacatgaaaatattggtaaagtaaaaattaatcagggaaataaaattttaaaacatcaatttacaaaaaaaggaaagtttatctcagtctttggtgagggtttagggaaataagtattttcctcattgttgttgtgagtttaaattgataaagcaatgttggagagcattttggctatatctgttaagaatttaaatgtctatacaccatgcatttttacttctacctatttgccctgcatcaacagttgtacatttagagaagaggcatatacaaagatattcaatgttgccttgttggtaaaacagaataattggagacgacttaaatgtacatcggtaggaaaatggataatatgttcatacacgtattctatagcaactaaaaagaatgaggtatatctatgttatgaaaggaaagaactccaggatgtcttgttgggtaaaaacagcaagttgtagaataatatgtgtagtatcctgtgtattgttttaaatctcaaaacattttacttttctgcatgtagatggataaatacataaaaagaggtctgaacagttgtacagataacagtgattgcctcaatggtggataaagggagttagccggtgctgggaaaactggctaggcatgtgtagaaagctgaaactggaacccttccttacaccttgtacaaaaattaattcaagatggattaaagacttaaatgttagacctaaaaccgtaaaaaccctagaagaaaacctaggcaataccattcaggacataggcatgggcaaggacttcatgtctaaaacaccaaaagcaatggcaacaaaagccaaaattgacaaatgggatctcattaaactaaagagcttctgcacagcaaaaaaaactaccatcagagtgaacaggcaacctacagaatgggagaaaaattttgcaatctactcatctgacaaagggttaatatccagaatctacaaagaactcaaacaaatttacaagaaaaaaacaaccccatgaaaaagtgggtgaaggatatgaacagacacttctcaaaagaagacatttatgcagccaacagacatatgaaataatggttatcatcactggccatcagagaaatgnnnnnnnnnnnnnnnnnnnnnnnnnnnnnnnnnnnnnnnnnnnnnnnnnnnnnnnnnnnnnnnnnnnnnnnnnnnnnnnnnnnnnnnnnnnnnnnnnnnnnnnnnnnnnnnnnnnnnnnnnnnnnnnnnnnnnnnnnnnnnnnnnnnnnnnnnnnnnnnnnnnnnnnnnnnnnnnnnnnnnnnnnnnnnnnnnnnnnnnnnnnnnnnnnnnnnnnnnnnnnnnnnnnnnnnnnnnnnnnnnnnnnnnnnnnnnnnnnnnnnnnnnnnnnnnnnnnnnnnnnnnnnnnnnnnnnnnnnnnnnnnnnnnnnnnnnnnnnnnnnnnnnnnnnnnnnnnnnnnnnnnnnnnnnnnnnnnnnnnnnnnnnnnnnnnnnnnnnnnnnnnnnnnnnnnnnnnnnnnnnnnnnnnnnnnnnnnnnnnnnnnnnnnnnnnnnnnnnnnnnnnnnnnnnnnnnnnnnnnnnnnnnnnnnnnnnnnnnnnnnnnnnnnnnnnnnnnnnnnnnnnnnnnnnnnnnnnnnnnnnnnnnnnnnnnnnnnnnnnnnnnnnnnnnnnnnnnnnnnnnnnnnnnnnnnnnnnnnnnnnnnnnnnnnnnnnnnnnnnnnnnnnnnnnnnnnnnnnnnnnnnnnnnnnnnnnnnnnnnnnnnnnnnnnnnnnnnnnnnnnnnnnnnnnnnnnnnnnnnnnnnnnnnnnnnnnnnnnnnnnnnnnnnnnnnnnnnnnnnnnnnnnnnnnnnnnnnnnnnnnnnnnnnnnnnnnnnnnnnnnnnnnnnnnnnnnnnnnnnnnnnnnnnnnnnnnnnnnnnnnnnnnnnnnnnnnnnnnnnnnnnnnnnnnnnnnnnnnnnnnnnnnnnnnnnnnnnnnnnnnnnnnnnnnnnnnnnnnnnnnnnnnnnnnnnnnnnnnnnnnnnnnnnnnnnnnnnnnnnnnnnnnnnnnnnnnnnnnnnnnnnnnnnnnnnnnnnnnnnncctatagggagtatatttatatattatattatcaaaagtaactatttatataaatgaacttgatacagtattaatcttaagctgtgccagtctctgttgctctactttggaagactatcctatctgcaaaacaagagtaatcaaatgttaggttttgtaacattttgagtgctatagaagaaataaagtcaacttttctgttaagtttttttggtaacttttgatataatttcaaacttacaaattgtaagaataggctgaggagggtggatggcttgagctcaggagtttgagaccagcctgggccacatggcaaaactccgtttctacaaacgaaaaaaaaaaaaaaatgccaggcatagtggtgtgtgtcttcagccctagctattaatacttggaatgctgaggccagagaatcacttgagcccaggaggttgaggctgcggtgagctgaggtcgcaccactgcactccagcctgggtgacaaagtgagaccctgtctcaaaaaaaaaaaaaaagtagaaataatacagcaaattcttatatactttgcctgtttgactaattgtttatgttagaaaaactttttaaaattttaatacattgtttcagagaaatgtggtaaaaagggtctgaaaattttggatcctttaaaatatgacatttgtgtgagtggtacagaattttagttttgaattttacagttttatataaaatattcttggtagatggggtgaactaatgtttattgagtatttcctggtttccagatgttgtgttaggatactttgcaaaatatttcatgtaatccaatttcatgaagaagattgttattcctattttagagaagaagcaacagacagaggttatttgctcaggattgtaagggagcagagccaagttttcagaaagtctttatgttaccaaagcccacatccctttctctacaaagctgcctgtgagatgatatattggaaggaattgatgaatacatttatgttgtcaagaagttgataattactcctaaattggctatggtctaatgtagtggatattcaataaaattatgatgtttgaatgccataagaatttatcttctggcctgttttgggggttcatgaatgtaattattttagctgcctaactgcttatgtgggtttgtatgtacttttgagtggttcttggatatgtgtacacacatacatacacacacacagatatacacatacacacctttatatgctcatgggtgtaacttctttatgtgtctaggtgtcttttttttgtggagggggggcgaagatcaatatgaatcctattttggccccctggatgctgtcaccagaaataacagccatatcccatatatagcctgtccatgtagccctgagttctgccagcacctggctttttgccttccttttgtttgtcataccaggctctcttggtcaccttggtagccttgctaagcttcttgtagctataggtaccattggcttagcccagaagagattcctgccatatgtacttcagagtttggtttgccacttgaggaaggggtctgtagggagcttgtagatcagcacacattcaaaactgaaaccggaagtgggcaaggcaaaccacaggaagatcctgcccgcaacttggtgacgtatctatataacccatagacacttcctggcaataccttgtgaaacttgccttttcgtgtatagtagtttcctaacttcttgttctagattaagcttcagtgaaaagtgattaatatgatagcagtgtagataactgtatgatagttattgtgcacatgacttccatgcagcaactagccccgattatgttctgtagactttatcactgaggagttgcagtggtatttatgcgtttactttgactttgtcttgtcactagccattgtcttacttatgtgtaattgtacttatatatagttcaggttttatacccacaaaaacccttgtgatataataccactatacaggattgccttatttatgtggaattgtacttatatatagttcaggttttatagccacacacacacacacgaaaaaacagttctttgcttcactgagtctcggctagccacccaaactgtgtcatattcctagagtcctgtgcccactcaagtgtttgctcactggtactacctcattttatcatagtgccttgttcttaggcagaaccagatttctggtaggagttatttaatgtgttgattttttttttgagacggagtctccctctgtcaccaggctggagtgcagtggtgcgatctcagctcactgcaacctccacctcccaggttcgacaattctcctgcctcagcctcccgattagctgggactgcaggtgcacgccaccacatccagctaatttttgtgtttttagtagaggcggcatttcgccatgttagccaggatggtctcgatctcctgacccgcccacctcggcctcccaaagtgctgggattacaggcatgagccaccgtgcctggccaatgtgttgtttttttaaagattaccaatcgagtgggattatagactcttggattattttacagatacaagtcatttgccaggagtgaggaaaattgcttgacaactgagttatctcaccatgttaatttatgcattggaaaactctgcttagtggtagatattccagcagtcaccatatgcctattggtactatttctcattctctgtctgattaatgtcacaaatgtgtaactttccagtggtgttttcaagatgacagttaaggagccactaaggaaggaaataacagctacataacttttttcttttcagtagttcttgacagtcccccctcctttttttgtttttgtttcttcataccctgcagcaatctgatgtactctgaagggggtaaatttgagactctttggaaggtcatgtgtgataaagacagttcttctcttcctttctccattcagaactgttaaagataaatcaatgggagtgtttttttcttgtgtaagatttattatatacaaaatattttttaagtgtgtgaaaactgattaaatgataaaggctaaggtagcatgtttaaagcatggttttctgctacttttctactaatcacttaacctctctgagcctcagcttccttgtctacaaattaggaatagtagttttactaatcatatagcatagttgtgaaaaggttaaatgactcggtatactgcctggcattttgtgctcagttaagtgttggttctaacatgagcagtagtgatactcataaagtatcttttcatagttttcttaatggataacttatttgatagaaatgtactggagtattcatacttacatgtatatccagttcttgtagtgttcatcaggttaaactggcaataagtgttaatatctgaaagcattagaaatcagtgttactctgtgctttttaaatttcaagtgttgtctctcagattttatttttttattttttattttttttgtctctcagattttagagctatagagaacctagaagattaactggctaaggagttgcaaactcaaatatacacagaccaggtataatgcagtaaagcccagcagagattattatgatttagtaagatacacctgtctgcagtttccactcaaaatcattttgccagattttgattattaaagagaaaccagaaatacaaatttatttattgttagctctcagtttctagatggtcacaaattattttttaaatttggtgcaggccaaacaaatctctggctagccaacctcagatttgtatcctcattttagagatgtggagcttgaggtataaaggttggacgtgtttccatgtatttcctataatagaaatccattgattctgtaacaaaggactcattttaaacaatgacctcctctgttatacccagttgttatattacaggttatttttggtcaggagctaatggcttggatgaagggaattgtatatagatgctaatttttaagaatgtctagccaagaaagggcactaatagttactatccattgaatatttactctgtcttaggcattgtgccaagcgctttaccttagttaatgctcacaacaatcttgaagcattatagttacctctttttacataagaggttgagagtaaggacatacagatagttaaatgcaaagttcatgttgaaacgcagatgtctgcctctgtaatgcattcatttaacttgctatactatactagtactgtatatgtttttataattatgcataccttttatcatattgcaaaaattgaaattaaactttagaagaaaatttcaaagaccttatgatatattaccattatatagggttgtcttatttatatggaattagattggcacaacagcattttaattttactctaaactagtcaataccagagactatatcatatttttaaatgtgcattagattcattctttctcactcttttttttttgttgttgttgtgaatgtaaatgacaaaatgtgcatattttatatcttttcatctcctgaagttctactgttctgtttaggttgatatttctattactggttgagcattccaaatttcaaagtccaaaattccaaatgctccaggatgcaaaactgagcaccaacatgattctcaaaggaaatactcattggagcatttcagattttcagatttgggatgcacaactggtaagtatatataatgcaacatttcaaaatgtaaaaacatttgaaatctgaaatacttctggtcctaagcatttcagataagggatattcgatctgtattagaacattatgtcctgagtcattcaagccagttaatgccaaattctgtggattctgtctccatagtagctcttctattttttctttcctcctatctccctttgttaccttaatgtaggctcttcagactatcagagtacttttcctgaagtatgaaccacacagaaacttttagcgacccttgttgcctactgaataaagttaaaccttagcttggcattttaggttctctgtttgatactagctgtcctttataatcttttccctctcattcccccttcatctctctttatgctttagtcagtttatactattcactgcctcctcgatggtgctcttcttgttgccaccctccagaacttgttcatgttatgccttcctcctggaacgttatcctccgatccccaatttctgtattttgaaaatatatatcattcagaagagttattgtgaagattaagtaaaataatatatatgaagtcaatgaaaaatctgtgtaatacatgtattaatttattcagtaagtggtagctattattatgatttggctttctgtcaccccaaataatccttaactttggatcatcttgtccaggaccctggctctttgcagtttttctaggggattaatcccactgggacccatgttggcgcctacccttgtacttcaggtaacctttgaagcagacctggacctactacatctctttcagatgggaatagtttctcagcacagctgtattcagaaagaccttaagagttgaatagaaagactctaggctttggagtttgatttatgccagataaccttaccagctatgtaactgaatttttttttcttaatttatgaaagggaatagtaatgcttatctcacagggttgtcgtaccgatcaaatgaaacatttgagaaaatatttaacactgtcttggagcatctaactacttaataaatctttatcttcttttctgtcttatccctgtagtgtcctcccctaggacatgaagaaacatacatgcaaaccttcaggtataaatgcatgcacataatcctcaaacatccacataggcacataggtacatactcacatatgtacatactcacatacatgaacagaagcatatacatcagaatctctacctttgatagtagcctgatattggaatttttgtcctagataaaatttatatggtaggatttgaatttactgtctgatgactgttacatggaatcattgatcttgtacatagagagttggctgtttttccatttctgttaatcttaacagttttgatttgatggtgtttatctttcgcgctttaaactatttactttttaacaatatctaaaagctgctgttttctatagttacatgtctctcctcttttttcaggtatttatgcagaagttactttctcaatgaagccttccttgagctacctcatttcttgtggtgcccatacttattagtattaggccatacatttttacttatttatcttatttgttgtcgatctctccatgtgtgttagcctaataaggacacagactttttgtctgttttgctcactgtcatatcctagcagcttagtaggtactcagtaaatatttgaatgtgtgaacttcagcactggtttattttcaaaacgtctctgtattaatacaataaagattctttaagtgcttttggtaactgtatacaggagactttttaaaaaatctttggagtagttgacataaatcaacttaaatgaaatggaaaaaagaagtttacatacaattttatggtttgtgatgtggtattggaacctcttttttgcccatgccaaagttatatacacacgcattgatacttattcagcagctgtttcattatatattttatgctaaggatggtgctaagaattggtccccttcctcaagaagtttatagttcagtgaagagacaaccaaactgcttttgcttggttgtgtctcatctttaccacctcaaaacattagagagccctgaggctcagtcttcaaatttcttttctatatttgctcccattgtgattttgtattgtctcttggttttgtaaattttatgtacttactgatgattctcaaattttttctctatctaggaccctttgtccttggacagattgtctgcacttggatgtataaggcatctcagatttaatattcaatacagtctcttgaatttggtccccaacaagaggctgtgtctctagaaatagcatctctattcatccagctgctcagactaagactcttagaagtcattcttgactactctatttctcacaccctgcagtaaatcctgttggctccatcttcaaaatacatgcccaaatgacccattctctccagacccgtgtctgctctgcccctcccctgacctgcaagttttcgctcattgagattactacagtagcctcctatctagtcacctgcttctacctttcccctctgcactgattttaaaacaaaaaatcttgccatttttatgctgaaaatccttcaaaaccttaccatctgacacacaaaaaaagcctaagactttcccgtgcctgtaagaccttatttaacctgtctcctcccatacccttactccatctcttactatctcctccctctccccactttgcttattgctttgtagccatactgccctccttgccactcctccagtgtgccaaactatcctgtctcagggcctttgcacattttattctttctgcctgtccgtctccttccccagatatctgtatggcttataccctcaatgacttccttcaggtatctgcttaaatattttaattgaaaggccttccctgcttccctatataaaataacattgacctcctccctgtctctaccctctgggcctgccattccctaactctcttaacctgctttgttttcttgaatagcaataaatatttatttcttccatgacaataaatactatatgcttatttaagagtttgtggtatttgtcgtccctgtatatattgtacaacagtttcgtatgggcagagacctgtttttattcactgttatatccccagcacttagaacagtgcctcgtgtgtttaggcacttagtaaatatttgttgagtgaaatgcaacaagtacaaaacaatatgatcactgtagtagagatgcaaggtacagtagaaacacatgggaaagagtgacatgactacataggaattgaggaagactttgcaaagatgcccttaagcagagctctttggagagaaaaacaggtagggcatttcatacaaagaaaatagcattgcagatacacagaggaatgagagaacagtgtgttcaaggaactaaaatatagtactgctacagcataatttgtgggggtaaagatgaactagatgaggttgaacatgtagtagatagcacctgatcatggagggatggagggtttttgtgccagactaaggaattttagattttgtcctgtcaagtgggcagtggtagatagtgtgagccattgaagacttctaagcaagggatgttttatttatatttatttatacgtgtctctgtgtttgtgtgtgtgtgtgtgtgtacgtattaaaaaggtaactagcaacattgtgaaggttgagtatcaaagctaaacacagcattttatttaagatatgtatgatttaggaagatatgatgtagaaaaacaattactatcacatgtgggcgagaggatatttcattttatatttggacaaaatcatggatgtatagtgggaagatgttcttggcatacttgcagtacatttgtgaaagagaagaaatgcacaatggaggattattctgtttgtctttgaaaatccaccctttaagaaagaagactttaaaaaattagttaacagttatgttgtaagtcgtaatgtacactagaaaagtgcttaaggagtaccagttatgaatcaacaagaaaagatgttacagaataaaataaattgtgcttgaatgtcaacctcctttcttcgtagaggaacagttggttgtcattgatatacctcctgatcttgatttattgttgaaggaaatagtgacagttgtacacacaatcaaatctatactgtttgctgtgggaacaatgtatctgcctttgtaggacaaatgtctgcttttgcatattgcaggactccgcatgcacagaatttttgaaatgagggatgaactataaaaacatttcttcctttcattcaaatgcaagtaaaaaccatttttattatttcagctggcttgcttgtgtcatatcttagcaatatattgaatttcttgaatactttattcttattaatttagggtcaaactatgatttgtgaatttaaggataaaatagaggcacccaaaatggtgcacacgatttgaatgttaagaatttggatttggcactcccagccaggcatggtagctcacgcctataatcccagcactttgggaggccaaggcaggcagatctcttgaacccaggagttcaagaccagcctgggcaacatggcaaaaccctgcctctccataaaatacaaagcaaattagtcaggcatggtggtatgtgtctgtagtcccagctactcgggaggctgaggtgacagaatcacgtgagtccaggaaggcgaggctgcagtgagccatgattgtgccactgcactccagcgtgggcgacagagcgagaccctgtctcaaaaaaaaaaaaaaaaagaaaaagaaaaaagaatttggcattccaaattcatgaaaatatgaatactgtattattgaatatatttttaaaattttatccaaatgctacagaagatgaagaaatattttgtgaaggtagatacaactatatatggagttaagatccatttcccaagttaaaggattccctttttaagtgtgctgctattcaactcactatctgatggaacaatgaaaataattttcagtgaaaaattgcttggtaatttctgtgtccatgtttgatccagatagccacgtgtagccggtggatttacccaaccatgatgaccagtaactcaaagtgggattttctaatttgttggaaacaaaggttagaaaagaattgagattaggtgacagcatcaactctagttagtttaagcagaaagagctttaataaaaaaattttaagtggcttacaaaattgttgacaaggctgaagaaacagactctagatctagaaaaagccatgttgcatctaggccaccaagagagttattgcctcttttaggatcagaaagacttttgcagaattgtgaaactgtaacttttagatgcctgtcttagaaccttaccacctctgccatgatcaggagtctactactgttaggaaatagccattagcaagcagccaccttcctcagtaagccgttgttgttgctggccctagagccaagccctgcctaccacaacctgtactgcagaatggatgccttgtgcctttcttaatattcatgaaatctgtgactgaatactaggacttcaacaaatactgctgtgaacatgaacatctccatgacaatgtttgctagtaaaacaacccaaactcaacctcccttctcttctgtccttgaaatttctagtgagtgcatctggttggtggaacttaaatcacatttacaactgtagccacaagagaggctgggaaatgtattttttaactttctcttctctgcagcacaggaagacatacactgaaggaggttgaaatggatgtgaacagtaatctaccatatttactgcaggtttagaacctggttctccttaaggctggctgtcattaaacgggctatagataagttgagaaagtttataaataataccgtcaaacaatgttgagaaactcatttgtttctttgtatatttttattgttttataatgactacattaaaaaaaaaactagaatttgtccttcacctctatgatgaattaagtggtctgtggataccgaaagtttcctcacgtttaagatgtggttagtggataaaaagaccaaaagagggagtataagaaaaaccctcatacaaggttacctgagctgaggaaaggttagtgttgtcaaataatgaagagtggtcaaataaggtgggactgaaaagcagtgttacgatttgggcacttaatattagtggttttttgggttttttttttctttctttactattgagacagggtcttgctcttttgtcccaggctggagtgcagtggcagctcactgcaactcccatcccctgggctcaagccatcctcacacctcagcctcccaagtagctgggaccacaggcatgcaccaccacgcctggctaattttttgtatttttagtagagatgagatctcaccatgttgccaaggctggtttcaaaatcctgttctcaagcagtttgcccaccttggcctcccaaagtgttgggattacaggcatgaccactgcgcccagcctgttagtgttcttcaaggttctaaacaagaagtagagaagtaggataagagggcaagttgcaggtttaggctgtgagttgaagggagcacttgaaaggagagattatagaataagttttcaagaaatttggcaatggattttttttttttttggtccaaggcgcatgctcatttatataccagaattggctagagttcatgaggccctgaacaaatatcacacacaagcaagtacagtcttccaaagttcttcacttttgtctttttgtgtagcttgatgtaaagtgtggctcttaacatattctctttatgcttagagatataataggcacaatattacttttattatatctgtaaccattacttcctttttgattatgttgtttataaagtgccaattaatcactactatagtttggagttacagtatctgacttaacatatttgtacaattgattgttgagccgggcattgattagatgaattaactttcaacaaagtttatttgaacttcagtcattggtggatatttaagaagtacagattatgataactgcttttataggaaaggatgcttggtacattttttcatatgacatagatcttacatttttatttattctggataaatatctgataatgtcaggttcattggattcttcaaaataacctcattgtctctctcttaagagggagagggaagtagaatatgtgtaaatttatataatgttgttttctcaaaactgcacctatgtgaatgaaacagaaacatgttcagggacagttagtgtttcaaattctcccaattagatatggagcatatttattatggagcatatttattaagtagaaaattattatggtctaattccaaattttttatattttaggtcctatattgcgacctagttggactttcgtttaaaaaaaagtctaaattatgcagaagggagacgtcaaagaaaaaggagagactgaagaacaagaaggctgaaagtaatgaaaatagaattgctagacagtgtcctggagggacaagagggaatggggtagagagagcacaggtaaatggatgagctttggatgagaagaggaataactagtctttggaggaagaggaaaatggatgaataccggttcagatatagattatttgtcttagtgacctggtttatttgtaaggactaacccattttaggcagttaattaaattaatcatttaaaaggtgagattcctcaattctgacttgagatggacctaaatttgtttattctgtttaagtagtaactttatttttttagtgacagatttaagaagtatcttactggtactattccattggttttcttattttaattttataaataatgtgtttactgagtttttttataggtgcttcttaggtttctaatagacttctctaaaatatattggtttaaatggcctttaaagttgataagcagaaagatacttgagtttatctagtccaaaccttcatcaggaaagctgtgattgagtgatttgtctgaagtcatacagccacttagtagcagagtaagagaggaatattggttttatggttcttggggtaatgctgtttcccttatgccaactgattgcataagggaactagtgtactgatttcagcgcccatacttgtgtatgtcctttgagctagagtatcaaaggacttcaaaacttcaaaactagactttttaggttatttaatattccttcaacaaatgtttctcagctgtctaccgtatgacagtcactgtttaagatcttgaagatcaacaagttcttgggcctcaagaatgagggaaccaaaaaataaacactgaattaaaaatgaacagaaatttagataatcatcagtgctatcaaagaaacaaaatggagaaatagaatatggtagcagaactatgtgctttagatagaatagtcaaggaagatttctctgagttagtgatatttgagctgagactgaatgataaggcactcgccattgaagatatctaggagtgtagcattccagacaaaagccctaaacttgaacatggtgtggcacagttgatgaatgaaaaaaactaaacactgaccggggttgggggaatggaaggagaagagatcagagagaccattaagtagggctttgtagactgtggtatagaaagataattttattctaagtgaaatggtgtggtattggaggaggagagtgagtgagtaacctaaagaatatgtttcaaatatcacactgcttgatggagaatggattgtaggagggccaaaagtggaagcaggggcaccagttaggcaactctcatgtttgttcgaataaaagattgtggtggcttggactcggtgattctggtcaaggcaaagagaactggttggatttgggatttattttggaggtctgctggatttgctaagagactgggtatgggagtttggggaaatagaggatggtgagagtaagagagaaaaatggtagactggggaaagggcacatcttggggaaagaaatcagatggtttttctgggacttgttaaatttgaaatgcctactggatatccaaggagacagttaaatagtcacatctagtgtttgttgaggagaggttagacctggtgttgcagatctgggaggcgttcgcattaacaccatatactgcagagttggcaaagagaaggaagagaaggtggtttggaattgaggcattgcatgtttagaggtagccagggggagaagtcagcagagagccagtgacgtaggagaaaagtcagaaatactgtgttgtggaagccaagagaagagagcattttaaagagggatatttatgttcacttgggttaaatcatgctgccaggccgggtatgatgaaaacagagaagtgaccgttgatttggcaatgtggaaggcattagtgtcctcagctagagcagttttagtggcatggtggggtcagaagctgattggagagggttgaagaatgaatggaaggtaagaagagacaacgactagagatgatgcttttaagaagttttttttccttttctttttgtgtgtttttttaagttgagaaattcccatcatcgtttatatgctgatgggaatgatcgctagagaggaaaattaatggtgatttgggaaagaaagattaattgtggagtaaagtccttgaggtagcactggtggaatgggatagagagcacaagtagagggattaccctttcataggagtggggatgcaattacgtaatataaaaaagggacctcaagccactttacacacagcccctcccttcagtcttaacaatctcctttagaccagcttgatctttctgtaatcactagtgtttttttttttttctgtgccacattaatatgttctttcagattgaagtcatcctatataaggcttagtatgaagcagttgatgatatttaataacaattttaaattttatgccaacaggtgaagcaaaaaatttattgccatatcttggaccccacaaaatgagagattgtttctgtaccataaatttggaccaggaagaagtttatcgtacccaagttgtggaaaaatctttaaggttggtagaaaaaattggtaaattataatttttactatatagattggtaaatattatgcattttccagattataataatcaagaagacaagacagaaacagtgcttgctttcatgtggcttttcattgcctcaaaatgtatcttcctcttaattgttcctaattttatctttgttttctggagaaaagttttttcacatgacaggctaaatattgcctattcgtttgaactttcctcaaagtacatctttattttatttatctaaagaataagttacttaaagttcatagaagttgcttaacttagtagtgcattatcagggaatgaattctcagatagatgtctcatctttgaaagtgtaattgccctttgagagtatcatattaaattctaattcataaaactggaatataccacctctgcaccgtagcaatgtgaacataattctagtgcagagttgtgctgagaatcttgttcagagacaaaagtcaaaataaggaggccgggcgtggtggctcacgcttgtaatcccagcactttgggaggcagacgcgggcagatcacttgaggtcagaatttcgagaccagcttgggcaacatggtgaaaccccgtctctacgaaaaatacaaaaattagttgggcgtggtgctgggtgtctgtaatctcagctacttgggaggctgaggcaggagaatcgcttgaacccaggggtcggaggttgcagtgagccaagattatgccattggactctagcctgggcaacaagagtgaaactccatctcagaaaaaaaaaaaacaacaaaaaaacaaaaaacagggtgtggggtattattggaatgagcatgtggtggatgaaatattgaatgccatgccttatctgaatcatattttaggtcagttgtattttagggatctgttttttttttttatgcctttaaaaaaatatctttcttttacatttgcctttgaagtttccctttatgtctttattttcattttttataattttaaatatctattgaattcttcttagaaaaggtattgtataaaactgaaaatacttgagtagcccaaaaacatttcaaggagtaaacttgaaatctttagtcttaattctcatattgttcttatttggctttagaatgtactttaaacataatatttgaatgtggatgtgatatataaaggaaattctgcatttataattgtttagaaaataatgcaaagagatacatacctacacatgtcttgtctttcatatcatgttttcatatcatatttgactaatagttctttttgcattgatttctatgttgaaattaattagaaggctctagttactttgtgagaccaacttttaaaagtttagtttggttacatttgaagggaaaaatatagtgacaaaagttcaccaggcattttaacaactaaaaagctgaaccaactgttttctagacaagatcagatatgacttctgtaggagtattttactttatatttcagcttctcatttagttatgacatcataaagatactgcatttcatagcgatatttctagagaatctttttgttctttaaactttctcaggaaagaggtacacttgacaaaagaaactatcatttcagagattcgcgtcttcatagaagaatcatagaaggataaatatatcaaaatggcattcttaaaatgaacttataaaaataagctttgcaacatgaggatgggcaaagatttcttgctttgaatgcaagaagcaccactaattataaaagatgaaaattggtaaattagattttatcaaacttagaggctccttttctttaaaagacactgtcaagaaaattaaatggcaagccacacctgggagaaagtattctgacaaaagacttgtatccagaatttatttaaaaacaaaaaccctgataactcaaaagaagaccgatggccatttaaaatatggggagaatacttaaacagatacttcagaaaagatatggccaagagcacatgaaaaggtattggacattgttagtcatcaggaaatcaatttaaaaccatttttgtcactatagattctagaacataatctgcagtgatagaaatcatatcactggttgcctgtaagaatatggtgggagtgattgcagagtcacaagggaactttctggggagataaaaatgttttgtatcttgattataaggtagagattacataggtgtatacatttatcatgttacattcactagaatagctaaagttaaaggctgtcagtaccaagatgtggaacaactggagcattgctgttaggggtgtaaaacagtacaaccactttgaaaacagtttgacagtttcttgtaaattacacattcacctgccttttaactcagcagttgcattctcagtaatcaaaagcatgtgtctagaaaaagctttatataagaatgttcatagcagctttacttttgatagcccaaactggaaacaactcaaataacatcactaggcgaatggatttggaatgcaatggaatactatgcagcaattaaaacagttgaactactatgtacacaacaacatcgaaaaaatctcatagacattaagctgaatgaacaaagctggacatgagtacatactatatgattctatttatgtgagattttaggatagatgtatagtgatagaaaacacatcacaggttggggcaggtatgatggggtaactgaaggagaggcataagagaactttctggggagatagcagtgtcctttattttgattggggtggaagctacacagttgtataaatttatcagaagtcatcaacctctatactttaaattggatttttattgtttgtaacttatagctcaataaaactgatttaaaaataccttgttttaattttttaaaaatattttttaaagttgattttaaaattgcatattttaattttttaaaaatagcttaatttaaaaaaaaattttgaagtagcctttcacataacattggctgttttaggtattatgtattgtaaataatacagctttacacatttctaagacaaggatggtatgaatgacactatcctcacctctcaaatggtccaccttaggtgagcatgaccccaggcagttactgtatcttctatccacaggactgctgaaaagctatttgttcagaactcatactggcaacttagatcccttcagtgttcagcttggtttgtatagaacttagttgaaatttagcattgagaattattttggggcttttcaaattcttttcaatggcattttagtccataatttcattaactttattgaaagtgatattatttggccaggaacattagctcactcctgtaatcccagtactttgggaggctgaggcgggtggatcgcaaggtcaagagattgagaccatcctggccaacatggtgaaaccccatctctactaaaaatacaaaaattagctgggcgtggtggcatgtgcctgtagtcccagctactcgggaggctgaggcaggagaatcgcttgaacctgggagctggaggttgtggtgagctgagatcacgccactggactccagcctggcaacagagcaagactctgtctcaaaaaaaaaaaaaaaaaagtgatattatcattctcagcaaactatcgcaaagacaaaaaaaccaaacaccacatgttctcactcataggtgggaactgaacaatgagaacacttggacacaggaaggggagcatcacacactggggcctgttgtggggtggggggaggggggagggatagcattaggagatatacctaatgtaaatgatgagttaatgggcgcagcacaccaacatggcacatgtatacatatgtaacaaagctgcacgttgtgcacatgtaccctagaacttaaagtataataaaatatatatatattaaaaaaagaaagtgatattatttgagtatttatacaattattattgaaagtgatattaattattatttattttatattatttgaagtaatgagctttccttttctttctagcccatttttcagtgaagaattttactttgagattccaagaactttccagtatttgtctttctatgtttatgataagaatgttttacaaagagatctccgtataggtatgtactattcataattatctttaatcacaatgttaatgtttatattcattcgttctcttagtatagttttgaaaattgcagaataatatatgctcaacatctctgatctttttctgtagactacatgttcatttgtgaaatttcatttttaatttgtatgttcagcttatatgacactttctcagggaggcctttgcagctcccctagtcactatgtcatatgtttttataattcctgatggttccctttccatggtactcattatgcttattcattagttggctgtttcatatctaggttctctagttaaatgtgaaatttaaaagggcagggactctttttttgtttttttttttgacacagaatcttgctctatctcccaggctggactgcagtggtgcgatcttggctcactgcaacctctacttcccaggttaagcgatttctcctgtctcagcctcctgagtagctgggattacaggcgtgtgccaccacgcctagccaatttttgtatttttagtagaaacagggtttcaccatgttggccaggctgatcttaaactcctgcaggaaatccacctgcctcggcctcccagagtgttaggattacaggcatgagccaccacgcctggccgggcagggactctttcttacggagcaccttacacttagtaagtgttgggtaagtatttgtttagtggttcaaataatgtttttatagaaagattgcagttttgatccttccaaagaacatctgttgttgaggtttttctaatagaagtaataattcactttaatctatttatacattttcttcctgtctgtattagtgactgtattagtccattctcacactgccataaagacatacctgagactgggtaatttataaagaatataggtttattggctcacagtttttcaggctgtacaggcttctgcttctggaaggcctcaggaaacctacatgagtgaaaggcaaaggggaagcaagcacatcttcacatggctggcaggagagaggagagttgggatgtgctacacacttttacaataaccagatctcatgagaactcactgtcatgagagcagcaaggggatgtctgcccccatgattcagtcaccttatgccaggcccctcctccaacagtgggattacagtttgccatgacattttcgtggggacacagagtcaaaccatatcggtgaccaataaatatatttctctttttttttgagacggagtgtcactctgtcgcccaggctggagttcagtggcgcgatctcagctcactgcaagctccgcctcctgggttcacgccattctcctgccacagcctcccgaatagctgggactacaggctcccaccaccacgcccgactaattttttttgtatttttagtagagacagggtttcaccatgttagccaggatggtctcgatctcctgacctcgtgatctgcccacctcggcctcccaaagtgctgggattacaggcgtcagccactgctcccggccaataaatatatttcttaaataattgtcagactagagtgtgatctgtgggcatgaactagaacagagctaactggccacatatgtgtcacattcctgatctttgcaccactatctttgtattttaatcataggcagaggtctaatttacatttattctctttctttttagtatcctaaatttcatctccctttccttttttatttgaaatatggtcaagtctcctacagcttaaaaaattaagcattatttggccaggtgcagtggctcatgcctgtaatcctagcactttgggaggccgaggtgggcagnnnnnnnnnnnnnnnnnnnnaaaaaaaaaaaaaaaaaaaaaaaaaaaaaataaattaagcgttgtctttgtcctcttaactaacttctgatgtttctctgtgtttgatattgaactccttaacaaatggtctgtgtcagtcctctgcttgctacttatttcttttaaaatctctataatctggcttctatgtttttttgataaacctttcttgaaatttgccaacatcattttaatcaaataacctttaaaacaatatgtttttcttaattataaaactgttatatgttcttagtatttggtagtgattctctacagaaataactacagttaataatttggtgtatttcttccattctttatttcatacatttgtattactacattttattcagattttttccttttcaattaataccatagtgatcctttccccatatcattaatatttgttaaaactatttgttacataatatcctttatagaaaagtgttttattttaaccacatccttgttggtgaacatttacatttccaaattttgggcatcctcagtggtgttgctatgaacaaatgtcctttggcataaatttttgcatgtctctttttccccaggataaattcctagaagtgaaaatactgagtcaaggggtatgaacatttttatgatttcctctgtaaatttctgtattgcccctctgccccacagagtatcatactaatatggacgacataaatgttgtactaatttacatttcctcaaagatgtcatgggcataaccattttaccaccccctggccattcttgcatattatcattgaaaaaaatttgccaatatgataggtgaaaaataacacattattattttaatgtgtgttttctgattttgaaggaatttgaggaatttttcatatgtttattggtatttacatttttcttctgtgaattgattgctcattcctttgcctatttttcttttggttggagttctaacatttatccttaagccttcttatttttagatatgttaacttttgtcagctatatacataccaaatactctgtctcacaaaaggcattttcttagtttttattgttatctgcctctgtgtcacatttcactctcttgattgcttattcggtttgctgaaagtgaaagaaaagacattttcatggtggtgtatttttttagatgtgtttctccctctgatgccttcttatatgcagactcttctgtttgtagcaaaccgttgattatagatcacccttgaagctgtatcctcaattcagtttaacatttaccaaacacttctccgtggcacacaaaggttgggacttttaagatgagtaagactcgttgctcatcagagaggcagacttctagtctaatactaatatattaatactaatatattagggtctgtgctggagatatgaacagaatacttagaatagtagggagaacagctcattttatttggtaggggaataacagagactacataggtaggaaaaagaagaacaatttcttttctttttctttttctcttttttttttttttttttttgagatggagtcttgctctgttgcccaggctggagtgcagtgacatgatctccgttcactgcaacctccacctcctgggttcaagcgattctcctgccttagcctccaagtagctgggattacaggcatgcaacaccacacccagctaatttttgtatttttagtagagacagggtttcaccatgtcagccaggctggtctcgaactcctgacctcgtgatctgcctgccttggcctcccaaagtgctgggattacaggtatgagccaccacgccccaccaggaagaacagtttcaaggtgacagggattggcagaagcagagggggaagaatgaatcatgtttgtggtgtacctgctggaggagggtgatagaagctgaggatataaattgggaccaaactgatgaaccctagaaaccattcttaattccaaaagctaaggaacttggactttattctgtagacagtggttttgaaccttttgagaatgtatgtaactatatataactggagtgtgtgtgtgtgtgtgtgttataatatacatgcatttgtactgctagaaacagaagaatctgcatattgtattatatgatatacagttatatatagttacatacacatatatatatatgcacacacatatatacacatacacttatatacacagatatatatacacacacagttatatacacacgcagatattatatattctaatttaaatatgtaatctatatacatcgagtttgtagtactgttgtaggccataagaagttgttgatttggaatagggagcggttagaggcaggaagaccaacaggtatgctgttttcaaatgaaatgagttagggcagttgcagtggaaatacagatgagggaatgtacttcaggggtttcaaatagggcatagggaccaagatgaacaggagatgtgaaaaggagaagagtttaaaatggtcttgtttgtatggctgtcattaaattagataaagaacacagcaagaacattcacttttgagtgagaaggggagaggatgactttggtttcaaacaagttaaacttagtattaccggggtacatcttagtggacatgttggttgacagttggaaatatagatctgaagcttagagaaaagagctagagatgtagatttgagagttattagcattaagtgataggtgaagcctgtgttggaatgaacgaaattacctgggagtggataaggagggtttcagggaagaagagacttgaagatagataaggcatatcaggaagtagaaagaaagatgggagagattaatgtcagagaagataaggaaaccttttaatgtcagcaactagagaaaggtggagtcagataaggattgatagaggctattggtagttattaataacctttgagagaatgtataacttcggccatcataccttaagaaaaatgtttagtaattttcgtctctttacatgttataatcttaaggtaatatttcttgaaaaggcctttaaggccttttaaatagcagcataaagttgaggtttatgatttccagaagttgcctttgttttttgtttattttgaaagtaaaaatcaactttaggtaaaataatttctagtaaaaatcagttgtttagggagtggtgtcagaaagctgtaactgttggtgtgataactttttcttaaatgtttattctttctaagggataaaatttatacatttaacagaaaattctttttccttttgcatatagagttattattaaacacactacataccctttaaggttggaagtggttgatggttttacttatacatttttaacatttttctagttcagtatcattttcttttgtcattaacacacaggttttttttttttttaattttgagctattggaagttgagttttcttaattataatttggagccactcaattgtagattaaacactgacacagcattttctggaaatgaaatttgagctagaatttagagaatcatcttttaaacttaagatcttagattcagtacaagttgagcatagatagattttaggggttttttatttttaattacatgagtaatgtatggattttttttttgtcattcatttatttcacatttattctcattgtaccaggcaaagagaggaaggagtcatgcaccaacacacacagattgtgctgtttttcagtctttctgatagaatcaggatccagattctaactgtcttctaaatctggatcagtcagtagagatggaccactgtggtggagggcccggggctgctgagagaaaggcaggatacatctgtagaactgaccatggcaggttcatgttccagggctcccatctgggtacctgagcattttccatatagatcacaggtgttggggcccacatcggctcctgaaagtctccgggaatgccataggcgtggggctggtgctcgggaggtgcaaggtcagccacatcagcacagggaggacctgagaagacgctgatcttccatctgtatcccagaatcctgtgcagggcctctccataaggacattgcaaggggtggcaccttggcctctggttggcctcatgaatagtgaagtataagtcctgcaagcttatcagcatctggagacattcctgccagctcttctttatacctctgtgcttgagatgcggggcaactgcttttgatactgtgtgatacttcttcaccccgtacacttcacgctcaagaaattcccattcttgcaggaaactctggacttcctggctactccatggtttaattaactggactgagggcttttctggtccctggactgctttttttctgcttcattttcaggatgtttctggtagtttcagtctgaagtatcactttctccatttttattcctgagttttcttctgggatgattctcactgagtctgcagggcctgttcctgggttggcggaacactggcacttactctgctctaatggaacctaggagagtcagaaggagcctgagtgtggaaatgtgtttgcttctctctgcttcttatgtatggatatttttatttttgtaaaaaaattttaaattatggcatagataatcccattttttttttttttgagacgaagacttgccctgttgtccaggctggagtgcgttggcatgatctcggctcactgcaacctccgcctcctggttttaagcaattctgcctcagcctcctgagtagctgggattacaaatacccacccccacacctggctaatttttatatttttagtagagacgaggtttcgccatttggccaggctggtctcaaactcttatccacctgccttagcctcccaaagtgctggaattgcaggcgtgagccaccgtgcccagcctaaattacttttgaccactgcctcctcccagtcctcttcccagaggtaataattgttattaattcggggcataattgtttatattaggcatctttatatgctaggaactgttagtacaaaatgagagaaaaagaaaaactttaagcatatatttttatttccaatgaggattctaataatattgaaattaaaacataaatgttttacctcctattatgtattttttagttattttgttattcaagagctcaaacaagtaaactatgactatttttctagagctcaaacaagtaaactgactatcttagtagactctggcagttctccccgacccctcactccaccttggttcagaaccatatagaaatgaaaggattttactagaatgtcagagacctgaataccagtcatgactatgtcactatctatctatgtgatcttcattgagtcattttcttaggcctggttcatccataaaataagattgggtttaaaattgctaaggtcttttccaacactttgaattgtaatttctgctgacatttagcttttaagcaaaatttactgtgtataaattgcttatggctacactttggtgtctgtttgcacagggactatatcagttatctactgctatgtaagtactccaatacttactggcttaatacagcaaccgtacatttactcatgatcctattgtttgtcagtttgagctgaacctagctgagtggctcggctggtctcgcctggggctgatgtgcagttatctgggagattggggctggctggtctgattcatatgtctgatggttggtgctgactattagctggaccttcctcaccacatggtctcctgattggttctaagaaggcaagccctaatgcaaaggtgtgtcacatttgctgatgtcccattggtaaaagcaagtcacataatccaagagtcagtgctataggagaccacacaatggtgtagataaccaggagttatggaggccattaatataccagtttaccacaaagaccaaaatatgtctatcgaaacctcgtacactaaggcttcgaagtgctgccattgtctctaaattgctgctgttgactgtttgccaggatttgttcagtcctctggtcctgtttcatttttctatagacagtaatatttgtcactgtttttgtttgtttgtttttttgagatggagtcttgctctgtcgcccaggctggagtgcagtggcgtggcatgatttcatcttactgcaacctctgcctcctgggttcaagcaattctcttgtctcagcctcccgagtagctgggactacaggcgcacactgccacgctcggctaattttttgtattttagtagagatggggtttcaccgtgttgcccaggctagtctcaaactcctgagctcaggcaatccacccacctcagcctcccaaagtgctaggattacacgcgtgagccaccatgcccggcctgtcactgtttttatctcctcttttagccatttctgctagtgctcaagtaggaacaggactatcaggattttcctaattggtgaattgtatcaggctgaaatttctaagaatatattgtatctaaaaatgggtcccaagggtaacacagtatttactgatggcaagaaaatgctgctgaaaaatggtattagaaagctaaaaatgctttttttttatttaaagatcaacaaaggtggtttctgtgcccacagttccttcatttccttttgtgtttcctttctttgtctgattttaaggaactaatacagcatctggtgtgtatatgtttggttttaagctctttctgtctgtgagtttgtcaggacagtgaggaaatgaagtactaactttaaatgatttgttgggacgtttgtttcttgttgactttttttttttaagagttgggggtctcactgtgttgcccaggctggacttgaactcctgggctcaagcagtcctcctgtctcagcttcccaggtacctggaactacaggcatgcaccactgcacccagatgtgtttgattttttttgaagttggtaacttcatagctagtgaaataatgaattaattttgtttaaaatagtaatcaacaactggccacagtggctcatgtctataaccccagcactttgggaggccaaggcagttggactgcttaagctcaaaagttcaagaccagcctcggcaacatggtgaaaacccatctctacaaaaactataaaaagtagccaactgggaccaactgtaaaaattacttctggctacttgggaggctgaaatgggaggatcacctgagcccaggagatcgaggctgcagtgagctgtaatcatgccactacactccatcctgggcagcagagcaagactctgtctcaaaaaaaaaattaaaaaaaatacataaataaaagaaaatagtaaacactaaactaaaacaatctttgggactattagaggcacaaaaagggtttttaagatcattaagttaaaagtcattctaatgcagaggaggcacatcagatgtagagtttgagtaattcacccaagattacacagctaataagtaacagaattgacactaggttatggaattagtgtttgtgttggaaggagcacaaacaggcatgccttggtttcaaaatctggctgcagcacctgttagcggcaagtttaaaaatattgttcagctttcctcatctgtaagatggtgattataccctctacctccaagattgttaggaaaattaaacaagaaaatatataagaatgtctcctacctggtagagactcagtaaatgctggcttttctttcagttcagtgctctttccactgtgtcgggctgcctaccttttactgttaatgcctgccagtttagtgattaaacaacaaatcagaatcgtgaggcttttttttttattctatttgtgtttcagaaacttgttccttctttccccatcctctcttctccctctcccgtacttccttctcatttatccttccaccttttttcctccttcattctttgtctgtcttctcctctccctcttccctgttttattcccttgggctgatgatgtatatttctttttatatgttatattgcctaataaagtgctggacatgttgtaggtatcctgctacctattaacttcaaatatttttcttaattttcctgtgccattcttatatatcattttctctaactttgtggaatcatgtactctttcttctctgtttcttcaggccaactggcctcatgcaactagatctttacatatcagaaactgacatcttaaaaaggagcttaagaataagagctggcaataaaattacagattattctcagctcacaaatgacttgtttatgcagctagtcagagaagggtttccctctcataggacaagaaacattcaactcttcagtgacagtgaatgtcatgatactcatgatgcagaataggaggaagaggctgcttgctttagaatatattacctgtgtgactaagagaggattctcttttgggaaggcacctgtgacagatgagatgtatttccagtgatctgagagtagtgagtcataaataggacaggtaaatttctactctagtttttagcagcattgttagttaaatagagtttggttagggaagcctggaaatcaaatcagcatttacaacacaatgccattgtgattgttgaatgagggaatgaatttgtcaaaccaataaactcctaaataaactttgtaggcaaccctcttttagaatttgggacttgttttagtggtgtttgtatgtattatatgtatgtacatatgtacatctatatacatattcataaattgtgtacaaaactaaaaattatggaaattgtaaagtagaaatttcaccagaagtctactgattcgtttctggatggtaagtaaactctcttaaaattttgtgccagatattatctgtcctttttctggggagaggacataaaagatacacagttacaaagattcttaaagggagggtaatggttctcaaaaggtaagagcttcagctataggatgtatagatatatttctgtatgtacatatatattttttgagtatcaaactgttatgcattgccttaacattttatttatgtctggtgtggaatctgtggtaattaggactacttgatagaattatggtaatcatttgtggtgtgcaatattgaatactttgtcataattttatatcttaagccattcctggtaatatatggatttgccaggaatttgatacaattcatagataaaacatatccagagatttggatgatttgtctcttaacctaaattcttcctgcagtttaaggaacatttgagtattccagttagtacctgaattttatatttggcttttaatctgtgtatttaatactataagaatttctgttttcccatcatttttatcttaaatttaaccaaaaaagaactaaaatacattatttccctagtgtcattttccatgtgatttgaatgaactataaatgctgtatattcacataaagattttgatcttcaattacattttatccaaagtattcaaaagaaagttgggaagatacgtatttgttatcaggaccaatttattttaaaattttatatgttttaacttcatgtattcatagacatataaagatgaactttcaataggcctccttcgattgtatttttttaatacagttaccactcgtatttttttaatacagttacaaactctttaataaaatacagctgtgtactttactattttctttaaaattagatgtatcgattgtctttacagtttgaattccaagacatgaatgagaagcttatcaaaaactgtaatgtggttacattctaaaaataacagttttattgagatgtaattcacataccattaattcacccttttaaggtatacattatatttgcttttcagtggttcagaaaaagaatcattatatacgttagagggagagaaacattataaaagttaacagtaggggaatgtgagtagaaaatatggaaatttttagtgtacggttcttgtaacttttctctgtttgaaattatttcaaaatacatctttttttcttttttccagcactaatggcttgggtgaattaaaatattttttaaattaaaaaaagtgtatggtgtggtgggggccttaatatattcacagagttgtgtaactgtcaccactaattccagagtgaaattttaagcatagtttgtgtttgttttcctgttccttccttttcacttgatatacaaaagttgacgtatcttgacagaaaaatttctttacaattttcttaaagttttcaaatgttgaactaaaagaccaaggtatatcataagtacaaggaaataaagtagaattagggcgtataaaatgaaaattcttacttgacaaaagaaagtgaactgcttttaactttatatatcctttgttgaaacttttgtgtagaatcctggaataaatcattagtcttatgcaaaactgtgtctacttcttaaaacttgaattgaggaaggaaatgctttgtaccaagatggcaaatattttattataagaacatttctgtttcttcctctcatactactatgttcattgtactgtatcttcctctgagagggtttaaactctttagagaactgccttaatttttgtatgtattggagcaacataatcagtgtttgcaatgttttgataaaagtaaattcttaataataaaattgttataatctcccataattttcaagtcagttttcactgttgttaatgatgtatgatattgtttttccttttctcttaattggaatttataaactcttactaaatgcagatacatctgctcaaaacttgtcatttgttcttagggtcaaaaaattgggaagattagtttgcactaccattgtaccttgctttttataatgagtgtactctgggtaaaaacatgaatctgaataagtactaaaaaaatgcagttgcctgtaatacaactgaggttttatctaatcccctgattcaaaatgacccagacaaatgtctgccaaggggcaaggagaaatgagacactttttcattctttagaatgtagaaaaaatgctttataaaaatggatttttatgtcaataggtacaaatcattttaaaatattttctataaagtattatataaaacagtgctaatgagtcttaggattatacgaagcatgttttcttatattgttttacttattttctgtaggaaaagtagccatcaaaaaagaagacttgtgtaatcacagtggcaaagaaacttggttttcattacagcctgttgactccaattcagaggttcaggtaaatattaaggcttatgtaatacaagagattgtcacaggaaatgagtaaaaaatgaactaattaaactggttcatgtaaatagagcatattataccttattttaaattctagcatcaaatattatagacttttgggtaatataggacaggaaggtaatggctttgtcatattgtttcaagaataatgctcatgtatatgcatatgtgtagatttgtggagattagggcatttctttcttaccttctgtttgagtcacaatagcaaattattatttgtctttgaggggaaaagttttaagggaaaatatgtgttttattaactctgactttgggggagaatccctggaagtctgattttgtctgtcttgattctctgtttactctctagtaaactggacttggggaaatgttattcatttaaaccctgcctgagcccactgtgcacagccttcactcccacacccaccctttcctgttgttcacctcgctttttatttgaaagagtatcattactctttaatctttttcttttttccaaaataagagacctttttcagattctgagtaaagatgtgtgtttagccatgtagctgaagtttctatttgtttttagaaaatctgagttgctcttagaaattatttttctaactaaagggaatctttttgctgtagccttatttatttataaaatatggtaaggattgtgaaaccatttcccgagggcataattgcaagcaggattcttcctctctaaaagaagttttaatttgccactgtgactcagaagtttaagacaagaaaaaagtgctacacccacaccacagataatttgcaaataagtgcctgtgtctccatttcctcataatctctcaagcattctctttgattaattattaaattctcaaaaaattaagtacttatgcactaaccccccttcttaactgcaaaatttaacatacttttcctgtttaacctactttgccatgttttaatattcttgtctttccttatgaccatagctattattcagatcccagttgtacagtattgtaaatgatccatgtgagaagcaatgtgaagaagtggaaagtgtttaaattaaaaggcagaaaacttaggtcctagtttttatatgtagttacttaaatgacattgaatttcatttctataaagtgggaataaaagttgctgtgttcgattcatatggttgtgagaattaagtgaaatatctgtaagaatagtttaaaagctgttaatgctatacagatgtaaaatattgtctgtttaccaccagtcagtctggtggctatttccctaatattcctttaccaaaaggcagatatgaaagttttaaagtaccagtttttcttttaatagttttaagaaaaggcatgataggaaaaggctttgaaaatttaaactgaaattttatgaaccattacattttataaaactcataaattttgtgaattttatgtaaatttgctaaacaatttaagagttccagctctcaaaaggtaaaaatctatatagaatatagaattcttgtagatggtactaaagattaatacagagacacaagactttatttgatggtgtgtgtgtgtatatatatgtgtgtgtatatatatatgcatatgtgtatatatgcatatgtgtgtatatatatgcatatatatgtatatatatacacacacattacatacacatgggtatgcatatttatagatatacatatatatgcatatatgcatgtatatatacacatttgagagatatatatctcatctatgaaacatgaaaattggggaagcaacagttacccagatataatatagtcatttaaaaattttgtacaagttattttcatgactgtgagttattaaactttacaactcttttgtcttaaatgatacttacttaataagatttgctcactatttaaaacagattttagaaggaaaagtactttgtggggtggaagagacatataacacttttgggttaatatggtaccattgaaaatgttgttgtcccactgctgataagggaatactaaattatgagtctagaaaagatagaaaatcatcccatggttcatacaaatcctactttgttaataaatttgttcacttccataaactttataaaattttacaaaaataccatgaaacataagagcaattaatagggaaataggtgaaagctatgaaacagattgcgttcaacaggaactcagtctgataattactattagtaattataccagtgtatcctaagcacagtactaagtacttaatgtcatttaactttcaaagtagcattatgaggtaaatagcatcacctgcattttacaaataaggcaaatgaaattcagaggttaaatgtcttctccagagtcacagaactactaagtagtggagccttgattccaaaagagatctgtctgattctaaaactcctaaccacagtgcctttactacctttcaccattctgtactattagtcattaaaaaaaatagattaggagtatcacttaagtaacatctgagtgtaaggaagagaagcctgctcagatttgctcaaagaaaatgggagaggccattggaaagctcctaaagagtttcttggaatgtcatcataggaactttacattgccagtgtgagctagaaagttgtcaggcatttgcagaggagatgcatcttaagtggaggctagattcttagaacaacagacattaaaatttgcctaagttcatctgtaaaatgagtatacaaaatgaaaagttaaaaatttttgcgtaagttacaattatttttgaaaagagtttagtttcttataaaatacactaaggtatttgggtggtttgtttgtttttggttgactaccgcataaaataattggcttgcattctgggccatggtaaatgaaaactatatactgtatctttaaactgtagacctcccccctgccctgactcagtacagcaatagatactgcaagtggcacatggaaactgagacccactaatcatttcttatattcctatgttcactgtgcttattgagcataagttctcactgtttaaatattgttttttttctttccctttcatgaagtgaataatgttttctctcagtctttccctctcattttaataactatttgctttgcaaaatataaaggaaagaaaaaaacaccattttgagatgccattgtattctttttgtatgtatgatgagacatgtctcttcctctgcttctctgtaaatctactccagtctctttttgagacctaaaagacgccacaccaatttttgagtccatgtgaccatacagcttcctcacctccaacatctgactcagttttctgccacaatctagagagaaagtttggctaaacttgggtcagatgtctacttcaatctaatttgatatggttggaggaaaattcactgtaaggcagtccactttagggctttgagtaggcatgttccctaaggaaggggtttgagtagaggaaatgaatggcattgctacctcagagggagagatgcttgtttcctagttctaccactaattagcatttgtgccccaaataatcgcaagcctgttacctgaggatcttcatctatgaaatgataatgtcagcgcaaagggttcccttagttgtgaagttctagggaaataacatgcagaaatgtaatttagctttccagtggaaggatcccagtagtattaagatgggctttatgccaaaacagttgaaaaattgtttagaactataacctcttaccttgaattgtctcccagagataattttttattattgctgatactgttatacttgtcaataatgttaatagttcttttcagtttcatcttcagtagttcaaaatattgttagtaacatttcatgagtgtatttttctactttttttttgtatttagattttggcttgattctaccttttgtaatttttccttctgggctgaaccatttttttcctcaacctattctaatctgctttcagactctgcagtgggtcagagagagagcagaaatggttctttttaccaatgacattgtgtcaataagtctagtggacatttttcagtcctcatcttacttgatctttgagcagcttttgatactggtgaccactccctccattttgaagcattcttttccttagtttctgatcctgtttatggtcctagttatcatctatttcatttggtattctttctcaatattctttgccacatatgtgaagttaatatgggttgtgctggtgccttctataaatcctcttttggcttcagtgaactacagccgtgctattagttattaggtcctgtaactcaccaggaacattaggtatttatcctttctttatttcttaggcacagtgataaaaagcatactttacatatggttgattaaccaggccgggtatggtggcccactgtagtcccagcactttgaaaggttgaggcagacagattgcttgagcccagaagtttgagaccagcttgggcaacatagcaagaccccatctttataggggggggaaaaagagtgattaaaccaaatctcccatatggagaatttgctgctctcattaattaaggagtttgtctcacacaacttgtccaagcagtaaatccagatgtgctatcaaccatgtcctatatgatgcaattacttagttaataggtctttaccaacaagcatatcttgaatttctggatcatgccataagttattgattgttttataggtgttttttttttaaagacctctgccttacctgtttaaaaagacatttaaaaagaaatgcaatgattatagctaataataaatacatgaggatttttaaaacatgccctattcaagacataacaaatgtaaaaacataattcattattgcaggttgattttttttaacttcattttaaatttttatgtgaattaataatgagccattctagatcatattaaatacttctttaaggagaaaacaacaccttcataaagaactgccattaatataagagatattaaataaaatttgtattttgctttttcatctgatgggcgattgtgtccaaaatcatttatagaggtaatttctacgtattaaaacatccatcagaaactccgaagttgggatatttttcacctcatgtacaggcataccttctttcattgtacttcactgtgtcgtgcttcacagatactgcattttttacaaattgcaggtttgtgacaaccctgtgtcaagcaaatctatctgcctcatttttccgacatcatatgctcacctcatttctctatgacagccttttttagcaataacatatttttaaattaaaatatgtatattgttatttaagacatattgcacacttaatagactgcaatatagtataaatgtaacttatatacactagaaaaccaaaaaatttttgtgactttctgtttagatatttgctttattgaagtggtctggacccttagacagtatttccaaggtatgcctgtaaaaacattttttaccagttgaaacatactgagttattttatatggaaatggttgttaaaatttagtgttttgtgataaaaacaaaataaagtttagacttgagaggattttaagtgcatgtattatgttttgctcaaatacctctatattagtccatttttgtgttgctataaaggaacatctaaggctgagtaatttataaaggaaagaggtttattttggcttacagttcttctgcaggctgtacaggaagtatggtgctggcatctgcttctggtgagtgcttcaggaagcttacaatcatggtggaaggtaaacggggagcaggcatattacatgatgagagagggagcaagagacagaaggcagaagtcccagactcttaaacaactagatctcacatgaactaactaagcaagacgcacttatcaccaagggggtggcactcagccattcatgagggatctacccccatgatctgacacctcccactaggccccacctccaacactggggatcacatttcatcatgagatttggagggacaaacattcaagccatatcaacctctgttcatcttattttcccaaactgtatgcagaaatttacacagtatcttctatatggtaccaagaatgtatgtaatacacaattgaaataatcacagatatttttgtgtgaaatttttgtaaaattaattgaaataaagttagcgtataaaatactaaatcttcaaatagtacctgtattagcccattttcacgctgctgataaagacatatccaagactggaaagaaaaagaggtttaattggacttatagttccacatgactggggaggcgtcagaatcatggcaggaggtgaaaggcacttcttacatggcagtggcaaaagaaaatgagagagaagcaaaagcggaaacccctgataaacccatcagatcttgtgagacttattcactattacgagaatagcacaggaaagactggcccccatgattcaatgacctccccccgggttcctcccacaacacatgggaattctgggagatacaattcaagttgacatttggtggggacacagccaaaccatatcagtacgagagtagtgtaagttcctcagaatgccccttaatataagataatgtgatattataactgcatgtatcagcctaacatagtcagtgctatggaagtcatatagagcaataccttccaagaatttggtttattttttattaaagacgtataatacagtgcaaggtatctgatcttccaacattttctgacatacatgaaaagtatactgtcattgagcttcctttaggagattgaataataagaatgcagttgtagaccaaatcacattacatgtttattatcaaacatagtaccttgttagattcttttttttttttttttttgagatggagttctgctggagtgcaatggtgtgatctcagttcaccacaacctctgcctcctgggttcaagtgattctcctgcctcagcctcccgaatagctgggattacaggcatgcgctgccacacccggctaattttgtatttttagtagagacggggtttctccgtgttggtcaggctggtctcaaactgctgacctcaggtgatctgcctgccttggcctcccaaagtgctgggattacaggcatgagccactgcgcccagcctccttgttggattcttaatgttacttcttcgtaggttctttatttttcttatttgtccctaggagttcttgaatctgtggcttgtcttctatcagttttggaaaattccaggcaattatcttatctcctttttttttctgccctgttctttttttctcttctctgctgtgactccagttacatgaataataggccatttcaccatgtctcatatgtctcctatgctttttccctctctgtgcttcattgtggatattttctactgacctgtctcccatttcaccagtcctcttttcagctgtggctactctgctactaaatacattttcattttggtttattgcttagttctaacttttttatttcattcattttatagtttccaggtatctgctggatttttcattttgttttatgtcttttaaaaaatagctattttaggctggatgcagtggctcacacctgtaatcccagcactttgggaggccaaggcgggaaaattacttgaggtcagaagttcaagaccagcctggccaacatggtgaaaccgtgtctctactaaaaatacaaaaattagccgggcgtggtggcacatgcctgtagtcccagctactcgggaggctgaggcaggagaatcgcttgaacccgggaggcagaggttgcagtgagctgagatcacgccactgcactctggcctgcgtgacagagctagactctgtctcaaagaaaaaaaaagcaattttaaattctgtcaattccaatatctgcgtctcttgtaagtccactgctttcctcattttttctcttggtttttgatcttctggcatattctgtaatttttaatggaatgctggagaataaaatataaaatatattggagataatttgagggcctgaatggtatatttcctctagagaagaagtatgattccctgccagcaactgctgtttctatcttgttggccagaactacatcatatggctatccctgatctcaagggaggctacagaatgtcagtttgctgggctcataactgccccatcaaaaaacaaaacacacacacacacacacacacacacacacaaacttgttttgctgcaattcaaatctattaaatgattacagatataagtaaaactgaacttttgtgtgaaaagagactaaaaagtattctaaaatgttcactgatttgagtttctaaaactgaaaagcagttttaaataatttaaaactttatttttctttactaagaacaacacagtagtagtaaaaactttgaaaattaaattggtagtatatacttttaaaatctgaaaattaaattggtagtatgaacttttaaaatctagagcaaaaaagcaaagaaaatcttctgaaatttcaccaaccaaaggtgtcttctatcaacattttggtagatgatcttgtaattttatacatatatgttttttatttttataagttaacattatagtatgtaccctattttgtgatttatttcttttgctaaggatagtatgtatttccttgttaaagtatataatgagttagtgttttacagtttagaaattataatttccttaatttaactcataatgccttttaatttagtgttccaccctaacagtatgtgttttgtgtctgcctgttctgtcctcacacttttcttgacctggttaatatataattgtgttattgttgattaatacctaaggaatgttttatttaccagtcagtgggagtaatgaacatattaggtaggctctgactcaataataatgatttctggcagaatctcattaaatatccttttgacttgctataatactatgattttagttgtaaacaaaatgattatctttttctactctattgtcatagtttttatttcttagaactggaatagatcccagacatttcctgagagacagttgtgttagcatacgatttctgtaataaaatgtatatatgttaaaattgtaaaactgcaaatttttgtgccgttggcttggctcccttgctagccaagtaatacatacatgctgtcacaacagaaaatatgatttcaaaattctagttgagtaatattacaaattacagatcatggaccttcaagatcacccttgaatagtagagattgtaaatactaaatgcaggaataatgaaagacctagtttacaaattatatatgattttatgaatatttgtgcctagatttttagtggaagatttgcttaatttagttccagctccacgtaactgctattaatttttctaccacagatgtgtttgctcctttagaccttagctttctcaggcagacttctgttttaagatccatcagtattttttgctcatctcttactattcatctaaccctgagctttgtacctggtggacctcagattcattcttgtataagtccccttaaaatagtgagggtgtttcaggttaggtttctgtgaaagaatttttgaaaagggttgttctaaagaggaacagtgactagataatgaactttcctacctctaatgaaatcactcacgtcatcagtccctagacatcactcccctgaaatctccacatggcaatgtgagaatttgtcttgtcagctggagggaggtaatccagtactgtttcttaaccagtttagaattgttagcgcagaattgctcatcaccagcggcaggttagaaatatcaagctctagattatattgttcctaagcctttatttcttgagaagttgattgtttgaattcttttgaacttacactacttaatttttaaaaattcgtctattaatatctctttaagaaagtactcctttattttcagtgtcccatctttccatcaagactcttggccatatgttatcttttgtttattgtcttcccaactagattgtacgctgcttgtaagcagtgacttacatctttaacatctatggattcctacccactcccacagtgccttctgaaacatagtagacattccataaatctttattgtttgatcaaagtaagtagtgacaaattgagttttattggctgtaacttagtttttagttgttttagaattgtatgatttctctgtcttttaatgagactgcttctgtccttaatgctggtttatcttctggaaaaagcatcctacattttataatttggttttatctcaaaatttccttaaatttaggtattgtctttccttttagtctgtgataattagatatataaatatttattgaattggacataaaattcttaaatttgaataccatgtttgacataagtatttgtttcatatctttcagaactttgatctctggttttggttattattcatttaacaagtacttagtgtaggcaaagccatgtgctagtggtcagtggataaatactgtggtgatttgaaaaggcacatacctttaatattttgtcagtaaaatagactactcagtttgtaatctttttgtcattatagggtaaagttcaccttgaattaaaactgaatgaactgataacggagaatggaactgtatgccagcagcttgttgtacagtaagcattttttttaaccaaaatcaactagaaataattctccattttgtattctttcgattttaagccaactccttgttttaacttcagaaacttttttcaaaaatgaaattctgctatgtcattccttttgtgaagttgattttcaatttaattttctcatagtctactcaggttatggtgagtcattaatttattcaactaatatttattgaatatgggttaaatgatatatatgggcattaaggataagggtgtctaactctctggcagtggagaattggaaaggcttcccaaagaaggtcctctagaaattgtcataccacagagcagagctttagagactttggagctagaactaatgcccactcagagatgaccagtattgattcccacctactttgaattcctttttacctcttccaccctcaagtcattttttaccacccagactctaatctcctggctgttctggaaatctgttgtagcccaatcccctactcttttcctcccctccaaacccttactctgtgatatcaatagactgccagataaccttcacttcttctgggtgttttcctctatttttgcattagttgacatctgaatatcccacaaagtacagcagtttcacagccttctcagttagaggctttgtttttctatcatgtccacatattgtaaggtcagggagtagagtagatattactctcctattgctgctccagactgtaacttattctcatcaattgtgaaccccagctcctttgaggtattctatctgtatataaatatgtctgtttgctactatatataatatttatttcattaattttttctgacctctttgaaagaagattgcatatgtatgactcttaatatatcagtatgtatttcctaagaataaggaatattatcttaaataactccagtacagttaccaaattcaggaagtttaacattgttacaatactttttaaaaatctatagttattttctaatattttaatctgcagttattatattccacttttgttaactgtcccaatgatgtctattaaggcgtttttttccttctaagaaaggatctgctccaagattatgttttatgtttagttgacatgtctctttaatctcctttaacatggaatagttttttgcttttctttgattgtattaacattttttaagaatataaaccagtttttttttttttaatgtttctcaatttggatttacctactaaaaatagttcaagatctgtttgcagctttttctccacagactgactctgtagaccaactgagagcatatggtgaaagtatctggattaggtcttccactcctccctcccctgcttcagtttaattataatagtcatttgaaatatagttagtttggttggtttggtttgtttgcattcaatttaagggtttttttgtgccccttccccccaatttaagttttttcccccatccttctaggcttaattttatttttgaatagaatatttgcatgatttcaaaaatcaaaactataacaaaaggcgttactcagagatgtgtgtagttcagttccctctccccacacccagctccaagcaaccatgatctgatttctgtccctacagtttttgccttttccaaagtgttatttgaacaaaagtatatgatatgtcttttttgtgtctgctgtctttcacttagcataatgcttttgagattcatccacactgtacgtatatcatttcctttttggtgtgttatttgtttcttgccataatttggtagatactgttatcctcattttgcagatgacaaaactgatgcccatattggttaaataagcctaatttcacacaggaagtgttggaggctggcagtttgatttttttcccccaactttaaaattttgaaataattacagatttacagaaagttgtaaggatagtacagagaggtcctgtgtacccttcattctttttccctcagtgggtacatcttgcatgactatagcacaataccaaaaccaggaaatttacattggcataatgtatgtatatagttatagatcattttatcatgtgtgttgatttgtgtaactaccaccaccaagatacgaaactcttctgtcaccataaagatatctctcatcccatagctttatagtcataaccactcctctcttctaacccttggcaacctctaatctgtctttatatctataattttgtcatttcaagaatgttatgtgaatggaatcttataatatgtgaccttttgagattggctttttttactcagatctatctgaatgactgtgtgtagttttttgtagacagaatatagttgggtcacttttttaaaaaaatcatttttgccaatctctgtctttttttggtgagttttttccatttatttttaatgtaattattgaatattaggcttaaatatgccattttttgtttgttttctgtttgtctcctattttatagttttctgttttctttttcctgtgggttacttgaacactttttagaattccattttgatttatttatattgtgtttttaaaaaatctatggtctctttgtatagatttttttttagtggttgctctaggtattacattatacatgcataactaatcataatgtactgatgtcaacattttaccaattagaataaaatgtatgtactttacctttctttaaatccctttaccctcccccatttgtaatatactttgtcttaaatattttgtctacatatattgagaaccacatcaaacaatgttataatttttgcttcagccatctaacacagttgaaaagagttagaggaaaaggaaagtgtaagtctgttgtctctacccacatttttgccctttccatgttatttttttcctttctgatgtttcacgattccttctgtgattaagtgtatagagtttcctcttaacattcttttagagtaagtctcttggtgatacattctcttggttttccttcatctcagaaggtcttgatttcctcttcatttgtaaaagataattatactagatatagaattctgagtggacagttcttttctttccacatttgaaaatgtaccacttccttgtgtcctcgatggtttctgatgtgaagttcattgtcattcaaattgtttttccctataggtaacacaccgtttttctctggcttcttttaaggttgttctttgcctttagatttcttttcttttttctttctttctttcttttttctttttttttttttttttgatatggagtctagttctgtcactcaggctggagtgcattggtgtgatctcagctcactgcaacctctgcctcccggattcaagcgattttcatgcctcagcctcctaagtagctggaattacaggcatgcaccaccatgcccagctaatttttacatttttagtagaaacagggtttcgccatattggccaggctgctctcgaactcctggcctgaagtgatccttctgccttggcctcccaaagtcctggggttataggtgtaagccaccacgcccagcctgcctttagatttctatatgttttagcttgattgtgatgtatcctggaatagatttatttaatttatcctgtttggggttcgctcagcttcttgactatgtatatttatgtcttttgccagatttggggaattttcaaccattatttcttctattaattctttatcacctctgctatctttctcttcttctttcagaacgccagtggcacaaatgttaggtcttttttttacagtcccagaggtccccctgaggctttgtcctttgcttttccccccagtctattttccctctgttgttcaaattgggtgatttctattgttatgtcttcaagttcactgattctttcctctgtcttcttcattcttctgtttagcttatctgttgagttttttattttggttatttatatttttaagttctaaaatttatatttgattcttctttataacttttttcctttggtgagagtttcttttgcagagactttcttgtttttttgtttcaaacatattcataattgttcattgcattattcacaatagcaaagacatggaatcaacttaaatggccatcaatcgcagactggataaagaaaatgcagtacatacatgccatggaatactagccgtaaaaaagaaagagatcatatcctttgcaggaacataggcggagctgaaggccattatccttagcagactaacgcagaaacagaaaatgaaaccaaatactgcacgtgctcacttatagtgggagctaaatgatgagaatgcatggacacatagagaagaacaacagacgttagggcctaccagagggtggagagtaggaggagggagaggatcaggaacaataactaatgggtgctagccttaatacctaagtgacaaaataatctgtacaacaaacccttgtgacacaagtttgcctatataacagacctgcacatgtacccctgaacttaagttaaaaaaaaattgctcattgaattatttttatgatggctgctttcagatccatgtcacataatcataacaatcatgtcatcttggtgttagtgtcttgtgttagtccattctcacattgctataaagaaatacctgagactgggtaatttataaagaagtttaattcactcatggttctgcaggctgtacaggaagcatggcagcatctgcttctggggaggcctcaggaagcttccaatcataacaaacaccaagcgggagcaggtgtcctacatggcaggagcaggaacaggagagagagtggggaggtactacatacttttttttttttttttttttttgagatggagtctcactctgtcgaccaggctggggtgcagtgacatgacctccacctcctgggttcaagtgattctcctgcctcagcctccgagtagctgggattacaggtgtgcaccaccagacctggctaatttttgtatttttagtagagttggggtttcatcatgttggtcaggctggtctcgaactcttgacctcgtgatgtgcccacctcagcctcccaaagtgctgggattacaggcatgagccaccaagcctggccctcttttagttatttttaaatgtataataaattattgttgtctgtagtcaccttcttatgctgttaaatacgagatcttatccattatatctaactatatttttgtaccctcacttcccgtcccagcccctggaaaactttgttctactctctgttatcatgagttcaattgtttgagtttttagctcccacaagtgagaccatacgaggtttgtctttctgtgcctggtttatttcacttaacgtaatgatctccagttccatccctgttattttgaatgacaggacctgattcttttttgtgactgaaaagtactccattatgtatatataccacattttctttatcagttcgcctgttgatggacacttagattgcttccaattcttgactattgtgaatagtgccacagtaaccatgagagcgcagatacctcttcaatatactgattccctttctttagtgggattgctggatcatgtggtagctctatttttagttttttgaggaacctccaaactgttctccatagtggttttattaatttacattgccaccagcagtgtacaagggttcccttttctccatatcctcaccaatatttgttacgcatgtcttttggataaaagccattttaactggagaaaaattataatttcattgtagttttgatttacacttctctgatgatcagtgatgttgagcaccttttcataaatttgtttgccatttgtatgtcttcttttgagaaatatttattcagatcttttgctcatttttaaatcagattattatattcttttcccgtagagttgtttgacctccttacatattctggttattaatccgttctcagatggttagttagcaaatattctcccattctgtgggttgtctcttcactttgttgatccttcctttgttgtgtagaagctttttaacttggtgtgatcccatttgtctattttcgctttggttgcctgtgcttgtgtgcttgtggcaaccattatgcaagaaatctttgtctagtccaatgtcctggagagtttcccaatgttttcttgtagtaatttcatagtctgtggtctagatttaagcctttaatccatttttatttgatttttttaatatggtgagagatacgggtttagtttcattcttctgcatatggatatctatttttcccagcaccatttattgaagaaactgtcctttccccagtgtatgttcttggcacctttattaaaaatgagttcactgtagatgtacggatttgtttctaggttctctgtaatgatctgttggtctatgtgtctgtttttatgccagtacaatgctgttttgattattatagctctgtagtataatttgaaatcagataattgtgattcttccagttttgttctttttgctcaggatagctttggttattctgggtcttttgtggtttcatataaattttgggattttttttttctatttctgtgaagaatgacattggtatttcagtagggattgcattgaatctgtagattgctttaggtagtatggacattttaacaacattgattcttccagtccatgaacttggaatatctttccatttttgagtgtcctcttcaatttcctgcatcagtgttttacagttttcattatagatgtctttcacttctgtggttaattcctagctattttgttttatttgtagctattgtgtaagcagtattactttcttgatttatttttcaaattgttcactgttggcatacagaaaccccactgatttttgttgtgttaattttgaatcctgccactttactaaatttgtttatcagttctaatagttttttggtggagtctttaggttttttccaaataagatcatatcatctgtgaacaaggatgattttacttctttctttccagtttggatgcctttatttctatctcttgtctgattgctctagctaggacttgaataacagtggtgaaagtgggcatccttgtcatgttccagatcttagagaaaagactttcagttgttccccattcagtatgatactagctatggatatgtactatatggcttttattgtgttgaggtttgatccttctgtacctattttttgagggttttattattatgaaggactgttgaattttgtcaaatactttttggcatcagttgaaatgatcatatggttcttgcccttcattctgttgatatgatgtgtcacactgattaatttgcacatattgaaccatccttgcatccctgagacaaatcccacttggtcatgatgaatgatctttttaacgtgttgtcgaattgggtttgctcatattttgttgaagatttttgcatcaaggttcatcagggatattggcctatagttttctttttttgatgtatctctctctggtttggtatcagggtaacactggcctcataggatgaatttggaagtgttcccctctctattttttggactagctgagtaggattggtattagttcttcttgaaatatttggtagaattcagcagtgaagccatcaggtcccaggcttttctttgctgcaagactttttactgtggcttcaatttcattacttgttattggtctcttcaggttttggattttttcatggttcaatcttggtaggttgtatatgtccaggaatttatccatttcttctaggtttttccatttattctttttttcaaagtttcttaagcttttgctctccatactcactgtcttgtagcagcagagttccagtggtagctttatggaatttattgttgatttctcatccttatagatattctgaaattcatgacattctctgttttttagtattgctaaaggcatggtttcacatatggctttctttgtgcttcttgctggactttggttttgggggagtaatgtatgggaagattcatatcctagtagttactattatcctccagacctagaaagtccccactacaacattttttgaactttagtgagacctccctgccatccattgatcttcactgtgttcctgttttcacttctttctacatctttttccgtgacctattgctgtagtcattttctcgcaggttccgtaaactcccctattgttctcatcattcttatttatctggaaaaactctaattgaaaatgacctcttcctctgtgttcaatctgcacatgaatatagctggagaaaatcatgtaggctgatttcactttaaatttatcatcacaggcctcacatgggcacttatatctgccctggaatttaactgtgcttctctaatacagctataagattctctaccaccacagcctggaaattgcttacatcttcctgaatccaaatctataaacctaatttgcatccataattttgtccttagagcagaggaggtactccttttcttgacattgaattcttccatctgagctctggattccatttatttcctctacttaatgagttttgctccttcagttatgccttctttttcttgttttgtcagctttaccttctctcctacatggttctcaccacaaataaacatggtctagtatctctgtcctaaaaggcatgcctccccagacctcatctctgcccacccataccccagtcctttttatcattcccattcctctgctctcctttgaaggcagacttctctagggaaaaatagtggtaggagtgtgtatgagtgtgtgtgtgcgtgtgtgtgtgtgtgtgtgtgtgtgtgtgtttgcaattctccagtcagcactctccagtagatttttctgtgatgtggaaaatgctttgtatcttcactgtccaaaacagtagccactagccatgtgtggatattgaaaacttgaaatacagctaatgtgaccaaagagctgaagtttaattttatttaattttaattaaatgtaaaaaaccacacatggctaatgactacagcattagtgcagcttcagtaaaagaacctggactcctttttagcagtagcttatttcaggacttgggcagggaaaatatgagatgagtctggagcatcttggggtctcaaaaagtaagaaagtgctaaaaaataatggggatatgtaaaaaggacattgaagccaatgtaaagggacttcaaattaccaaatctggaacaatttgagcttcagaataaataataatagtggattaaaacttatagaataaaataaatataagcaaatactggtacaaataaacaattaaaaactcaaatacttggtagggagaaaggactgatttttcctatagtagaattctagttaatgaatgtaggaggaatgatggaaatgaaaatcaacattggcaaacatcacaataataagtgggtgaggggacaattcaaaaaatcatctatggatgctaagtgagcataagtgtggtgacaagatgtctgatagatgccaccttaattgagtgatcaaagttaacatcaccaataatgagacatccagtacttcccaataggatgcattgagaaggacaccaagatacataacctcaacctaatcatgagtaaacatcagacaaactcagattaaggaatacactacaaaataactggccaatactggcaagatcacggggcaaagaaggaaaactaatgaactgtctcaggatggagaggaataagaagacatgacaactaaatgcactatgggatcctgtattgtgtcctagatcaaaaaaggacattggtgaaatttgagtaagggctacagatttcagtaattctgctgtggttctacaaaacgttaacatttgttgatgagtatacagaaactattattttaacagcttttttgaatatctgaaattatttcaaaataaggtttttaaaattgcctgtaccttgtgcattcaacccaggtctgttttctgagtttcagattaatatgtctactttgatgaatcacattgcaaacttaacacatttaaaactgaagtacagggaggctgaggcaggagaatggcgtaaaaccgggaggcggagcttgcggggagccgagattgcgccactgcactccagcctgggcgacagagtgagactctgtctcaaaaactgaagtactgattctcatgtctatccaactcctcccccaaagtcttagcaaatgtttaattccgctcagtatgtttttcatctctagatttttccatttttattgtcttctgtgtctggatggatcatatggaatataattataacttttaaatgtctttgtctgctagttctgtcttctttgtcatttctgattctgtttctattgatttttcttttcattatggatcataatttcttagttccttgcattcctggttattttctgttgcatgccagacattgtgaagttgctggatattttaatatttctatgaatgtacttgagctttgttcggcacttggttaagttacttagaaacagtttgatccttttgtggtttacttttaacttttgttaaacagacaagcacagtctttactggagggcttatgttttcctactattaaggcagtacccatgaattaccaggttttctactgtggctgatggtacctcttgctagccatgtgtgggttttaggaactattgcctctattcttttcaaatggttctttccccagcctcagatgatttcctcatatatacacgtatcaatactcagctgaatactcagtggggattcttgtagctccctggaggtttttctttctctgtgcaactttcttccctttagtactctgccctggggtccctagtcactttgacctcctcctgctgacagctttgcctcttcttctcagagaaaccatttagctgtaagctggggcagttggagggctcacctgtccttcactgctgattttgttcaattcgttttgggtggagagtaaatctagttcctgttactccatcttacctggatgtagaagttaaaattttcttttagtttaaaaaaaaatccaaagaaaagaatcagatcagtcttattctgaactgtttataatattttcttacctttgtaaattttagatactatattgtaaatgctttatatgtcacatataaataaaatatcaaattccttattgaggttattttcaacatttgttttctgcccatccatgatttatgatatgaaattgcttacttacagattggaagaacagtgctatgctaggtaattagaaaaataatatttccaaatatatgtaatgaataacctatatttaataatattacttaagttttgcagaaaactcaatttttaactgttttatatttaaaaattaagagtactgatgatttctgtagggtgcacttctggtttatgggcatccgtgttttggtttgtgggtattcttatcgtttcataagttttttataagtcagtactgcattttcctctgcttttttttatacctcataaaatagaaaattggatttctgtcattaaggtttctcataattggtgtttatgtgagataaatgtggtattacaaggacagtaatattgtatttgggggcacagtgggaatgtagaagggcactggacttcagtaacaaaattaaaaagtagaagttgagtcttggccagcttcttacaagttacgctacctctttgagccttaccttgtaacttcctcacataacctgtgagccttacttcttttaaatggcataattctcttctcaaaggcagttgtgagaattaggtgcattttgtgaaagtgcatagtaaactgcaaatgccgtgtcagatatcattttgaggtttagcctgagaagggtaagttttaagcagtatgtacagtgggaaaatctgactgtacctcaacccaacattaaaacccagaattatcttggcttgtgttttctttggctagtttcaaaatttctttctttatttttttatgctcagctataatagaaatgagtcgtattatcatttctgtctttactctgcagtataccaatagcacttcactcacatctgtgacctgtgggttgtggagagaaataaggatgtactcaacagcttgcatctttcaacaaagaatacttttcagcaacactcatgagtttctcttaggcattagaaaatgcagacccttagacattaaactaaactcataaactcagtaatatttagtgagaaaattggaggaacaaatcactaaagttagattctgtgttctctgtaaatgccaacaactgtgagccatggagtagattagatgaccttggtttttatggtctaaaacattttctacagaatggtgcttactgaggagctgtttactgagaattggaataaaaggctgcagaattgtgtgaagcttgccctatatttatgaatcagatttttaagtggaagctgcagttgtttccttgtttgtcattcatgctttagcagaggatatgatgccatagagctggcttggtttgtagcttctcatttagggtttgcaccactttcttttcctttttagaggccacagcagttttgatgtattatcaaaccgcaaaatgtaccttgttgggtatttagcagaaggaaatgtgttgactattacacatcccttatctacagtgcttgagactgttttgaatttcttattcttatttttttttttgagtatttgcattatatatacttgcccattaagcatcccaaatccaaaaagcccaaatttgaaatgctgcagtgagcatttccttggagcatcatgtcagtgctcagaaagttttgaattttggaggactttggatttttgaatttggaatgctcagtctgtgtttgatagtttcattagtgattgtggcattcctgtttagtctcattttgaaaatacagcataaatttaaaaatgcatacatacatatgtccatacatattactacctattccatataggtagtatatagccatacaactgcagacacatggaaaacaattcttaaccttttgaatgtattagtttgtgtttaaagataatgttttatcttgtttaactggaatctaatatgttaaatctcttttattctaccttagcatcaaggcatgccatgggttgcctctcataaatggccaaagctgtgacccttatgcaacagtttctctagtgggcccttctaggtaatatttattgaattattattaggttttaaagttttgatgtttgatttaaaaatttaaaaagtaagattctacgagcaaatgataaatagctatttataacacacagtaataaatgctttgaaagaaaaatctttagtgagttctattatacacttgtcaataacaaagccctctttttacagacagaaattggtaccccattttaaatctgccatgctcttaggctttaaggaacaacttcagttttatactagtacaatgtagtactttaaaacataaacttgacttttcatgcatcagcattcctacttttcaaatatcctgaattttatgcatgtaaaatcctgttttaatgaatgccagttcagaataacaagacaatttatatatttttatctggaaggcagctcaggactgaaaattgccttttctactcatgaaatctgtcctctacagagagaattccaactgtagaaaaactgctgaagtactagagcatggcaaagtgtaccatatcattgatttaaatgatttataataatttgtgaaaaaacctatagcactttgtaatacggtgtgttatatgacttcattatgatttctttaaggaactgacacatctgaaatatgtctacaacttgaaggtttagaatcaggaagcaagaaacacagtattccctctacacacacatacatgcatacatacacaccccttttccccatccccagaatctctagttattcttactttgtagaaaatcactactaagtcactttgaaaaatgtatttatgtatgtatgtaaagtacctagtaccatgccggtatttattaggtgctcaaacaatagtatgctattagcagatactcagtcgtatgacattaaatgctattagagagatttatttttgtgtgttaaaaatgttcaatctagtggagctatttttgttttttttaataatctctacctgacaaattatttggtaacatacagttagagacaatttggcatatgaatttgtgttttaaaaagtctggccaggcgcaggtggctcacgcctgtaatcccagcactttgggaggccgaggcgggtggattacctgaggtcaggagttcgagatcagcctgaccaacaaggagaaaccccgtctctactaaaaatacagaattagctgggtgtggtggctcatgcctgtaatcccagctactcgggaggctgaggcaggagaatcgcttgaaccctgaggcgaaggttatggtgaaccgagattgtgccattgcactccatccagcctgggcaacgagcaaaactccatctcaaaaaactaaaaaataaaaagtcactgttggttttgctattgtactgtagttgtgtaagatgttaacactgggagaggctgggtaaaaacacaagatttccttatgcgttttttgtgacctcctctgaatctataattaaattaaaagatttttttaagaagtctctattatacctgaagcccaagaagtaagctgagttaagaatgtttttcaagttccttgggtatttttcaacatagatgaaggtgctctaaatcttattgtcttccttctatttattctgagttgcttatagaatagaatgtgtttttaaaacccctgaaaaaggttggcaatctagtgtgtccgtagagagaataatacaatcttggcacataggggatgcctaaagcttatatattctttgatttgagtttataaggacagttacttttttccaagcaatatttaaaactgaatcttccctgagtcaccttaacttttaaatggaggtcaggctccctggttggaaatagcatgttttataattgtgtactgttaagttctacaaggtaaaactctaccacattggaacaggaatgaccaaaagaagacaaaagtaaagaagaaaacaagcaatccgcagtttaatgaaatcttttattttgaggtaattttttgttttacgtaaatgttaacattaaatatgtaatatttaatgctagttgatttcttttttcaaaccacagtcatagtaatcattttatcaattaatgcagataagcatttctctcctgaaagcagtagaaccatggtgtgatgcaatggatgcccaatatataaaatgaataaaggcagagctctaatttgggagcaggaagggccagggccatacccactccccagtcatcctcactattcatgcccttcctttgcaccctcccttaccctacccagctccctacctaacacatagtggccacaggattcttctgcagggtaccctttgacagtcactagtgaagtaagtgtaattatcactcaagaaatctgagttccagtcaagttgactgaaagagtcactaaatgtgactcaagtttcttatcctgtgaaagaataatcggaagggaaactagcagcactacctgactcagagtttttgtaagacccaaagcatgtgagaatcctttgagaccataaaatactttatgattacagctttattattacttttttttttaagcctaattcattctgtggacgcctgcttatcttcatagacagcttcagctgccttgaagttgtcccaaatacagtttggacaaaagctttggagtgcttttctttggagcatttgttaaagaaatcctttttcatattatttgcaaactacagaaaaaaaaaatcaaactctcaaaaagattgtattctaataaagcatgttgcagttcatatcaacgtgtagggaaggtttgaaaaaaggagttacattttgtgccttttcttctgtgtgtatttttcttggtatttcacagtggagagaataacggtacctctagtcatgcctgattgctgtactttaataaaggaacacaggccgaagaaaatgccaaaagtgaagcaggaagaattgtggagggggaagcaagggagaaaaaaaaaacaaaagaaaaagtaccaatgtgagacttttccatttcctggctaaggacttggtgcagttgttctacgtttattaatggcggttgcatctaacctggagaaaacaaagaaggcagcaatgtaaagggccgctgactaaaggcactcacactccccattagcccacataccttaaacctcagctggatggaatctactctgcttcatggatccttacagtcagcagatgaccttttaaaagtagaaggcctgacctgcctgctgtagcaggagtacttgttaggccttgcaacattcattcagagggcctttagttggttataaagatagatacatttccatctctgtcctttaactgaagcaaggaacacaaagcagacatatgtatgcatatacacaacagtaaaatgcagtagatattggggaggtcagatgaactctgctccattaaaggcttgaagaaatattggattttctaagattgaggaaagagagtattagagatgacgaacattttgagcagaggcacagagacagaaaagcagaaagttatgtccaaagtacagtgagtactgattttactgggcttgtgtaaggaaataatggaaactaagattagaaaggtagagtaagaccagctgatgaaaggccttgagtgcctagttatggtgcttaagtaaatgattttgagcctataagttatgagtaaaacagtgtttgggaaggaattaactatgatctgaggtccaggtggcttagggagaaagaacaaagctggggagactgttgtactttaggtgtaagaaaaatggggaggggatggggtatctttcaagagagtgctatggaaatagagaggaagaggcagataaaagagagaatgcaaagggcaaggtaacaaattggttatagaaaaaaagagaaaggaagtagttgaatgctgcccccaaggttccaaatctggaaaaatagaagagtagggaagaaggaaaataaaagtggcttagtttggagcataattagcttgagggctgacattttaaatcctccagtagggagtttatgactgaaacttaatatgagtgatagttattgaccaacactcaaggtttgtttatataaacagccaagaaagccaagagaatagaggtatacaatacaggagaaaagtgaagaaactaatttctgcgactcaagtatttaactttcagcatgtcatttaatttctgtacttcagcttcctcatttttaagtgagggtaataaatctagccctgtccgcctctgagcagcgttctgatgaacaaaggagataatgcatgtgaaagcactttgtagattgtacagcactgtgcagctccaagttgtttttagtgcaaaataaaacataaaattttgaagaataatttatctatagattctgaaaaagaaacaaagacagcagcataaggttgccaaggtagtgcccaggtaaattctatagagtgtttctgggaaaggagatacagttgtatgatcactaaattaaataggagatcaagggaggtaagaactgagaatttatcgtcagatgtggtgatgaagagagattttaggagagtgatctgtgaggaagccaagattataaggagttactatagtgagtgggtggtgaggaagtacaagctgtaaggatggattgcagttttcagatttgtctaagaaaggaaagagataggaagaccataatttaaggggagaatttttcttagacttgagtgagatgaacaagctggtattattttgattttttttttacactaccttattcttttctgctacttccatagttgcttttatattcagctattgagtaaaatattacttggacattttcctctgcttttatccacaattgaatattttgcagatgatcatttttaagctgtaggaaaaatgtatttttttaaaaaaaatttttactaaaatattttgtttacaggtaaccagatccagtagttacaccagaaagtcccagttccaggtagaagaggaggacattgaaaagctagaaatcaggtatgtgccttggggttttacagaattgcttttttgtataccaaaagaaaatcctagattcaaccaaaaaaagtaaaccaactttaatagaattctctatagcaagttggttgatgaaacttagaggaatatgcaactaatttaaatccagattatctttccaaagtctgatttgtttgcagaaatagtcaaagtgtattaattttataaacaaagatgatctaattttcatctgttttattgtattgatttttaatttttcccaaattgttccttacatttctggattatagtgtaatggatggaaaggaagttatatctcagccaatttagaaatttttttttattcttcttaacatatctgctgtctaacagaaatttcagtgaggtaagaagataattcaacaggtgcatgtgtttgaagtttgtgctgtttcctgggtcttaaatatctatgccctttgcgaaggaaaaatcttataaatgcatgtgtaggtgtgatgttaacagtgtgttcatctagatggtatattaatcatgtgtttggagtgatcaggtaatgtatttttctaatttttctatatatatattaattggtggtaatctagagagaaactgtagtcttattgtagtttctttctgtagtccttattgctataggttaaaataaagcctcgactttcaaactaagacagtttaagtgccttctttcagactatttaaaattactttctgtgctttttaaataaaagctgctgtagtattttgcttctctagtctggatagtgaggtatgtatatggtgttgctaacatcttttaagcatgtaaaattaatgctgtaatacagatcaaagtaatttgaagctgttttgtggtgtgaactctcttaaacattgtttgcaaaacataaagccagttttcaattttcaggatcgacttgtggaacaatggaaacctagtccaagatgttttcctaggtgagattaaggttcctgtgaacgtattaagaactgattcctctcatcaagcctggtaagggcccagcattttagtgaactccatagtttaattctctttagtacagtatatatatgcaaataaatgcttactctgaacatattttaaatttgccatgtaataagctaaacgtcattaatattgatatgttcattaattcattgttgcagaagtaaattgtaagttttatgacttgacctgtggtactgagataaaagaactgaatcatctaggaatatttttctgttcagaagtgaagacgactcttaaggagaaaaatgggaaacatttaaaacattacataagagttgttcatgtaagaaaacgcttggtcacaaatcagtgtctgcatttcagaagttttattagtggtcataggaactgtgggtatttgaaagcaaaggattttatttaggggactcagttgtttatgggaactaaccactgttcttccttcaccacaccccattgaaatgtactgtagatggccctaatgttactttttgaatgtctaaggtcttatgttgttgagctggcactttttagggctcttggttttcaataatgactataatattattttagttttcagtgactctaataataacattacactgatgttaaattcaaattaatgttcagacattacattgagctagtttccttagcagaatcaatgtgaaactattgttttttttctgtctatagcacttaaaagcgtgtgtatcctttcagtatgttgcccagcatctctcttgctagattttggtttcaactgggtataaatgaacatgcctttctcatttgccttttaaggagcactttttggatctcagtttctgctgcctcaaagaggagtgtttaggtgtttcttatggatatcagtttcatctgttcctaaaagagcctgcctcttctgattggccatcagacatcttcattttagagtcttgtcctagagcagttatcacttgtagactgatatggagactctcaaaatttttactttatttttgcctctctatagtccaaggcagatctaagatttattggtctttatgttggcattttgtgtattatagtttgtaaaatgcatccacagagggggaaaaaaatcaaatgtagtcactatgaaaaattgatgaagatttgggacctgtcatcctcccactacaccatgtcttccaccttccatcaaatagcatacattttaaaatgaaaatttctgagctcagtttgtcaagtttttaaaattatgtgccagaccactcagtacagaagagaaaaacacgttgtagtgcctccgggtccctcaaaatgaacttgaaatgtgccacataatctgttttttaagtaagactgtctccagagatgccttccaaatttggcaaaactttgtgcagcttccttggcagtatgtaagaacattaacaaactaattttatttttatagatgtttttggcccatgatattttaaagtaacctgccagaaatataagtgctgaaatttatatagcatgaaataggaacatctggtaattcatatataattccacagttgtaaggaaacataaaaatgtgaatgccatttcttttaagttggaaataaaactcttaacctcctccatcaattgtagagccatagcatccccttgtggggttgttagtaactgcatgaaaactcaagaaaagatttatttaccctcaggatttcaggcaaattctttctaatgttgatgttaagagagtaatcatcagtaatttaattctgttgtttgaaaagtctcaaaatagattaatttttaaatttgaaagtaagattcaaataatagataaaatgaattactgggtttttcttttcaacagaagcactttatacatgattttagactagatgaatatttgatatgatttagctttccagtttgttaattttgacaccttttgtcctcaaacttttttttgtgggggggcggtcttactttttttgagacaaagcctcactctgttgtccaagctggagtgcagtggcatgatctcggctcactgcaacctccacctcccgggttcaagtgattctcctgcctcagcctcccaagtagctgggacttcaggcacacaccaccatgccgagctaatttttgtatttttagtagagacggggttttaactatgttggccaggctggtcttgaactcctgaccttcgtgatccgcccacttcggcctcccaaagtgctgggattgtgagccattgcgcccagcctttggtctcacatttttaacgtatctgtttaatatttgaatttagaaaatataacaagtctcctgtnnnnnnnnnnnnnnnnnnnnnnnnnnnnnnnnnnnnnnnnnnnnnnnnnnnnnnnnnnnnnnnnnnnnnnnnnnnnnnnnnnnnnnnnnnnnnnnnnnnnnnnnnnnnnnnnnnnnnnnnnnnnnnnnnnnnnnnnnnnnnnnnnnnnnnnnnnnnnnnnnnnnnnnnnnnnnnnnnnnnnnnnnnnnnnnnnnnnnnnnnnnnnnnnnnnnnnnnnnnnnnnnnnnnnnnnnnnnnnnnnnnnnnnnnnnnnnnnnnnnnnnnnnnnnnnnnnnnnnnnnnnnnnnnnnnnnnnnnnnnnnnnnnnnnnnnnnnnnnnnnnnnnnnnnnnnnnnnnnnnnnnnnnnnnnnnnnnnnnnnnnnnnnnnnnnnnnnntccattctcctgcctcagcctcctggtagctgggatgacaggcatccgccaccacacccagctaatttttgtatttttagtagagatggggtttcaccatgttcaccaggctggtcttgatctcctgacctcttgatccccccgcctcggcctcccaaagtgctgggattacaggcgtgagccaccgcacctggcccacgttcagttattaatagaactgcttctttattctctcatttacatagcattatgtacaaataattgcactttgggtttgtctacctcaattttaattacacagaccctatggttagaattgtttaaatgctgatttttttctgttaagggactgtcaaaactgcttactcttgagagcataaggattgcttttatgcctgtgaatgaaaagtacatgtttagagcaactgaatgctactttcagttaaaaatttctctttattccctgtttctttttctttcaaacggaaatatttcattcaaaaactgacatatatatatatgagttttttgttttgttttcacttagaaatgccagatagtcctgaactatttaacaaatcttgagccttttctctttagctctaattcatacagaattatttaattcacaaggatccttcaggcagtttattaaattgagcttttgtaataatattttaaaataatcacatttatatagttatacaaatgactattgatagttattcatatatttaagtggtaatagttatacatcacatatataaatgttatatgtgtaacatttacatagtgattactgtgtgccaggaactattctaagtactttacttataataacttttttagggctgttgtagggttttaatgtgttaagacactattaatactccttatttgacaaatgaggaaaaagcacagagaaatttagcaacttgtctaaggtcacacagctgggatttgaaccaaactgtttgaccccaaagtttgtgcttttaaccagtgtactgtaagtttgaactctggcatatttctgaatatatttaaaactcaaaaacattcttttaagccattagcaaagatttgagtgtcccttgcttataaaatattatataaaagagaatcagagagttccctactcatttaaaaaatgatcttttcaagggatgggtaaaacaacaacatgttgtgaagtctttttttttttttttcaagtagacatagatgagatattttgtctatggggatttcttatcctgcaaagaaaatccaaggaaacaagtttagaaagtatggcaggagtgaacccttctggagttcttaagcatccaaaaacaatgtatgcataaaaatgagtaattggtatagcactaccctaattcctctacatagaacaatgctatgttaagactgtaggcctggtaattttcagttatatgagagtaaagagggatgtcatacccctccctcagttatttggagctaaaggaaataaagttgcgctctgagcaaaatttctgtagtaaaaaccaaaacagagtttgttttgactgtagagttcagagacactgtttaagatggatagggatggtcccagagaggcagaaccagttgtaactgagtaagcagtaatacaagtaatgttaatctactgtgcatggaaaacattagttcaataggaggaaaagattcatctagagtaataaaaaaggattccaaagaggtaggcatggtactgcctattcaagcacaattgagggggtaggggattctggtccagaagaattactgtttccttggcaagactgttgtcttagctgagagattcttaaggctgcataaaactccttgtcatgcctctgtactcaccacaacgccttttgataatttgcctttccaaatagcctaccaacaggtaaaaaaatacagtgaaagatatagatgaaaaccctatggtaaatggtgataattgttgtaaccaagtgacaagcacatgggggtggtggtaagaaagggtgttcattattactattatcactcttctccctacttttgtaagtgagcatttctataataaaatgcattggtcacttaacaatccaggtacttatgccacttgactatatttctttttcataaatttaataattgacctgcttttaagtatatcaggctctgcactcagtcattgcaattcaggtgcaccttattctttttttttatttttttgagatgcagtctctctctgtcgcccaggctggagtgcagtggtgcgatcttggctcagtgcaacctccacctcctgggttcaagcgattctcctgcctcagcctcccaagtagctgggactacaggcctgtgccaccatgcctggctaatttttgtattttggtagagatggggtttcaccatgttggccagcctggtctcgaactcctgacctcaggtgatccacccgccttggcctcccaaagtgctgggattacaggcgggagccaccacacttgaccttcaggttcactttagatgtgctgataaaacgagatgtctgaatttgcaaggttgccgaacatgccctggattgtgaaaaattgaccaaagtatcaattgtcaggatgcttggtcatcaaccagctaaacttcctgatgtggtttggctgtgtccctacccaaatctcaccttgaattgtaatcatccccacatgtcaagggcagggccaggtgaagataattgaatcatcgggtggtttcaaatccccatactgtgcttgtggtagtgaataagtctcatgagatctgatggttttataaatgggagttctcctgcacaagctctcttgcctgccgcatgtaagacgtccctttactcttctttgtcttctgccatgattgcgaggtctccccagccgtgtggaactatgagtcaattaaacctctttcctttataaattacccagctttgggtatgtctgtattagcagcataaggacagactaaatacacttcccttagaggtacttctgagtcacctttgctaacaggcttgtttctaattatttcattgaccatatctttacatcactatttcttaaatcagacagtagatgttctgaaggttgatcttcctcttttgtgggatagtgatgtaatttcttcttgtattaaccatcccttcatcctttaaatttgccttggttaattcgctagttgtcttttctgtctttatcttatctttctcaaagctaataaatgttctattaaagccttcctccttctatttttaaatgaattaatatattagaggaggtcatagctgataaatatataaattaagtattaaaactactatttcttttataaaaagcatctcagcattccagctaagtgaaggaggagtgatagagttataaaattatcattttgatgattaatggctctaagccgtgatcatcagtggctgctgatattgcaaaaggagaaacaaccagacatttatgcctcttggtagaactacacagcattatcaatgaagcattcttgccagaacatcaaatctgaatctaaccaagcctctagatctaactaccaatatagaggaaatacagagaggatgaaggaatatggtaaatgacattgtggaggtagagataagagttaacacaattccaaaggtggaaaactctataggaccaacagtgaggaatctataaaagagacttaagaatgctattaccaattctaatctatggaccttatttggattcgaacaaactgtagaaaaacatttatgataagtttggggaaatttgaatactaagtgaatagtgatgactttttaaaattatatatgaaattatacctggaaattgctttaaaataataatgcaggaacaggatgggagagtgagtgaaggtatggctgaaacaagatcagtcttttattaaaaaaaaatcagtgtatgtatttttaaattttgtttggcattgcctttagatagagaatagagaagatggcagcttttttctcatgttagttagaaacttctaattgctttcaaaaagtgacccaaggcttcaaaaccaaagcattcattcactcactctctagtcaatatccatgggaatgtctactactaagcccatgtgccctattctgacctatctactaaaaataaaatcgtgggttcaaacagcaatgcttaaaaaaactcaaactgcttaaaaatattgcacctgtgaatctgttttagtatttttagggaattactttactactgggctttgtaattttaaactttagaaaggccttagcacaggatttataaaacttgaaaactatgagtataaataaataattccaggccaggcatggtggcttacacctgtaatcccagcactttgggaggctgaggcgggtagatcacctgaggtcaggagttcaagaccagcctggccaacatagtgaaaccctgtctctactaaaaatacaaaaattagcccggtgtggtggcccgcgcctgtagtcccagctactcgggaggctgaggcgggagaatcgcttgaacccgggaggcagaggttcagtgagccgagagcatgccattgcactccagcctgggtgacagagtgagactctgtctcaaataataataataataataattccaaacattctacattcttagataaaatatgtaatttatttctcaaacagtataggggaaatattgacaacatttaaaatgcattttaatgtattttaaaactttttaaatgtatttttaaaacattaaaatgcattcttaatgtattttacatgtattcacaaaatataagaaaatgcaattcgtgtcataattgtgacatgataccaaaggagaaaatccctccctttactgtagcaagtgtataccatagaggcagtgagtaagagaggaacagaatagagcagtaacaagatgaaaatggaaagacaaactcttcctcagtataagtaaccagtgctataaatttgccgtgcctagtacaaatgttgaacaattgtataaacagaggttgaggattttctgcaaataataaaagaaatatcagtgcagattattctgggagaagaatggcaaagaaaatccacaaaagcattttagcaggacttgggtaacagaggactgagagagagaatttcccagacccaaaaagcaaataaataattttccccagtctcttagtaaggagggttgaaattaaattcaaaattttaatgtttgctgtttattgctttctgaacacaattatttttaagttacttatggcctattaagctgtatagcattttcacttcacaagacagtacaattatttttcattatattcataaatacctctcttaaagaactcgagtccattcattgcatgaatattatgtacccgttaaaaagaacaaactggatctatgaaaagtagtttcaaagagttaactaggaagtgctttcaggtaaaaaaaacaagatacaggagagtagaatatgataacatttttgtaaactgactaataggctcagaactcatttataaatgtgtatatatgcacacattttaaaaaatctatataaaattatataagcatgaagaaaatagagaagggtccatagtaggtagttaacaggttcctaagagaagcggaggtgcagaatggtagtgttttgaagataggaaaaaagataagagaaaaacaaagttaaaagagaaaataaagaaaacgttccttaaaaaaacaaaagcattgatttgatgacattgtttatatatgtatgcatcgttatctatttgtctatgtgtagtaaggattttttaatattaaataaagaagattctggttcaaagagtgatgaaaatagtaagtggcactccacacagattctttcttggttcttgaagtttgagcttcactacaaaaagaatctccattcagttgcttttatctaccctacagcgtttgttaatagcaaatccaaatttgtaaatttaatttggagttatttctgaaaataaattttgtgggcaatatgatgataagccacaggaaaaaaaatatgcagataaatatttataaataaattcctttaatatattctaattgtgatagtttctgcagcataatttaaaattatgctattttcagtgtccaaataaggatgttatcagtgttagtattgatcatctggctgcacatagtaacttaaaataattttgttttagaatatactaataaaagacatatataatacagtttttctgcagtttggtttctggttatagttaagtaaagcaaagattcactattttatatacagcacaagaaaacgcctttttaaaataatgaattattgaagaataagaatacagttaagtttttttcctggatgtttttagatattttgctctaatggaataaaggggatgaagtatttgtaatgggcatattattttagataaataaatttttaagagtttgaacaattttttaactcctggaactcttgtgatatcttgaatgagtagcaaacttttttttttccagtcctagaaagatatattttggctaaagcccagcaattctgaagttttaatgaccaaattagttgagttcaattgtttttgccaacttaggctactttaagagtaaaaattgcctttctctaatcctgatatagtctagaaaaaaataggtatttacactaacaacaaatcataaatttcaaatttaggcaagcatattgctgagtatccccccaaaaaggaaatatgaatacttgattgtcaatggtactttacaatttttatcagccttcatccaattttgttttgttttgttttttaattttagattcaggggtataggtacaggtttgttacatgggtatattgtgtaatgctgaggtttaggcttattatcccttcacccaagtagcgaacaaagtaccggatggttttttcaatccctacccccctatctccctccccacttttggaacccccagtgtctattgttaccatctttgtgtttgtgcatacccagtgttcagctcccacttacaagtgagaacatagggtatttggttttctgtttctgcattaattcgcatagggtagtggcctccagcagcatccatgttagtgcaaaggacataatttttttctttctgtgactgcgaacaagattagtcttcagttgataattgtttaagctagataatgggtacatgagcgttcaatattctcttttgtttgtgtttttaaattcccatgataaaaagctttttttttttttttttaaactcttagatttctggttttggtcctgcaaatttctcttaagttcaaatttttggaaaaagaatttactttaaaacaaggttacttacgcattctgatatgtcttatctacttttttttttttttgagacgaagtcttgctctgtcatccaggcaagcccagactggagtacagtggcgggatctcagctcactgcaactccgcctcctgagttcaagtgattctcctgcctcagcctcccaagcagctggattacaggcacctgccaccatgccggactgatttttgtatttttagtaaagacagggtttcaccatggtggccaggctggtctcgaactcctgacctcaagtgatctgcctgcgtcagcctcccaaagtgctgagattacagtcatgagccactgcacccggactgtcttaattttcagctaaatgcctctttcttaaatttagttggtaaaaatttatttttgataatacattggattttaaatgtttaccttttattatcattttttctaaacctgcaagctaatcaaactcttgttcaactcctttgagatcttaatttctgtaatatctatgctttttgtttcctggataaaaatgtgtttatagctttgtaatccaatgtataaccaatattagttttctgaagatgagtatcctgctacttatgaagcttcctaactgtaaatactaagttgacttttttggtttagtttttttataacttaactcttaacttgcctcattggcttgaatgcatttccatcacatggaatcacttatatttttactttaggtacttgctacagccaagagacaatggaaacaagtcatccaaaactgatgacctggggtctcttcgattaaatatatgttatacagaagactacgtgcttccttcagagtactatggtcctttgaaaactttgctgctaaaatcaccagatgttcaagtatgttaagaatcttaaggatatgatttaacacgaaacggctaaaataattctataaatgataaggaaaagatttcaagagtatcaagtcttattaaaacagtaaaaattatatacatacatatatatacacacacacatttctatttatctgaaccagagtactatgattcctacatgtgctcccacaatcatctctgataaaaaatttcgaaaattaaatgtcctgtataacagctttagtgacattatttcagttacttttacaggctagtgattgaacagttaatcatgtttccttgatgtttgtgcttgttttctacctttctgtatttagccaatatctgcctcagctgcttacattttgagtgaaatatgtcgagataaaaatgatgctgttttgccccttgtacgactgctgctgcaccatgataaacttgttccttttgccactgctgtggctgaattagacttgaaggatacacagtaagagttatattttattaaatgttaattacatgttgttgaaattggaccttagtttgacagattgattttgtagtctgaatttttttgtattgatcagccttactgtatagtaggctgaaaagaagtacttaacaaataacaaaaggcagttaagctatcaaacagtattcacctaccttaaggacaacaattaatgaaggatgtttttctttaactcaggaaatttcatttgttactaatctgcttcttagtgtaatggttcacgtgtcacaagttaaaacaccagagcagaagtgtttttttctttattcattatgtatcacccttatatgcatatgtatgacattctaaaaagcagtcaagtgacttctcattcacgtcatagtctaacactgttgtttttttacacacagagacatacatatactccacatttttggttcataaacatgatttgcctttttaaaaaaacatatatatatatatatatatatatatatatatacacacacacacacacatatgtattgagttttttgtttgtttgtttttaagacagagtctcgctttttcacccaggttggagtgcagtggcatgatcttggctcactgcagcttctgcctcctaggttcaagcgattctcatgcctcagcctcctgagtagctgggattacaggcactcgccaccacgcccagctaatttttgtatttttggtagagatggggtttcaccatgttggccaggctagtctcacactcctgacttcaagcgatccacctgcttcggacccccaaagtgatgggataacaggcatgagccatcacacctggccattattttaatatatttttggtaagtttgaaaaacctaatggcagcaagcttttaaataaatggtaaaaattactaaaattgtaggtcacttatgccttctagtatgtcttaatctatttcagctaaatgcttctttcttaaattggtcaagtatgttatattattggtttcaaaacctttgtttactacatttggtttcatctatttctatttcagagatgcaaacacaatttttagaggaaattccctggctacccgatgtctggatgagatgatgaaaatagtgggagggcactacctgaaagtaacattaaaacctattcttgatgaggtacagaatatatctccaacaatgatagtttgtggccttatgatagttgttcttttatcaagtgatctattgatgggaaggatttattcattcatgtgttactgaaaaaatagactgaacactttagaagcaaattatttacttctctgtcaatggatttttactcaaaaggtacagtatagtataatctacattatttctttgttatgggatttctattttagctagagtttcaaatatatgacaaatactttttgatatcatgttttaagaaaattgtatatgttatccctgcataggacattttacgctttgctacagtttaaatttctataattaacttttattatcagaaaaataagttattttcattttgtcagactacttagaaaaaaatcattaactgaaaaatttatttttcagatatgtgactcctcaaaatcctgtgaaatcgatcctattaaattgaaagagggagataatgtagaaaataataaggtaagtccttgttatattatttataattgcattaaaattggtcttaatggtgtacctttctcccacttacattatgataaagccatatagagggaagcagtgctgtttattcttcacataagcctttattattagcagcacttccagctcctaggattagtttttagaatgttatttcctcagtggtttcactttatttttgttcttgattgtctctttttggctctagtaacaatagtgaacttaagctatagctagttgcagcccccgttctagccattcctttgggctcaaactgatcaggctaagtgacacagtgactttatcagtcagtagtttcagtggcctctgaaaaaacaatgattgtgttagggtcacaaatttttattgcagtggataatagtgtcacaatgtccttgtgcttgtgtatccgagttattttgtgatttccttttggatcattttattccctcttgcttcttgtgaggtttattcatagattcacctcttacgcctagcaaatctaaatttaatttattaaattaagtca

SEQ ID NO: 71 - DNA, 2592 bp, Homo sapiens
atggcggcggcggcgcctgctgctgcggcggcttcttccgaggcgccagcggcgagtgcgactgcagagcccgaggccggggaccaggacagtcgcgaggttcgagtgttgcagagcctgcggggcaagatctgtgaagcaaaaaatttattgccatatcttggaccccacaaaatgagagattgtttctgtaccataaatttggaccaggaagaagtttatcgtacccaagttgtggaaaaatctttaagcccatttttcagtgaagaattttactttgagattccaagaactttccagtatttgtctttctatgtttatgataagaatgttttacaaagagatctccgtataggaaaagtagccatcaaaaaagaagacttgtgtaatcacagtggcaaagaaacttggttttcattacagcctgttgactccaattcagaggttcagggtaaagttcaccttgaattaaaactgaatgaactgataacggagaatggaactgtatgccagcagcttgttgtacacatcaaggcatgccatgggttgcctctcataaatggccaaagctgtgacccttatgcaacagtttctctagtgggcccttctaggaatgaccaaaagaagacaaaagtaaagaagaaaacaagcaatccgcagtttaatgaaatcttttattttgaagtaaccagatccagtagttacaccagaaagtcccagttccaggtagaagaggaggacattgaaaagctagaaatcaggatcgacttgtggaacaatggaaacctagtccaagatgttttcctaggtgagattaaggttcctgtgaacgtattaagaactgattcctctcatcaagcctggtacttgctacagccaagagacaatggaaacaagtcatccaaaactgatgacctggggtctcttcgattaaatatatgttatacagaagactacgtgcttccttcagagtactatggtcctttgaaaactttgctgctaaaatcaccagatgttcaaccaatatctgcctcagctgcttacattttgagtgaaatatgtcgagataaaaatgatgctgttttgccccttgtacgactgctgctgcaccatgataaacttgttccttttgccactgctgtggctgaattagacttgaaggatacacaagatgcaaacacaatttttagaggaaattccctggctacccgatgtctggatgagatgatgaaaatagtgggagggcactacctgaaagtaacattaaaacctattcttgatgagatatgtgactcctcaaaatcctgtgaaatcgatcctattaaattgaaagagggagataatgtagaaaataataaggagaatctgcgctactatgtagacaagttattcaatacaattgtaaaatcaagtatgagctgccccactgtaatgtgtgatatcttttattctctaaggcagatggctactcagagatttcctaatgaccctcatgttcagtattctgcagtgagcagctttgtatttcttcgtttctttgctgtagccgtagtatcacctcatacttttcatttgcgacctcatcatccagatgcacagacaattagaacattaactctcatctcaaaaactatacaaactttgggaagctgggggagtctgtccaaaagcaagtcaagtttcaaagagacattcatgtgtgaatttttcaaaatgtttcaagaagaaggatatattatagcagttaaaaagttcttggatgaaatttcatctactgaaactaaagagtccagtggtacgagtgagcctgtgcacctgaaagaaggtgagatgtataaaagagctcaaggaagaactcggattggaaaaaagaattttaagaaacgatggttctgcttaacaagcagagagctcacctaccacaaacagccaggcaaagatgcaatctacacaatcccagtaaaaaacattcttgctgtggaaaaactggaagagagctctttcaacaagaaaaatatgttccaagtaatacatacggagaaaccactctatgtccaggcaaataactgtgtagaagctaatgaatggatagacgtactctgcagggtgagccgatgcaatcaaaacaggctcagtttttatcatccctctgtgtatctaaacggaaattggctctgctgtcaggagactggtgaaaacactctcggctgcaagccatgtactgcaggtgtccctgcagacatccaaatagatattgatgaagacagagaaacagaaagaatttattccctttttaccctcagtttacttaagctgcagaagatggaagaggcttgtggaactattgcagtctatcaaggaccacagaaagagcctgatgattattctaactttgtaatcgaggattctgtaacaacctttaagacaattcagcaaataaaaagcataattgagaagctggatgaacctcatgaaaaatataggaagaaaagatccagtagtgcaaaatatgggagcaaggaaaatccaattgttgggaaagcatcttagagtttaacagattggttcagaagaactggaaaatattatttt

SEQ ID NO: 72 - DNA, 2550 bp, Homo sapiens
atggcggcggcggcgcctgctgctgcggcggcttcttccgaggcgccagcggcgagtgcgactgcagagcccgaggccggggaccaggacagtcgcgaggttcgagtgttgcagagcctgcggggcaagatctgtgaagcaaaaaatttattgccatatcttggaccccacaaaatgagagattgtttctgtaccataaatttggaccaggaagaagtttatcgtacccaagttgtggaaaaatctttaagcccatttttcagtgaagaattttactttgagattccaagaactttccagtatttgtctttctatgtttatgataagaatgttttacaaagagatctccgtataggaaaagtagccatcaaaaaagaagacttgtgtaatcacagtggcaaagaaacttggttttcattacagcctgttgactccaattcagaggttcagggtaaagttcaccttgaattaaaactgaatgaactgataacggagaatggaactgtatgccagcagcttgttgtacacatcaaggcatgccatgggttgcctctcataaatggccaaagctgtgacccttatgcaacagtttctctagtgggcccttctaggaatgaccaaaagaagacaaaagtaaagaagaaaacaagcaatccgcagtttaatgaaatcttttattttgaagtaaccagatccagtagttacaccagaaagtcccagttccaggtagaagaggaggacattgaaaagctagaaatcaggatcgacttgtggaacaatggaaacctagtccaagatgttttcctaggtgagattaaggttcctgtgaacgtattaagaactgattcctctcatcaagcctggtacttgctacagccaagagacaatggaaacaagtcatccaaaactgatgacctggggtctcttcgattaaatatatgttatacagaagactacgtgcttccttcagagtactatggtcctttgaaaactttgctgctaaaatcaccagatgttcaaccaatatctgcctcagctgcttacattttgagtgaaatatgtcgagataaaaatgatgctgttttgccccttgtacgactgctgctgcaccatgataaacttgttccttttgccactgctgtggctgaattagacttgaaggatacacaagatgcaaacacaatttttagaggaaattccctggctacccgatgtctggatgagatgatgaaaatagtgggagggcactacctgaaagtaacattaaaacctattcttgatgagatatgtgactcctcaaaatcctgtgaaatcgatcctattaaattgaaagagggagataatgtagaaaataataaggagaatctgcgctactatgtagacaagttattcaatacaattgtaaaatcaagtatgagctgccccactgtaatgtgtgatatcttttattctctaaggcagatggctactcagagatttcctaatgaccctcatgttcagtattctgcagtgagcagctttgtatttcttcgtttctttgctgtagccgtagtatcacctcatacttttcatttgcgacctcatcatccagatgcacagacaattagaacattaactctcatctcaaaaactatacaaactttgggaagctgggggagtctgtccaaaagcaagtcaagtttcaaagagacattcatgtgtgaatttttcaaaatgtttcaagaagaaggatatattatagcagttaaaaagttcttggatgaaatttcatctactgaaactaaagagtccagtggtacgagtgagcctgtgcacctgaaagaaggtgagatgtataaaagagctcaaggaagaactcggattggaaaaaagaattttaagaaacgatggttctgcttaacaagcagagagctcacctaccacaaacagccaggcaaagatgcaatctacacaatcccagtaaaaaacattcttgctgtggaaaaactggaagagagctctttcaacaagaaaaatatgttccaagtaatacatacggagaaaccactctatgtccaggcaaataactgtgtagaagctaatgaatggatagacgtactctgcagggtgagccgatgcaatcaaaacaggctcagtttttatcatccctctgtgtatctaaacggaaattggctctgctgtcaggagactggtgaaaacactctcggctgcaagccatgtactgcaggtgtccctgcagacatccaaatagatattgatgaagacagagaaacagaaagaatttattccctttttaccctcagtttacttaagctgcagaagatggaagaggcttgtggaactattgcagtctatcaaggaccacagaaagagcctgatgattattctaactttgtaatcgaggattctgtaacaacctttaagacaattcagcaaataaaaagcataattgagaagctggatgaacctcatgaaaaatataggaagaaaagatccagtagtgcaaaatatgggagcaaggaaaatccaattgttgggaaagcatcttag

SEQ ID NO: 73 - DNA, 23243 bp, Mus musculus
  misc_feature (491)..(5362): "n" at positions 491 to 5362 can be any base
  misc_feature (8773)..(8792): "n" at positions 8773 to 8792 can be any base
  misc_feature (11227)..(11300): "n" at positions 11227 to 11300 can be any base
  misc_feature (13245)..(13804): "n" at positions 13245 to 13804 can be any base
  misc_feature (14949)..(17597): "n" at positions 14949 to 17597 can be any base
tgcctatagtttcagaggctgagtccattatcattgtggaagcatagcagaaggcagacaggagttggggcactatctgagaccttgatatcctgatccataaggcaaaaagagacacatgagcttttgaagcttcaaagcccagcccagccccagttgacacaggtcctccaacaaggctactcctcctaatccttctcaaatagtgccctaccccttgatggctaagtattcaaatagatgagcctatgggccattctttttttttttttttttttttttttttagttttcaagacagggtttctctgtatagccctggctgtcctagaactcaaactgtaggtagaccaggctggcctgaattcaggaatcagcctgcctctgcctcctgagtactgggattaaaggtgtgcaccaccactgcctggctgggccattgttattcaaaccaccgtgtgtgtgtgtgtgtgtgtgtgtgtgtgtgtgtgnnnnnnnnnnnnnnnnnnnnnnnnnnnnnnnnnnnnnnnnnnnnnnnnnnnnnnnnnnnnnnnnnnnnnnnnnnnnnnnnnnnnnnnnnnnnnnnnnnnnnnnnnnnnnnnnnnnnnnnnnnnnnnnnnnnnnnnnnnnnnnnnnnnnnnnnnnnnnnnnnnnnnnnnnnnnnnnnnnnnnnnnnnnnnnnnnnnnnnnnnnnnnnnnnnnnnnnnnnnnnnnnnnnnnnnnnnnnnnnnnnnnnnnnnnnnnnnnnnnnnnnnnnnnnnnnnnnnnnnnnnnnnnnnnnnnnnnnnnnnnnnnnnnnnnnnnnnnnnnnnnnnnnnnnnnnnnnnnnnnnnnnnnnnnnnnnnnnnnnnnnnnnnnnnnnnnnnnnnnnnnnnnnnnnnnnnnnnnnnnnnnnnnnnnnnnnnnnnnnnnnnnnnnnnnnnnnnnnnnnnnnnnnnnnnnnnnnnnnnnnnnnnnnnnnnnnnnnnnnnnnnnnnnnnnnnnnnnnnnnnnnnnnnnnnnnnnnnnnnnnnnnnnnnnnnnnnnnnnnnnnnnnnnnnnnnnnnnnnnnnnnnnnnnnnnnnnnnnnnnnnnnnnnnnnnnnnnnnnnnnnnnnnnnnnnnnnnnnnnnnnnnnnnnnnnnnnnnnnnnnnnnnnnnnnnnnnnnnnnnnnnnnnnnnnnnnnnnnnnnnnnnnnnnnnnnnnnnnnnnnnnnnnnnnnnnnnnnnnnnnnnnnnnnnnnnnnnnnnnnnnnnnnnnnnnnnnnnnnnnnnnnnnnnnnnnnnnnnnnnnnnnnnnnnnnnnnnnnnnnnnnnnnnnnnnnnnnnnnnnnnnnnnnnnnnnnnnnnnnnnnnnnnnnnnnnnnnnnnnnnnnnnnnnnnnnnnnnnnnnnnnnnnnnnnnnnnnnnnnnnnnnnnnnnnnnnnnnnnnnnnnnnnnnnnnnnnnnnnnnnnnnnnnnnnnnnnnnnnnnnnnnnnnnnnnnnnnnnnnnnnnnnnnnnnnnnnnnnnnnnnnnnnnnnnnnnnnnnnnnnnnnnnnnnnnnnnnnnnnnnnnnnnnnnnnnnnnnnnnnnnnnnnnnnnnnnnnnnnnnnnnnnnnnnnnnnnnnnnnnnnnnnnnnnnnnnnnnnnnnnnnnnnnnnnnnnnnnnnnnnnnnnnnnnnnnnnnnnnnnnnnnnnnnnnnnnnnnnnnnnnnnnnnnnnnnnnnnnnnnnnnnnnnnnnnnnnnnnnnnnnnnnnnnnnnnnnnnnnnnnnnnnnnnnnnnnnnnnnnnnnnnnnnnnnnnnnnnnnnnnnnnnnnnnnnnnnnnnnnnnnnnnnnnnnnnnnnnnnnnnnnnnnnnnnnnnnnnnnnnnnnnnnnnnnnnnnnnnnnnnnnnnnnnnnnnnnnnnnnnnnnnnnnnnnnnnnnnnnnnnnnnnnnnnnnnnnnnnnnnnnnnnnnnnnnnnnnnnnnnnnnnnnnnnnnnnnnnnnnnnnnnnnnnnnnnnnnnnnnnnnnnnnnnnnnnnnnnnnnnnnnnnnnnnnnnnnnnnnnnnnnnnnnnnnnnnnnnnnnnnnnnnnnnnnnnnnnnnnnnnnnnnnnnnnnnnnnnnnnnnnnnnnnnnnnnnnnnnnnnnnnnnnnnnnnnnnnnnnnnnnnnnnnnnnnnnnnnnnnnnnnnnnnnnnnnnnnnnnnnnnnnnnnnnnnnnnnnnnnnnnnnnnnnnnnnnnnnnnnnnnnnnnnnnnnnnnnnnnnnnnnnnnnnnnnnnnnnnnnnnnnnnnnnnnnnnnnnnnnnnnnnnnnnnnnnnnnnnnnnnnnnnnnnnnnnnnnnnnnnnnnnnnnnnnnnnnnnnnnnnnnnnnnnnnnnnnnnnnnnnnnnnnnnnnnnnnnnnnnnnnnnnnnnnnnnnnnnnnnnnnnnnnnnnnnnnnnnnnnnnnnnnnnnnnnnnnnnnnnnnnnnnnnnnnnnnnnnnnnnnnnnnnnnnnnnnnnnnnnnnnnnnnnnnnnnnnnnnnnnnnnnnnnnnnnnnnnnnnnnnnnnnnnnnnnnnnnnnnnnnnnnnnnnnnnnnnnnnnnnnnnnnnnnnnnnnnnnnnnnnnnnnnnnnnnnnnnnnnnnnnnnnnnnnnnnnnnnnnnnnnnnnnnnnnnnnnnnnnnnnnnnnnnnnnnnnnnnnnnnnnnnnnnnnnnnnnnnnnnnnnnnnnnnnnnnnnnnnnnnnnnnnnnnnnnnnnnnnnnnnnnnnnnnnnnnnnnnnnnnnnnnnnnnnnnnnnnnnnnnnnnnnnnnnnnnnnnnnnnnnnnnnnnnnnnnnnnnnnnnnnnnnnnnnnnnnnnnnnnnnnnnnnnnnnnnnnnnnnnnnnnnnnnnnnnnnnnnnnnnnnnnnnnnnnnnnnnnnnnnnnnnnnnnnnnnnnnnnnnnnnnnnnnnnnnnnnnnnnnnnnnnnnnnnnnnnnnnnnnnnnnnnnnnnnnnnnnnnnnnnnnnnnnnnnnnnnnnnnnnnnnnnnnnnnnnnnnnnnnnnnnnnnnnnnnnnnnnnnnnnnnnnnnnnnnnnnnnnnnnnnnnnnnnnnnnnnnnnnnnnnnnnnnnnnnnnnnnnnnnnnnnnnnnnnnnnnnnnnnnnnnnnnnnnnnnnnnnnnnnnnnnnnnnnnnnnnnnnnnnnnnnnnnnnnnnnnnnnnnnnnnnnnnnnnnnnnnnnnnnnnnnnnnnnnnnnnnnnnnnnnnnnnnnnnnnnnnnnnnnnnnnnnnnnnnnnnnnnnnnnnnnnnnnnnnnnnnnnnnnnnnnnnnnnnnnnnnnnnnnnnnnnnnnnnnnnnnnnnnnnnnnnnnnnnnnnnnnnnnnnnnnnnnnnnnnnnnnnnnnnnnnnnnnnnnnnnnnnnnnnnnnnnnnnnnnnnnnnnnnnnnnnnnnnnnnnnnnnnnnnnnnnnnnnnnnnnnnnnnnnnnnnnnnnnnnnnnnnnnnnnnnnnnnnnnnnnnnnnnnnnnnnnnnnnnnnnnnnnnnnnnnnnnnnnnnnnnnnnnnnnnnnnnnnnnnnnnnnnnnnnnnnnnnnnnnnnnnnnnnnnnnnnnnnnnnnnnnnnnnnnnnnnnnnnnnnnnnnnnnnnnnnnnnnnnnnnnnnnnnnnnnnnnnnnnnnnnnnnnnnnnnnnnnnnnnnnnnnnnnnnnnnnnnnnnnnnnnnnnnnnnnnnnnnnnnnnnnnnnnnnnnnnnnnnnnnnnnnnnnnnnnnnnnnnnnnnnnnnnnnnnnnnnnnnnnnnnnnnnnnnnnnnnnnnnnnnnnnnnnnnnnnnnnnnnnnnnnnnnnnnnnnnnnnnnnnnnnnnnnnnnnnnnnnnnnnnnnnnnnnnnnnnnnnnnnnnnnnnnnnnnnnnnnnnnnnnnnnnnnnnnnnnnnnnnnnnnnnnnnnnnnnnnnnnnnnnnnnnnnnnnnnnnnnnnnnnnnnnnnnnnnnnnnnnnnnnnnnnnnnnnnnnnnnnnnnnnnnnnnnnnnnnnnnnnnnnnnnnnnnnnnnnnnnnnnnnnnnnnnnnnnnnnnnnnnnnnnnnnnnnnnnnnnnnnnnnnnnnnnnnnnnnnnnnnnnnnnnnnnnnnnnnnnnnnnnnnnnnnnnnnnnnnnnnnnnnnnnnnnnnnnnnnnnnnnnnnnnnnnnnnnnnnnnnnnnnnnnnnnnnnnnnnnnnnnnnnnnnnnnnnnnnnnnnnnnnnnnnnnnnnnnnnnnnnnnnnnnnnnnnnnnnnnnnnnnnnnnnnnnnnnnnnnnnnnnnnnnnnnnnnnnnnnnnnnnnnnnnnnnnnnnnnnnnnnnnnnnnnnnnnnnnnnnnnnnnnnnnnnnnnnnnnnnnnnnnnnnnnnnnnnnnnnnnnnnnnnnnnnnnnnnnnnnnnnnnnnnnnnnnnnnnnnnnnnnnnnnnnnnnnnnnnnnnnnnnnnnnnnnnnnnnnnnnnnnnnnnnnnnnnnnnnnnnnnnnnnnnnnnnnnnnnnnnnnnnnnnnnnnnnnnnnnnnnnnnnnnnnnnnnnnnnnnnnnnnnnnnnnnnnnnnnnnnnnnnnnnnnnnnnnnnnnnnnnnnnnnnnnnnnnnnnnnnnnnnnnnnnnnnnnnnnnnnnnnnnnnnnnnnnnnnnnnnnnnnnnnnnnnnnnnnnnnnnnnnnnnnnnnnnnnnnnnnnnnnnnnnnnnnnnnnnnnnnnnnnnnnnnnnnnnnnnnnnnnnnnnnnnnnnnnnnnnnnnnnnnnnnnnnnnnnnnnnnnnnnnnnnnnnnnnnnnnnnnnnnnnnnnnnnnnnnnnnnnnnnnnnnnnnnnnnnnnnnnnnnnnnnnnnnnnnnnnnnnnnnnnnnnnnnnnnnnnnnnnnnnnnnnnnnnnnnnnnnnnnnnnnnnnnnnnnnnnnnnnnnnnnnnnnnnnnnnnnnnnnnnnnnnnnnnnnnnnnnnnnnnnnnnnnnnnnnnnnnnnnnnnnnnnnnnnnnnnnnnnnnnnnnnnnnnnnnnnnnnnnnnnnnnnnnnnnnnnnnnnnnnnnnnnnnnnnnnnnnnnnnnnnnnnnnnnnnnnnnnnnnnnnnnnnnnnnnnnnnnnnnnnnnnnnnnnnnnnnnnnnnnnnnnnnnnnnnnnnnnnnnnnnnnnnnnnnnnnnnnnnnnnnnnnnnnnnnnnnnnnnnnnnnnnnnnnnnnnnnnnnnnnnnnnnnnnnnnnnnnnnnnnnnnnnnnnnnnnnnnnnnnnnnnnnnnnnnnnnnnnnnnnnnnnnnnnnnnnnnnnnnnnnnnnnnnnnnnnnnnnnnnnnnnnnnnnnnnnnnnnnnnnnnnnnnnnnnnnnnnnnnnnnnnnnnnnnnnnnnnnnnnnnnnnnnnnnnnnnnnnnnnnnnnnnnnnnnnnnnnnnnnnnnnnnnnnnnnnnnnnnnnnnnnnnnnnnnnnnnnnnnnnnnnnnnnnnnnnnnnctgggtgcagtgctggatatctacaggcccagtctcagtactgaggctgaagcaggaaaggctgcacagttgaggtcagcctggtatacagccgaaaccctcgtctcaaaaaactaacatgattttgtgttttgtcaagataattgcttgtttcaggttgctctgcctgattagttttcttgtgtttgtggtgggttttggtatttgtttgtttatttgtttttgagaccaggtttctctgtgtagccccaacaatcttggaactctatagatgggccttggccttgaactcacagggacctgccacctccgcctctgcctggaatgaaaaggtgggaattaaaagcgtgcaccctcacctcctgacactgttgttttgagagcttcccactttagcctggccttgaactcaaagtaatcttcttgtctcagcctcccaaataccaggataacaggcatgagccagggtgcctgatttccgatgctttccttgtgcatactcatgtgtattcagatgcccgtgaacgtgtcagtgtgttcacatggaaggccaaaactgatgttgaatgtcttcgccaatcattttccactttactgaggcaggttctcagggaacctggagcctgtcgatttggactagtctcacctgccaccctgttccagggattctgtccccatccttctacttgctggcatgataggtagacaatatgtctgtaccactatgctcttgatgactagggagtggagtcttatgaaagtcaaggttatggggtgtggtggtacaccctgttaagtcccacatcaggcagctcacaatgcctctgcagcctgcgttcaaggggatctagttctcacttctggcctacacacacagacacacagacacacggacacacaggcacacagacacactgacacactgacacacaggcacacaaagaaaaaagttatcttttaaaaaccaaagtcagttgagtgcagtggcatgtgcctttagtcccagtgcttgggaggcagaggcaggagaatctctgtgacttcaaggctagtctggtctacttagtaagctccaggacagccatggctacacagagagctcctgtctccaaaatgttaattaattaaaaaaataaaactaaagtaaaacatttattcaagtacataattattgtaaagttctgagactaattcctttacaactatggttaagtaaacaactactgacttaggtgttctgggatatttgaaattctacatatctgttgctacacatatatacacgcacatacacatcttgaggctaaattaggatatgtgtctaagtttttccaagtgttaggcaaaagtttgtgtgttaaaagtgtgtaggtttaatacattaaggcagtcaataatattctctaaacatgatgcattgtgtgaaaaccttaaacacatcattactaaaccatctgacatttctgctgtatatttagtaaaattcaggattatcggcttgttttatttttaattatgtgtccatacttaattatttgagtatatatatatatatatatatatatatatatatatatatatatatatatatatctgtgtaggagcattgtagacatgagtacaggcccttggaagccagatccctcagctaaaccatctctccagctccttgttttgttttatgagacagggttgtgttacatagtactggctgatccagaacttgctatgtagatcaagcttgactaaaactcaccacatagtcaaaactggccttgaactcctggttctcctgcctctacctccaatataccatcatgccccagtcaggtgccatttgtatacttctcacacttaaaatctggcctgcagcaagatgtggcagcttatatccatgagtcaagcacacgcacccccaagtctgacacgagaggatcaccagaagttggaggccagcttaggctggcctgtagtgtatggttctgtctcaaaagagaaaaaaaaggagaaaaggagtaaagaaagtgtaaaaagctttgggctaggggtacagctcagttgatagatcacttgcctagcatgtgcaaggccataggtctattattaaatctgggggaatcacatcatgtaccccaactcaggtgtggccatctgttgtcaataagctatttaaaagaggcaaattaaaagtgaaaagcagagccgggcgtggtggcgcacgcctttaatcccagcactctggaggcagaggcaggcggatttctgagtttgaggccagcctggtctgcaaagtgagttccaggacagccagggctatacagagaaaccctgtctcgaaaaaacaaaacaaaacaaaacaaaacaaaacccaaaaagtgaaaagcaaaaaaaagtgatttagtcaatcaggccacattgggaagagggataaagacctcaatacaagtgcttccttcgaatagcttcaattctaccagaccagtcccaattctaccagaccagtcccaattctgagctggcacatggtgtctatgtctgaaacaaaaggataaatacagtgaccgtagggatggcagctacaatatagtgtggggtaccacacctaagaatcattttccatggctcttagttactgttggaaggggtgggacaagcaactccatttcactggcttgagacaggctcccatcaggaggtctacactggcctcaaatttgggatctgcttgtgtcagcttcccaggcaagtgctaccatgcctactgtgactttattttcagtctgaccatctctctaccccccatctctgaacaaatattttctgaagacattgctaattgaccatctggtggtttgctttccaaagtcccatgatgccaggcaaagactccttctggttggtctgctttgaaccgctttgggagcgtaaatgagagatgtcaggagctagaactagtcagcctttcaggcctgatttaaacaactgggatatagagggattggctccgaggtcaggtacacctgaggtccattcacttgtcctgtggctaatgtcctggtgtctcaaaaatgctgttcgggttcatttgtcaaaagcctgacttctgtagaacgttaacagacagttcacttataaggctctgcaaaacagagttagtgggctggagagatggctcagtggttaagagcactgactgctcttctgaaggtcccgagttcaaatcccagcaaccacatggtggctcacaaccatctgtaacaagatctgatgccctcttctggagtgtctgaagacacctagagtgtacttacatataataaattaataaatcttaaaaaaaaaaaacagagttagcaggtatttcgcaaccagtaactataacacagtacacaaacactagttggggctggnnnnnnnnnnnnnnnnnnnngaaactgagtctgggatggtgagactcaaagttcctgaaaacagacccttgtccccacccacctgttactcttctcagaggaagccagtagctttggggtgatttcaaaagttgggcggggatggcagagataagcagtgtgggggcaggagtactgaccccccccccatagaacagggaggaactaacggggcccacagtctgcagacacaagtgaagtgggggaggggataaagccggaaaccacggggtttctgagaaagtcagatggcaagatacaacagatagggatgaagttggggagcacagaagggtgaaccccaaactcctatgggagctgtcaaggggtccaagggatcttggtcctgcattctgcctctgcagaaggaaagaaaggaaggggaagagagaataaaaagaggaaatggaggaggccttgaagaatgggagaaagagaagcaaaggcttgccggaggaggagaaagaggaaggttagaaggaaagtaaaggaggaaggaaagaggagacacagaaagaggaagagaaatatggtacatgaaaaggagggacaggaggaaagaggtgcgagggaagggaccaacagagaaaggaagggaatacaagacagtggaaagaggaaaaggggaagaaaagagggaagaaggaagacctggagagacctggagatgaggaagatgggaggagggataggagaggaagaagagggactcagaggcagcaaactgatggagtagtagaggtatgacagacaagaggcaacaggaggatggggagagatcagaggaagatgggagaaagggacaaaggatgatggaagaagacaagagacatgacagcctagggagggatggaagggaaggggagaaaaataatctgagagcccaaaaggagacacacagagtctcagtgacagattcggagaaagagaaaaaaaaggagggaagagccaggcggtggtggcgcacgcctttaatcccagcacttgggaggtggaggcaggcagatttctgagtttgaggccagcctggtctacagagtgagttccaggacagccagggctacacagagaaaccctgtctcgaaaaaaaagaaagaaagaaaaaagaaaagaaaagaaaagaaaagaaaagaaaagaaaggagggaagagaatgtttctgtgtctcacaaccctttctgtcctcacaggttcaaccccagtgttcccatggattttcctggtctaggggccctggggacctcagaacccttgccccagtttgtggattctgccctggtgtcctcaccatcagattccacaggtttcttttcctctgggccagagggtttggatgcagcatcttcttccacttccccaaatgcagccacggccgcagcatcagcactggcctactacagagaagctgaggcctacagacactccccaggtaactgttgggtggctgccttggcactggctggaagctgtcagggttgccatagagatggttagctagttcacagttctgtgaggtcatcttggaaagagttagaagctctgtggataggtgtaccgccccatttgtaccaatcctcgtctctgtctgccatactgtagtgagcacacggagaagccaggctggaagtgtgtacgaagctgtcttatttgtcacttgacctgcagcctcttggtctcaatatcaaaaagggatggaggggatcgtccttgctatagtgaccagagggacatagaactccgaagtcacccaagcagcaagagactattgtaggaagaccagaaaactagccaccatgttgggacagacgaacaccatttcactgtaaaagtaggactacctaaggtttgctgttctttccttttcctctctaccccttcaacagtctttcaggtgtatccactgctcaacagtatggagggaattcctgggggctcaccttatgctagctgggcctatggcaagacggcactctaccctgcctcaactgtgtgccccagccatgaggatgccccttcccaggccctggaagaccaggaagggaagagcaacaacacgttcttggacaccttgaagacggagcggctgagtccagacctcctgacgctggggactgcactgcctgcatcgctccctgtcaccggcagtgcttacgggggagctgactttcccagtcctttcttctctcccactgggagccctctcagctcagcagcctattcttcccccaagtttcatggaagcctgccattggccccttgtggtgaggctttcaaaaagggaccaggaggttgagttgggctaggtggctcaagacatagctaagctgaccgagccttgcttccttttctctccatctaccagaggccagagagtgtgtgaactgtggagcaacggctactccactgtggcggagggnnnnnnnnnnnnnnnnnnnnnnnnnnnnnnnnnnnnnnnnnnnnnnnnnnnnnnnnnnnnnnnnnnnnnnnnnncagtggtggtgcatgcctttaatcccagcacttgggtaggcagtaggcaggtggatttctgagttcaaggccagcctggtctacagagtgagctccaggaacagccgaggctacacagagaaaccctgtctcgaaaaaccaaaaaaatttaaaaaagacttatttaagaacgccacctgggctggtgagatggctcagtgggtaagagcacccgactgctcttccgaaggtccggagttcaaatcccagcaaccacatggtggctcacaaccatccgtaacaagatctgactccctcttctggtgtgtctgaagacagctacagtgtacttacatataataaataaataaatcttaaaaaaaaaaaaaaaaagaacgccacccaactcatactggtcccggcactattatacttgccctcttccttatcctttccccatagggaccatccatccctttcccatgcaggaaccccgctacctacctagaactcccatccaaggccaggaatttttacagcttccccaagggattcttgtgtttgttttgttttgttgtctgatttattgattgatagatttggtttgttttttgtttgaaatggggctttgctatatagccctgggtggcctggagctatgtatacgatactggtttttaatttgctatggtcctcctgtctctgtctcttgagtgccagggttacacccctgtcttcctccaagacattctgatatgtggtcaaagtctaaaactagagatagaagaagtcttgcatagctatagaaaagaaactccttgctgggcagtggtagtgcatgcctttaatcccagaactggagacagaggcaggtggatctcttgtgagctcaaggccagcctggtctacagagaaaattccaggaaagccaggctacacagtgaaagcctgtcttgacagataaatacacagatacatagatacatagatgaataaacttcttatcccagataggaagcctttccttaataggactctcatcccttaagctcttttctcaggccctgtaaggccctgtccccgaatcctacctctcccctacccccagcactaatctcctgtccttttattcctcagattgtcagcaaacgggcaggcacccaatgcactaactgtcaaacgaccactacaacactctggcggaggaatgccagcggagatccggtatgcaatgcctgcggcctctatttcaagctccatcaggtatgctatcctccatgttgcttcctgtcctccaagcacactcccggctcctcatccagccctcatctaccttgagctgtcttcctctgcctttgcttcctccctctttgctcctctttctcttctcagaagttgtgtacttgcgcctccttgcccaatttccacggcttccacctcaagcctccttccatctgtcctctctttcctccttgccacctcccgtgatttgagtcttggctacctcttaccagtgtaggaggatattctgagctgagatcagggccacacacaagcacaggtctcacctccctagcacaccctgggtatattactctagccattgaactaattccccattcttaacaaagtggtgttaagagactgtccctagcccagctacatcagcacaaagggctggagctggtaacccctgtggtggtctccgtttctacaggtgaaccgcccactgaccatgaggaaagatggaatccagacgaggaaccgcaaggcatctggcaaagggaaaaagaagcgggggtcgaatctggctggagcgggagcggctgaaggaccagctggtggcttcatggtggtagctggtagcagcagtagtgggaattgtgggggaggtggcctcaggcttggcactgggcactgcaggtactgcccacctctatcaaggcctaagacctgtggtactgtnnnnnnnnnnnnnnnnnnnnnnnnnnnnnnnnnnnnnnnnnnnnnnnnnnnnnnnnnnnnnnnnnnnnnnnnnnnnnnnnnnnnnnnnnnnnnnnnnnnnnnnnnnnnnnnnnnnnnnnnnnnnnnnnnnnnnnnnnnnnnnnnnnnnnnnnnnnnnnnnnnnnnnnnnnnnnnnnnnnnnnnnnnnnnnnnnnnnnnnnnnnnnnnnnnnnnnnnnnnnnnnnnnnnnnnnnnnnnnnnnnnnnnnnnnnnnnnnnnnnnnnnnnnnnnnnnnnnnnnnnnnnnnnnnnnnnnnnnnnnnnnnnnnnnnnnnnnnnnnnnnnnnnnnnnnnnnnnnnnnnnnnnnnnnnnnnnnnnnnnnnnnnnnnnnnnnnnnnnnnnnnnnnnnnnnnnnnnnnnnnnnnnnnnnnnnnnnnnnnnnnnnnnnnnnnnnnnnnnnnnnnnnnnnnnnnnnnnnnnnnnnnnnnnnnnnnnnnnnnnnnnnnnnnnnnnnnnnnnnnnnnnnnnnnnnnnnnnnnnnnnnnnnnnnnnnnnnnnnnnnnnnnnnnnnnnnnnnnnnntactggatgaggttgcaggtataatatgtcacaactgaaactcatgatgcaccaacggaactgtgtatctgaagccttgtggacggcatccaggtggccccatatgtcatcgtaagatgctggatgactgattacttgtggatgaggtggcgggagatggcagggtgtcatcaagttgcaggtaaaacagcatgtggagctgtgcgtgcaataacaggtgaggagacatggaaggctgtaaaggtgtgcttgtgcatgactgggctatcgttgacacagtgtgacgacacataaactggacatttttgaaacactgagcaagaactgaagtgtaggattgtcctgaaatcaaggccattgagggctacaaagcaaatgatatacatatagtggagagagagagagagagagagagagagagagagagagagagaggatctcaaaaataaaaattaatcacaatagtttatattcctttcagagactgtccagaatggccatggccctataaaagtccccaaagcagctcagccctcagctcccacaccttgcagacaccccttacctgaatagcaagtctactcagaattgctcttacacaggttcctggccttaccttgaaaaaagaacccaggttcacaccctcatagaaacagctgccctgactggtgccggaagcacaggctagccctgagatcctatggaacaagacctcttgctcactcttgtaaactccctctccttccgtccttctctcttcctctctctccccctccctccctttcttcctctccctctgtccctccctctcccagcctttccttatctccctgctctcactctctcctttgctctcatgcagctcaggtctcatacctgccgtgcagttcaagcttccctctagttgatttgtttttctcgatttttctgagtgggggtctcactctgtatgtgacccaggctggcttatctgctcagtaagtatcccaaattctggccttggactcatggcaatcctcctgcctcagctaggatttcaggcaagagccactgcacctggaagggagccctttctccaataattcacaggcagcccatcctgacctggataggagccgcagtccctaccagcccattcagcaatnnnnnnnnnnnnnnnnnnnnnnnnnnnnnnnnnnnnnnnnnnnnnnnnnnnnnnnnnnnnnnnnnnnnnnnnnnnnnnnnnnnnnnnnnnnnnnnnnnnnnnnnnnnnnnnnnnnnnnnnnnnnnnnnnnnnnnnnnnnnnnnnnnnnnnnnnnnnnnnnnnnnnnnnnnnnnnnnnnnnnnnnnnnnnnnnnnnnnnnnnnnnnnnnnnnnnnnnnnnnnnnnnnnnnnnnnnnnnnnnnnnnnnnnnnnnnnnnnnnnnnnnnnnnnnnnnnnnnnnnnnnnnnnnnnnnnnnnnnnnnnnnnnnnnnnnnnnnnnnnnnnnnnnnnnnnnnnnnnnnnnnnnnnnnnnnnnnnnnnnnnnnnnnnnnnnnnnnnnnnnnnnnnnnnnnnnnnnnnnnnnnnnnnnnnnnnnnnnnnnnnnnnnnnnnnnnnnnnnnnnnnnnnnnnnnnnnnnnnnnnnnnnnnnnnnnnnnnnnnnnnnnnnnnnnnnnnnnnnnnnnnnnnnnnnnnnnnnnnnnnnnnnnnnnnnnnnnnnnnnnnnnnnnnnnnnnnnnnnnnnnnnnnnnnnnnnnnnnnnnnnnnnnnnnnnnnnnnnnnnnnnnnnnnnnnnnnnnnnnnnnnnnnnnnnnnnnnnnnnnnnnnnnnnnnnnnnnnnnnnnnnnnnnnnnnnnnnnnnnnnnnnnnnnnnnnnnnnnnnnnnnnnnnnnnnnnnnnnnnnnnnnnnnnnnnnnnnnnnnnnnnnnnnnnnnnnnnnnnnnnnnnnnnnnnnnnnnnnnnnnnnnnnnnnnnnnnnnnnnnnnnnnnnnnnnnnnnnnnnnnnnnnnnnnnnnnnnnnnnnnnnnnnnnnnnnnnnnnnnnnnnnnnnnnnnnnnnnnnnnnnnnnnnnnnnnnnnnnnnnnnnnnnnnnnnnnnnnnnnnnnnnnnnnnnnnnnnnnnnnnnnnnnnnnnnnnnnnnnnnnnnnnnnnnnnnnnnnnnnnnnnnnnnnnnnnnnnnnnnnnnnnnnnnnnnnnnnnnnnnnnnnnnnnnnnnnnnnnnnnnnnnnnnnnnnnnnnnnnnnnnnnnnnnnnnnnnnnnnnnnnnnnnnnnnnnnnnnnnnnnnnnnnnnnnnnnnnnnnnnnnnnnnnnnnnnnnnnnnnnnnnnnnnnnnnnnnnnnnnnnnnnnnnnnnnnnnnnnnnnnnnnnnnnnnnnnnnnnnnnnnnnnnnnnnnnnnnnnnnnnnnnnnnnnnnnnnnnnnnnnnnnnnnnnnnnnnnnnnnnnnnnnnnnnnnnnnnnnnnnnnnnnnnnnnnnnnnnnnnnnnnnnnnnnnnnnnnnnnnnnnnnnnnnnnnnnnnnnnnnnnnnnnnnnnnnnnnnnnnnnnnnnnnnnnnnnnnnnnnnnnnnnnnnnnnnnnnnnnnnnnnnnnnnnnnnnnnnnnnnnnnnnnnnnnnnnnnnnnnnnnnnnnnnnnnnnnnnnnnnnnnnnnnnnnnnnnnnnnnnnnnnnnnnnnnnnnnnnnnnnnnnnnnnnnnnnnnnnnnnnnnnnnnnnnnnnnnnnnnnnnnnnnnnnnnnnnnnnnnnnnnnnnnnnnnnnnnnnnnnnnnnnnnnnnnnnnnnnnnnnnnnnnnnnnnnnnnnnnnnnnnnnnnnnnnnnnnnnnnnnnnnnnnnnnnnnnnnnnnnnnnnnnnnnnnnnnnnnnnnnnnnnnnnnnnnnnnnnnnnnnnnnnnnnnnnnnnnnnnnnnnnnnnnnnnnnnnnnnnnnnnnnnnnnnnnnnnnnnnnnnnnnnnnnnnnnnnnnnnnnnnnnnnnnnnnnnnnnnnnnnnnnnnnnnnnnnnnnnnnnnnnnnnnnnnnnnnnnnnnnnnnnnnnnnnnnnnnnnnnnnnnnnnnnnnnnnnnnnnnnnnnnnnnnnnnnnnnnnnnnnnnnnnnnnnnnnnnnnnnnnnnnnnnnnnnnnnnnnnnnnnnnnnnnnnnnnnnnnnnnnnnnnnnnnnnnnnnnnnnnnnnnnnnnnnnnnnnnnnnnnnnnnnnnnnnnnnnnnnnnnnnnnnnnnnnnnnnnnnnnnnnnnnnnnnnnnnnnnnnnnnnnnnnnnnnnnnnnnnnnnnnnnnnnnnnnnnnnnnnnnnnnnnnnnnnnnnnnnnnnnnnnnnnnnnnnnnnnnnnnnnnnnnnnnnnnnnnnnnnnnnnnnnnnnnnnnnnnnnnnnnnnnnnnnnnnnnnnnnnnnnnnnnnnnnnnnnnnnnnnnnnnnnnnnnnnnnnnnnnnnnnnnnnnnnnnnnnnnnnnnnnnnnnnnnnnnnnnnnnnnnnnnnnnnnnnnnnnnnnnnnnnnnnnnnnnnnnnnnnnnnnnnnnnnnnnnnnnnnnnnnnnnnnnnnnnnnnnnnnnnnnnnnnnnnnnnnnnnnnnnnnnnnnnnnnnnnnnnnnnnnnnnnnnnnnnnnnnnnnnnnnnnnnnnnnnnnnnnnnnnnnnnnnnnnnnnnnnnnnnnnnnnnnnnnnnnnnnnnnnnnnnnnnnnnnnnnnnnnnnnnnnnnnnnnnnnnnnnnnnnnnnnnnnnnnnnnnnnnnnnnnnnnnnnnnnnnnnnnnnnnnnnnnnnnnnnnnnnnnnnnnnnnnnnnnnnnnnnnnnnnnnnnnnnnnnnnnnnnnnnnnnnnnnnnnnnnnnnnnnnnnnnnnnccctgtctcaaaaacaaacaaaacaaaaaacccaaaccaaaaacaaacaaacaaacaaacaaagcacagctgaggtacatcagttagtaaagtgcttgccttacaaagaccaggacctcaatttgactcccagaactttggtaaaacaggtcatcttgcgggagcatacttataatcccagtactgatggaaactggcaaacccctgggatttcctggcaaacccacttagcctatttgaggaatccccagccagtgagagaaactatcatgaaaatgtgctgtggggctggtgagatggttcagcggataggagcacttgactgctcttccgaaggtcctgagttcaaatcccagcaaccacatggtggctcacaaccacccataatgagatctgatgccctcttctggcacatctgaagacagctgcaatgtacttatgcataatagtaaataaatcttagaaaaaaaaaagaaaatgtgctgtgtctgagaaacaacatctgaagtggtgctctggactttacatacatgtgaattctcctctacacacagtaacacacatacacaaacccactcacatgcatgtcaggaaaaagacgacacataagccacactctgaattccataaacgcctgtctggaccccgcattagacccttcagcttgaatatacaagatttcacagatctgtctagtccaggaacttgggtccaatgctgtacagaaacacctagatttttaaaaaattattgtttgatgaatctttgggatgtttttatactagcctgtccctgtgggttgtaaggatgcctgcgttgtgaactattttatgttgggcacaaatgtttttaagtgcagaagaagttaaagcaagagcattgtttgtcttgtggcaccaccgatggtccacagaggcaaatgtcagtgtgcaatcggatgttttcagaagcaccccctgtgtgagtggaggcataaacaactgggaacagatataaacagaagcatgcacaaaggtcattctcccaaaagaggaggcacaaggaatatccatctggcaaagggcattggtccataaccctctgggctaaagttgtcatatgtgatacctgacttattatataagtttctggcttgaccaactactgaaagccactcttctggctttaatataatcttatatcttagtctgtatagaaaaacagcgccttcacatccttccctcttcctcaatcatgtctcataacgtttgtttgtttgtttgttagtttgttttgtttttctctagacaaggtttttctctgtaacagccctggctgtcctggaactcactctgtagaccaggatggccttgaactcagaaatctgcctgcctctgcctcccaagtactgggattaaaggcatgcgccccccccccaccccccagaatgtctctaatttaccagctaatataatcattctcctgagaccagacaggaaacacatagagaaattcttacctttgcagtaaaagaattcctgtgccaggcttgggggtgtagctcagtggcaaagcacttgcctagtgtgtatgagtgcctgggtcccatccccatgcctgcataaaagaaaacatgtcagtcactgtgatttgaaatcaatacaactatttttccagacttattttgaattatatgcagaagtgccgtccaccgcttctagggccgtgccacaagagcttctcacgggagcctccactttctgcttccctacccaccaacttcgtaacaagaactccaagtacccggaggaaagtagtcagaaaatgaattacctgggtccctgaattaccaacagtcagtattctgattggggcttatatgagaaagaagaaatatttacttgtgctggctgggttttccccatgatttatttatttttactcacattacgtccccatctgcagcacaccctcttgttcttggtggtcatcccatggtactggcatctccaaaactgctggggtcttgcactacaattgggctgcactttcaccaataggttctgttcacggtgccaagcctcaacttctctccatgaccccatcaatcttggggcttcatttgctatggaggctgcactttcagcaatggcctctcctggctctcacagtgctaggcgtcagctgctctccatgaactctctacgccttcaaaccagtaccacctgggtgactcttacactgccaagttcagctgatagcgcaaggtacaaacttggctgcctctggaacatagcttttagatttcaccttgacagtgctggtcgtctcctctacctcctcctcctcctcctcctccccctgcttttctttctctcttccttcctttttctttttcttttgccccgtctgtcctggaactcactctgtagaccaggttggcctcaaactcaagagatccacctgcttctgcctccctattgctgggatcaaaggcatggaccacttccacctggcattaagattttttatttttgtggatctgtgtaagtacactatagctgttttcagacacaccagaagagggcatacgatctctatagatggttgtgagctaccatgtggttgctgggatttgaactcaggacctctggaagagcagtcagtgctcttaactgctgagccatctctccagccctctggtctcttctaaatcaccattaatttctcatctacagatgagcagaactgaatatcccagcaagacaaaggattcacttaagcagttgtgctagcttgttaaatcttcagcccctactgaccagaaccatggaatattaattcaaaacaacaaatggccccagtagtgtctttaaacttctccctgtcacttcacaagccaggtctctatcctcggcattgctctcaaaagtctcatcttccaaccttttacagaacagctcatcaagcaatgaacaccctccccaaaacaacatggccagggttgtcacagcaatgccccgctcctaacaccaacttgtctgagttaaggttactatctctgggatggaacaccatgaccaaaagcaacgtgcagaggaaagggctcatttcactcacagttccacgtgataataggtaatcatcaaaagcagtgaggacaggaactcctagggcaggaacctggaggcaggagcagatacagagaccatggagggtgctaattactggattgttcctcatggcttgctcagctgctttctgaaagaatccaggaccaccagcccaggagtggcgccacccacaatgagctgggccctcctcctcaatcactaattaagaaaacgcctcaggagaggcctgcaaaccccaggccagaacaatagaccatcgcccttcccactatcagagaggctctatttagcacctgatgggagcagatacggagacctgcagcgaaaaattaggcacctctggaaaccccagggaagagggggaggacaagttgtagaggtcagagggatcaaggattccagcaggacactgcccacggaatcagtgaagcagggctcataggggctcaaagacaccgaaccaacaaccaggagcctgcatggagtttgctagactctctgcatatgctacggttgtatagcttggtgttctttctcgactcctaacaatgggagcaggggctgtctctgacttttttgcctgcttcagggacccttttcctcctaccgactggcctggtccagccttgatgtgagggtctgtggctagtcttaccgcatcttgttattgcggtgtttagcaggtatccgtggaaggcctgttgtcttctgaagggaaaatgcaggagaagtggatctgggagagaggggattgggaaggggtggagggagggcaaactgcttttgagatgtaatgtaggagagaagaagaaaaaagattgatacaaataactgtcctctaagtacccaagaatagaaacgtaaccatttagagaggggcaaagaaagccttacaggcctgcctacagcctgatcttacggaggcattttctttgctttttgtaattttgctagttatgatagataatgtaaatatttttagagagagagggttgtcaagggggtcataacccgcaggttgagaagtactgttttaagttgctgaactagagagatagatgccttcagtgcttgagtcccagcacccacatctaaaggctcacaaacacttctcactccacctcctggaggatccagtgtcctttcttgcctccttaggcatacacacaggcaaaatccatgaagtatgctgggcatggtggcacatgcctttaatccagcacttgggaggcggaggcagaggcagaggcagaggcagaggcagaggcagagacacatgcatctccgtaagttggaggccagtctggtctacatagttagttccagtacaggtgggactgcatggagagaccctgtctcaacaaataagtaaacaagtagcagaggaagatggcggccgccttagctgttcgtggagcgggatctgcagtggtctttgggcctgaggctctcaccccagactgggaaaactgagaagtctccacagggaccatgatcatggctttgtaatttaatggaggcgtggttctaggagcagactccagaataacactgggttttacatcgccaatcgagtgactgacaagctgacccctatttatgattacatctgctgctgctcaggctcagcagctgataccggagcagtagcagatgctgtcagttaccagcttggtttccacagtattgaactgaacaattctccactagtacacatggctgccaggctctttaaggagatgtgttaccggtgcagagaagatctgatggcaggaatcatcattgtaggctgggaccctcaagaaggagggcaggtgtcctctgtacccatgaagggtatgatggtaagacaatcttttgccaccggagcctccggaagctcatacatctatgactatgttggtgctatccatcctgaaggcacgaccaaggacgaatgtctgcagttcactgccaatgctctctctttggctagaaaacacgaaggctccagtggaggagttatccgcttggcaaccattcaaggatcaggggtagagcggcaggtgctttgaggagaccagatccccaagtttaccactgccactttgtcacctccctgaagcctagatgcaaaagctaataaacagtgttaaagaaaaaaataagtaaacaaatataatttttaaaacaaatggttggctgggtggtggtggcgcatgcctttaaccccagcacttgggagggagaggcaggcagatttctgagttcgaggccagcctggtctacaaagtgagttccaggacagccagggatatacagaaaaaccctgtctcaaaaacaaacaaacaaacaacaaaaaataccaaacaaacaaacaaaaaaccccaaatggttgttaagctgggcagtgctggcacattcctttaatcccagcacttgaaaggcaaaggcaggtgaatttttgagttcgaggccagcctggtttataaagtgagttccaggacagccagggatatacaaagaaaccctgtttcaaaaaaaaaaaaaaaaa

SEQ ID NO: 74 - DNA, 1807 bp, Mus musculus
actcgtcataccactaaggtggctgaatcctctgcatcaacaagcccaggttcaaccccagtgttcccatggattttcctggtctaggggccctggggacctcagaacccttgccccagtttgtggattctgccctggtgtcctcaccatcagattccacaggtttcttttcctctgggccagagggtttggatgcagcatcttcttccacttccccaaatgcagccacggccgcagcatcagcactggcctactacagagaagctgaggcctacagacactccccagtctttcaggtgtatccactgctcaacagtatggagggaattcctgggggctcaccttatgctagctgggcctatggcaagacggcactctaccctgcctcaactgtgtgccccagccatgaggatgccccttcccaggccctggaagaccaggaagggaagagcaacaacacgttcttggacaccttgaagacggagcggctgagtccagacctcctgacgctggggactgcactgcctgcatcgctccctgtcaccggcagtgcttacgggggagctgactttcccagtcctttcttctctcccactgggagccctctcagctcagcagcctattcttcccccaagtttcatggaagcctgccattggccccttgtgaggccagagagtgtgtgaactgtggagcaacggctactccactgtggcggagggacaggacaggtcactacctgtgcaatgcctgtggcttgtatcacaagatgaatggtcagaaccggcctctcatccggcccaagaagcgaatgattgtcagcaaacgggcaggcacccaatgcactaactgtcaaacgaccactacaacactctggcggaggaatgccagcggagatccggtatgcaatgcctgcggcctctatttcaagctccatcaggtgaaccgcccactgaccatgaggaaagatggaatccagacgaggaaccgcaaggcatctggcaaagggaaaaagaagcgggggtcgaatctggctggagcgggagcggctgaaggaccagctggtggcttcatggtggtagctggtagcagcagtagtgggaattgtggggaggtggcctcaggcttggcactgggcactgcaggtactgcccacctctatcagggcctaggacctgtggtactgtcagggcctgtcagccatcttatgccttttcctggacctctgctgggatcgcctacaacctccttccccaccggtcctgcacctaccaccagcagcaccagcgtgatcgccccactcagttcttgaaggtacacagaatagccttgaccttgtggcagaggagaccccccctttttttggagacaggatcttctgtagctatgtagctatgaactatgtagataagggtgaccccacatttcccattctcctgcctctacctcccgagtactgagattcaggcatgtattgctatgcctgacattttccttcctttcagttttgttttgtggggtttgttgttgttgttttgagacagggtttcactatgcagcctaggctggctttgaattccttatgtagtccagactaagctccagcttgagatccttgtgcctcagttcctgagtgctgggattacaggcatgtgctaccgtgcccgtttctccctcctcttagagccactggcctttacagcccaaccatctccttgccctgcacccttaaagattttgtaaaataaaaccacctggagacatgcgctggtatttggttaaataaatgtcagtgtcaagtggagcatg

SEQ ID NO: 75 - DNA, 1242 bp, Mus musculus
atggattttcctggtctaggggccctggggacctcagaacccttgccccagtttgtggattctgccctggtgtcctcaccatcagattccacaggtttcttttcctctgggccagagggtttggatgcagcatcttcttccacttccccaaatgcagccacggccgcagcatcagcactggcctactacagagaagctgaggcctacagacactccccagtctttcaggtgtatccactgctcaacagtatggagggaattcctgggggctcaccttatgctagctgggcctatggcaagacggcactctaccctgcctcaactgtgtgccccagccatgaggatgccccttcccaggccctggaagaccaggaagggaagagcaacaacacgttcttggacaccttgaagacggagcggctgagtccagacctcctgacgctggggactgcactgcctgcatcgctccctgtcaccggcagtgcttacgggggagctgactttcccagtcctttcttctctcccactgggagccctctcagctcagcagcctattcttcccccaagtttcatggaagcctgccattggccccttgtgaggccagagagtgtgtgaactgtggagcaacggctactccactgtggcggagggacaggacaggtcactacctgtgcaatgcctgtggcttgtatcacaagatgaatggtcagaaccggcctctcatccggcccaagaagcgaatgattgtcagcaaacgggcaggcacccaatgcactaactgtcaaacgaccactacaacactctggcggaggaatgccagcggagatccggtatgcaatgcctgcggcctctatttcaagctccatcaggtgaaccgcccactgaccatgaggaaagatggaatccagacgaggaaccgcaaggcatctggcaaagggaaaaagaagcgggggtcgaatctggctggagcgggagcggctgaaggaccagctggtggcttcatggtggtagctggtagcagcagtagtgggaattgtggggaggtggcctcaggcttggcactgggcactgcaggtactgcccacctctatcagggcctaggacctgtggtactgtcagggcctgtcagccatcttatgccttttcctggacctctgctgggatcgcctacaacctccttccccaccggtcctgcacctaccaccagcagcaccagcgtgatcgccccactcagttcttga

SEQ ID NO: 76 - DNA, 27756 bp, Homo sapiens
  misc_feature (3029)..(3702): "n" at positions 3029 to 3702 can be any base
agcagctttccatctctgctgtgactgcaggccgtatttgtcacattcttctctgcttattttatgttttacagcaagattctctgcagtcattgccatggggagctggacatgctgatctgttaatcctatccataaagaatcttccagcttgatatctgatccaagcttggttccaaaacacacatttctgacacagtagggagcttggctcatgcttttggttcctccgcataaaacaacttcagcttctttaacacaaatttcctaacacctattcacagtggactgaaaaccagaaccacagagcctattaatcgtgagagctggggtctcctttgggattcccacacgcaaaccaacatgccttgccaaaaaaatatggaacgcttcacgaatttgcatgtcatccttgcgcaggggccatgctaatcttctctgtatcgttccaattttagtatatgtgctgccgaagcaagcatggagatgatttttttaaaatggttagattctggagatattttgaagatagggactggatgagttcaacaaaaaagaggatgtcagctagagaagaggcctgaggacattttgggttctaaaacaagagaagggacagacagatgagtcaggcaagtgggaagggaagtgtgtggattcctgagtgaaggagtgatggatggaggagcatgcgtgagagtctcctgaagtaaaggagcccctggtcttctggactctggtcgctaaatagtcttcagacggtagttcagccagaccctgtgactgaaccgccaaggagccccaagagtgctgcgaagagagggagtgtgaggatatgagttttagcaagtaaaaggctttcctaaaacctgtagcattttctggcagtggaaaaaaagaggaaaggggttttctgcctcattctaaaagacaatttgccatggacccagacattatatgcctgaagatggatgatttatggatgaaaggaaagagaaaatgaaggaatagaagaaggaaggaaggaacagatgggtggatgggtgagtgggtaggtagatgaatgaatgggtagatgctctgatatttcctccctcctcccccgagaaactccttcacaggtgtgcacagagagaggaatatgagtttatgaattgcagatttgctataatagggaaagaaactagaaacaatgcaaatgttcatcaacagattagtggttaaacaaaatgtggtatatccattccatggaatattactttcaataaaagggaacgaacttatgaggccagcattactctgatgagaaaactagacaaagatatcacaagaaaaactacagaccaatatctaagtatagatgcaaaaatcctcaaaaaaatacaagtaagtagaatccagcaacatataaaaggattatacaccacggccaagtgggatttatcccaagaatgcaaggtttggtcaactaatgaaaatcaatcaatataatgcatcatattaacataataaagaacaaacaccacatgatcttttcaggagatgcagaaaaaacatttgacaaaattcaacattccttcatgataaaaacactcaacaaactaggaatagaagagaacttcctcaacctgataaaggacatccacaaaaaacccacagctaagatcatacttaatggtgaaagttggaaaggaacaacacaaggatgccccttcttaccatgtcttttcaacactgtattggatgctctacctggggcattaggcaacaaaaagaaataaaacgtatccatattggaaaggaagaagtaaaactatccctatatgcagatgacatgatcttatacatagaaaatgttaaggaatccaccacgaaaccattagagccccattagtgcataaccattagagcaaggttgcaggatataagattttgtatcatatatgctagcaattaacaatccaaaagtgaaattaagaaaactattccatttacaatagcttcaaaatgaataaaatacttagtaataaaatgaatgaaagaagggtaagacttatacactgaaaaccataaaatattattgaaagaacttaaagaagacctaaataaatggaaagacatcacatgttcatggattggaagactttatagtgttaagatggcaatactccccaaattgatctacagacttgatgcaatccctatcagaatcccagcttgcttctttgcagaactgacaagctgattcacatgggagtgctaggggcccaaaatacaacaatcttgaaaaagaaaaacaaagttagaggactcacaccttccagtttaaaaacttactatacagctacagtaatcaagaccatgtgctactggcataaaaacatacatataaattaacgaaatagaattgaaagtccagaaataaattcatacattataggcaactgatttttttgagacagggacttgctctgttgcccagtcacaaacatagctcactgcagcctcaaactcctgggctaagcgatactcccacatcagcctcccaagtagctgggactacaggcatgcaccactgtgctcagctaatttttaaaaaactttttgtagagacagggtctcaatgtgttggacaggctgaactcctgggttcaagtgatcctcccacgttggcctcccaaaatgctgggattacaggtgtgagccactgtgtccagctagcaattgatttttgacaagtgtaccaagaccattcaatggggaaagaatgctcctttcaacaaatggtgctgagacagctgagtatccacatgcaaaagaataaagtgggaccccttcctcataccatatacaaaaaacaactcaaaacagatcaaagacctaaatgtaagagctaaaacgataaaacttttagaacgggggtccccaacctccaggccacaaacccatctgtggtctcttagaaactgggccacacagcaggaggtgagctgcggcttgctgccattcatgaagctgagcccgcctcnnnnnnnnnnnnnnnnnnnnnnnnnnnnnnnnnnnnnnnnnnnnnnnnnnnnnnnnnnnnnnnnnnnnnnnnnnnnnnnnnnnnnnnnnnnnnnnnnnnnnnnnnnnnnnnnnnnnnnnnnnnnnnnnnnnnnnnnnnnnnnnnnnnnnnnnnnnnnnnnnnnnnnnnnnnnnnnnnnnnnnnnnnnnnnnnnnnnnnnnnnnnnnnnnnnnnnnnnnnnnnnnnnnnnnnnnnnnnnnnnnnnnnnnnnnnnnnnnnnnnnnnnnnnnnnnnnnnnnnnnnnnnnnnnnnnnnnnnnnnnnnnnnnnnnnnnnnnnnnnnnnnnnnnnnnnnnnnnnnnnnnnnnnnnnnnnnnnnnnnnnnnnnnnnnnnnnnnnnnnnnnnnnnnnnnnnnnnnnnnnnnnnnnnnnnnnnnnnnnnnnnnnnnnnnnnnnnnnnnnnnnnnnnnnnnnnnnnnnnnnnnnnnnnnnnnnnnnnnnnnnnnnnnnnnnnnnnnnnnnnnnnnnnnnnnnnnnnnnnnnnnnnnnnnnnnnnnnnnnnnnnnnnnnnnnnnnnnnnnnnnnnnnnnnnnnnnnnnnnnnnnnnnnnnnnnnnnnnnnnnnnnnnnnnnnnnnnnnnnnnnnnnnnnnnnnnnnnnnnnnnnnnnnnnnnnnnnnnnnnnnnnnnnnnnnnnnaacctacagaagcacaatatttgaaaatcacatatctaaaaaggagtctagtatccagcaatacataaagaactcttactactcaacaataaaaggacaaataacccaattcaaaatgggcaaaggatttaaataaacacttctccaaagaagataaatgggctgggcacggtggctcatgcctgtaatcccagcattttgggagactgaggcggatggatcacttgtggtcaggagttcgagactggcctggccaacatagtgaaaccccatctctcctaataatacaaaaattagccaggcatggtggcgggtgcctgtaatcccagctactcaggagactgaggcaggataatcacttgaacccagcaggtggaggctgcagtgagccaagatcgtgccactgcactccagcctgggtgacagagcaagactacatctcaaaaaaaaaaaaaaaaaaaaaaagaagatagatgaccaacaagtttatgaaaatatgctcaacatcagtggtcacagggaaatgcaaatcaaaaccataacaagataccacttcacacccacacccagtaggatggctagaatcaaaaagagggacaataaaaagtgttggaggccaggcatggtagcctgtaattccagcactttgcaaggccaaggcaggcagattgcttgagcccagtagtttgagactagcgtaggcaacgtggcgaaaatcccatctctacgaaaaattaacaaaaatttagctgggtgtgatggcatgcacctgtagtcctggctactcaggaggttgaggtgggaggatcacttgaacccaggaggttgaggctgcagtgagcagagatcatgtcactgtactccagcctggggaacagagtgagaccctgccaaacaaaagaaaaaagaaaaaaaagaaaaaagaaagaaagaaagaaagagagagagagagagagagaaagaaagaaagaaagaaagaaagaaagaaagaaagaaagaaagaaagaagaaagaaaagaaaagaaaagaaaagaaagaaagaaagaaagaaagaaaggagtgttggagagaatgtggttaaatttaaatttgaatccccatatggcagctgtggagaacacttgcagttcctcagaaagttaaacatagaattaccatatcaccccgcaattccattcctagttatatacccaagaaaacgaaaaacatatgtccacataaaaactttcacatgaatgttcatagcagcattatttgtgatagccaagagtccatcaatgggtgaatggataagcataatgtggcatttctttttccttttatcttttgagacagggtctcactctgttgcccaggctggagtgcagtggtgcaatcatggctcactgcagcctcaacttgctgatcctcccacctgagccccccaagtagctgggaccacaggcatgcaccaccacacccggctaatttttcttttttgtagacacgtgttcttgctacgctgcccaggctggtctcgaactcctgggctcaagcaatccacccacctcaacctcccaaagtgctgagattacaggtgtgagccaccgcatcctagctataatgtagtaggtattttcatacaaaggaatattattcagtcatgaaaatgaatgaagtactgatacatgctacaatatgaatgaaccttaaaaaacttatgtgaagtaaaagaaggcagttacaaaaggccacatattatatgactgcatttatatgaaatgtccaaaacagacaaattcatagagacaaagagatttgtgatggcccggggatgggaggagagggaaatggaatgggagggtgtatgttaatagatatagggttccttttgggggtgatgaaaatgttctggaattaggtagtggatagttacacaacctcgtgatatactaatcgctttgctatacattttaagagtgaattttatggttaagagcaaattttatggtatgtgaattatgtctcaataaacagaaaaagaaaaaaaagaatgaactattgatacacacgacaatgtggaagaatgtcacagacattatgctgagcaaaagcagcacatactgtatgatgtgcttccatttccatgaagtgcaaaaacaggccaaaaaaaccccaggtatcatatggtgtttatgggtaccaacatatggagtgatggagtaaaaatactcatgaggaagataaacaccaagctcaaggcagtagaaggagagagggaaatggaatcagtacaagagcatctgtaatatcgcatatcctttaaaaacaatctgaagtcaataaggcaaaatattaatgtttgacaaaagtagatgcttgttacagcaccctttatactttccattttttaaaacagtcaaccaacagtttgtttctgagggcaaacgcttgactccttaaccaggctttggttgacatttgccttggtgcttttgacaccacagtctgtcaggctctgtccccaccctgatgggctccacagtacagaagaggcacaaacagtacaaatgccatggggcctggaccaagcaggggctctagaaccccagaagatgccaggagggagtgagccagtcagggaaggcttccgagaagagaggacattgaagaagagtctcaaacttaggcctgacggagaagacgcgcggccaggacaccccacccccgccctcgtctcccccaaagcctgatctggccccactgattcccttatctgcccactcccagctgcctccttgctggctgaactgtcgccgcagacttctgagcctgcgccccctccacggggatgggggagggaatggggtgaggcctggcctcacagcctcggggtttccagctcttgctggaggcagggctctggggcgccctactcctcacccttggcttctcttcctgagcgctctgtgctctccagaaatgaagaaatggggtgagtccagcggccaaacccttgtcttagctcttagacatgcctcgagcctgccattccctgtgaggacagatttccctatgttgcgaccgctgcttctaataataataatgatgatgataattcccatttacagagcacaccatttatggtgtgccagcaggccctgtgctgagtggttcctacccacgtggggggctaggactttacccgttttccagatgaagaaactgaggctcagagggcgtctggcccaggaatcacacagcaaatcacacagcaaatcagagttgagacaagaacccagggccctggaggaacatcttcatttccacacacctatgtagaaccagtctggaggtgagggcaattatacacacttgcaccacaaggagctggtgagaatgcgatagaattatgggtggagagcgcttagcacagtgcctggggtcactcagcaaataatgccgctgctgttattattagtctattaatgctattattaatatcagaattaaacaagcctcggcaacatagcgagacttcatctctattgaaaaaaaattttttgctgggtgtggtggcatgcacctgaagtcccagctcctcaggaggttgaggtgggaggatcacttgagcccaggaggtggaggctgcagtgagccaagattgtcactgcactccagcctgagtgacatagtgagacactgtccccaaaaaatatttagtacgtatcattatcactattgttgttagaattagaatagttttagaattagtgttagtattaataatagtattagtgttagattaaaattagtattagcattagatgagtattactatgaaaattagtatgtcctcatagaagtagagagtagaatagtggttaccagcagatgggagggtaggaggcagggagggatggggagaggctgtcaatgggtacaaagctacagttagataggaggcataagttctggtgttctaatgcatagtacaatgactagagtcaacaataaatgtatatttcaaaatagctgaaagaggcgttctcgaatgttctcatcacaaagaaaagataaatgtttaaggtgatgaatatgctaattaccttgatttgatcactacacaatgtatacatgtaacaaaacatcatgttttaccccatatatatgtacaactattatgtgtcaatcataaatttaaagaaataaaattagttttagtgtcagtatcaatattacaatattggtattactcttagtgtcagcatattattagcattagtactataagtagtagtagggttagaaagggctatgtactctcccttgtatgcagtaggtactcaataaataaataggggtacttaatatttattgagatttcagattcaagtaagttaagatcatgtaacatgggttaaaactcatttagtctccccagtcactgcatggagtggcttattggggtatattattaccccatttttacagatgaggagctaaattccagaggggatggtaactctcccaaggtcacctgatccattagtggttagggcagtctatgaacgaggatgagctggctctagagaccatctcctgaaaccactgccacttaagtcagaggtgtctttgtattcgttctccttattactgatgagggttcagcatggggcgtggcacaccagcaggagctcaataaataggaattcatgggcttgctctctttcctcctcaaatctcccattgcatatgaggacactgaggctcagaggagtgagataagaatggtaagatccctccagggtgggccagtgggcaagctgaccccactgacctggggctccacccttggcctctgccctttgtaggtctcagtctccccatctgtagactaggtgggcaggacagctccttgtcccacgtgtgcatgtgtgtcagatgctttcatatagaaaaagtgctcaggttaggtacaagtctatgtgaggtctatgagacactgtggttgttgtcattaatatttggaggaggtggggcagggcaagagtgtggggactggggtgcggaggcctagccacattctggttgtcccctgctgagggctgagggcagagccacaggctacatcaatccacatcctcccatcctacctgcatgggcaccacatgcccagggtgtgatccagtctgcctggaccttcttctgagtctgtctctgaatatccctctgtctctgtctcccttctcagttctccacttctgtctttggcctctttccctttcaggttttatctgtcacttctgtccatctctgtctctcattctctctttgcctctctctatatgtctttaatggtctctggttctccccgggtgtctcgccctctttgtctctccttttcttttgtgccctctctctgcctctttccacgtctgtctccttctctattcatctctgtcactctctttctccccatttccatctctctccgcctatctctgtttttgtttgtctctctgcctctgtctctcccactccacccctttcctttcctaccctatcccactcctcgaggaatcatccctggctcccacctcagtttcccgcctccaaggcagcatggcgggcaagaagttgaggccactgtccctgggtgttcctacccccacaccctcaccccaagacagcctgttactgcggcgccaacagccacggtcgcctacatctgataagacttatctgctgccccagggcaggccggagctggcgtaagccccagtggggcgctaagtgagtgtgcccctgcctcccgccagcactggcctggcctgcaggcttagcctgggtcatcaaggtatcccacaggctctagttcaaatccagcagaacctctctgagcctcactcttctcacctgcaaaatgggtacagccacatcccttctctccctgcagccaggaagacgcacatacacaggagtctagcccacaccggccccgcacaaattaagggctttactctctgaaaagcccagtgaagtcatgaaaccatatctgctattttcatttatcttggtttcagcctattttgcttgtctggacactacagtccacgggagcctaggtcgagcgaggtccaagaatccccagggtgggcagggagggtggaagagggcctccagtgcccaagaggtgccccacaagcatgggacccgccccctcccctggactgccccacccactggggcaccagccactccctggggaggagggaggagggagaagggagggagggagggagggaggaagggagcctcaaaggccaaggccagccaggacaccccctgggatcacactgagcttgccacatccccaaggcggccgaaccctccgcaaccaccagcccaggtcagtctcagcccccagagagcccccaccaaggcaaccctgggcctgctgcccctacccttatgcttgctccaggctccccaacccacagctggtccccaaagtgtcagccagccctgaatccctttacagctcctccaacccacctgtctttccaactcccatttctaccccaaatctaccccctaaaccccacctctttctgccctctcatccactccgtccaagatatctatatcctctggatcccttcactttgctcgctatacccctaggtctgtctcccctaaacactaactctgtctcccaaaacatgactttatctccccaaatcctttccctgtcccatatctgatttccactcacccaaacttgtctctgtctccctgacttctcctccaaacctcacttttctgctcccaaaccccttatctgctctacaacgccttgtctttgccccactctctctgagcccccaaacctgtctctgatctgccaaaccctagctccatcctcttaccaccatctctgcctttcaaacccactctttgttcccaatgacttctctctgatctccgcaaaccatttatctctcccaactccctgcctgctcagtaaaatatctttgtcacttcaaacaccaagtcaactccccaaaatctgttctgccgcatgaaccctcatgtctgccttccccaaaccgtatctcagccctaaaacacatctcattgtctccctgaatctctccagctccaagcctttctctactccaattctatcttggcttctcaaactcccctttactagccacattctgtctgcccaaacagatctttgactcctaaactccatctctcctccagaaaaacccttgaactccccagacttttctatgaccctcagaatctgactcccacactacttctcaactttatttctgactctcaaacttcgccccgatcccccaacctcgtctgttttcacaacctattcctgagcccaaaatgtgtctctgaacttccaagctcgtctctgctccacaaccccgcccatatctgcctccccacaaactccatggctacaccccaaacctctctgacttaaccccatatctgaccttcaaattccacctctatctccccctaagccccatatctgccccctagaccttatatctgctcccttcagcccggtgagaccctcccttgagggctgggattggaacgttacctggggtgaggggctggggccgagggagagtggagggtgccagctgctgcctgctgccgccgttggggcaacacttactctagtggggcagctgataaggagctttcatatcccccagcctcgagataaactttatctctgtccggagagtgataactgggggtgaggaggctgggcccctgccatgggaggggtgggcagccctggactcaccaacgtgtgaggtgcaggggttgggggcagtggggctggagggagatcatggtgggtaaggtggagttgaggggatgagggaatagtggtgaaagagtgagcagaagacacacaatgagacagggaagagagggagaaacagggagagatgggaagagagagacagagacacagagacaaagagcaagagacaaaagagacatgaagagaaaggaaaaacagagagagagaaactcaacgagtaagagacagagacagacagatggccggagaaaaagaaggaaagacccgggagcagaaaaggagatagaaatgcagagatacacgcaggtagcactgtgaagaggcagagactaacacagaattagagacagagaggaaagagatggagaccaagatggggaagcaaaacactctcttcagagagcaacagcaggcaccctggggctgagaaggtgttggcggtgggcacacttgtggcccatctctttcctagcataactcccaagcctgggcctgccccttagcctgtctataccatgggtcatgtaagcaggagtgaggggcagtttgaagacagccttctagtctagccctgtcactccaccctacagacacagaaacagagcaggccagcacaatagggccagggccagcattccaggctccttatcctgagctgcatgtggctgggtacggtcaggggtatgggactagtaagaggcacgtggacataaggtcagagggcccaaagagagggaaacagagggaacagacaaacaagcaggaagagtgggagagatgcagagatgttcagagagataggagaggagagggagaaagcaagagtaacagaaagagagagccagagagagaaacatgggaagacagaaaagaagacagaaaatcatcaaacattacaaaagcacagaaagaggtcgggcgcagtggctcacgcctataacctcagcactgtgggaggccgaggtgggccgatcacttgaggtcaggagttcaagaccagcctggccaacatggcaaaacctcgtctttactaaaaatacaaaaattagctgggtgtggtggcatgtgcctgtaatcccagctactagggaggctgaggcacgagaatcacttgaacctgggaggctggggttgcagtgagctgagatcgcaccactgcacaccagcctgggtgacagagtgagactccgtctcaaaaaaaaaaaaaaaagaaaaagaaaaagcacagaaggagaagacaagctatatcatagaaacacagaaagctggggaagctacagagtcagacttgagagggaacagagagtcaggggaaagagccccaggggatagagaagtggagagctagatgacagacacacacaaggcaaaacaggcaaagggccatcccacaggtctcagctcagccccagcccatcaccacccccaatacagcagatggggaaactgaggcctgggaactgaaagagcctgaaagcagaactctggtgggcctctccaggggagagggtaccggtagaggtacctcccacctgccaccctcttcagaggaagtcagtggccttggggtgatttcaaaagttgggcggggaaggcagagataagcagtggggggtactgacccccccccaaccaagaagtagggaggaactaagggggccttctgtctgtagacgcaacagaggtggagggaggagggagtcaagcccggaaaccatggggtttctgagaaagttagagggcaagatacaacagatagggatgaagttggggagcagaggatggtgaaccccaaagtcctgggtgaagtgaccaagaggcaagggactctggtcctgcatgccatcccaccctcacccagactcttctagagggggagggaagaaaggacggggggacggggagaataagaggaagtggaggaggggaggagaggagatggggaaagggagaaaaggatgaacagaaaagggaggagaaggatgaagaaattggaggggaggagaaaatgagtagtaggagaaaggagtggagagtagatgtagacaggggaagagaggccggaagtggtggctcacacctgtaatcccagtactttgggaggctgaggtgggaggatcacttgaggccaggagttcaagaccagcctgggcaacagagtcataccccatttctacaaaaaaaaaacaaaaactagccaggcctggtggcacacacctgtagtcccagctactcaggaggctgaggcaggaggatcactgccgggaggcagtggttgcagtgagccgagatcgtgccactgcactccagcctggcaacagaggagaccctgcctcaaaaaaaagtgtgtgtggatgggggagagggagataaggtgtgtgagaaaggtagaaaaggagaatgaagacaaaaagagaaggaggacaaggaagaggggaaacaggaaaggagaaggaggaggtcaaggaggaaaagaagaaggtggaggagaaaaaggaagcaggagagaatgagaaaagagtggaaagagaaggaaatggggaagaggggggcaaagaagagatgggaagaagagagacgggagaaagacaggaggaaaagggaaggggggaagaagagagagaatggaaggaagaagggagaggtagaagcagatgagagtggaggaagagcgagaggagggaggagaggaaagacaaacggcaagagggggagaacgaggaggaagatgaaaggaggggcacacaggagtggaacggggagatgcaggagggaaaagagaggagagggaggaagagaaggaggggaaggagaggggagactaaggtgaggaggaggggggaatggggaggtgggaaggagaaatatggagactgaggtgatggagtgggaggagggggaaaggagggaagaggagcaggtgaaaggaggtgggggggaaggatttctgtgtctgaggaccccttctgtcctcgcaggttaatccccagaggctccatggagttccctggcctggggtccctggggacctcagagcccctcccccagtttgtggatcctgctctggtgtcctccacaccagaatcaggggttttcttcccctctgggcctgagggcttggatgcagcagcttcctccactgccccgagcacagccaccgctgcagctgcggcactggcctactacagggacgctgaggcctacagacactccccaggtaactccattgagtggctgtcttggcattggctgagtgctgttggggttgccatggagatccttggctaggtcagaataccactgtgaggatatctcagaaatggctggaagcttctcaaatggatgtgccgaccactttccctagttaagtgcagacctgggaattccaatgctcctcaacctgccatattggggcggccacactgagaggcaatactggaagtatgtggtggttgccctagttgtcgagtgatccgtggagctccaaatcccaacagtcatcctcaaaaacccacttggaaatggtcagaggttattgcagaggccacactgaccagtgggggtcaggatccaggaagcatccaatggccagcagctgttctggtagcctgtggaaaagctgggaacttggccaccatgttgggggtgctgggaaccactgcaccctgacgtgcgctgaccctagactgattttgcctcttctttcctccatccctacctgcccccaacagtctttcaggtgtacccattgctcaactgtatggaggggatcccagggggctcaccatatgccggctgggcctacggcaagacggggctctaccctgcctcaactgtgtgtcccacccgcgaggactctcctccccaggccgtggaagatctggatggaaaaggcagcaccagcttcctggagactttgaagacagagcggctgagcccagacctcctgaccctgggacctgcactgccttcatcactccctgtccccaatagtgcttatgggggccctgacttttccagtaccttcttttctcccaccgggagccccctcaattcagcagcctattcctctcccaagcttcgtggaactctccccctgcctccctgtggtgagaaattcaaaaaaggacagggaagttgaggtgggaggggtggcccaaagtaaagctgagctgagcctagctccctcttctcctctccaccccaccagaggccagggagtgtgtgaactgcggagcaacagccactccactgtggcggagggacaggacaggccactacctatgcaacgcctgcggcctctatcacaagatgaatgggcagaacaggcccctcatccggcccaagaagcgcctggtaagaccacagacctgcttcaccttatacacaggaacccctgtcctcaccctgtacaagaagccacatcttcccattatataggaacgctgttctcatgattacaggaagctactgcaggccaccctgtatgggaacccctgtcccaatatcacatggaaacccttgccttcatcctacacaggaaaatctcctcatcccatatggaaatccttgccctcaccctgcatgagaactcctgccctttccttgtacaggaacccagatctatagaagctcctatcctcaacctacccttataagcttcaaacagaaacctttgtcctcaccctgcacaccagtgttttcgtccttggcttcacactggaatcaccccaggtcccttctcccagatgtgctgatggaattggactgggatgctgcttgggcatcaggatattttagctccccaagtgattccgatacgcagccaaagctgagaaccaccaatgtagtcccccatagaatacagaacaaaagaaacttataccagataggaacccctgtactggccccatacagaatcctcaggcatcaccctgtaaacaaagccctgccttcaacctgaccctcacttcttgggtcctcctgacatcccctgtgagccccttacccccacttccacatccccagggcactgatctcacatcctgtcgtcccctagattgtcagtaaacgggcaggtactcagtgcaccaactgccagacgaccaccacgacactgtggcggagaaatgccagtggggatcccgtgtgcaatgcctgcggcctctactacaagctacaccaggtgacgccctgccccttggagccacccctctgctttccctgtcttcatgccacactgccccccactctgttcctgttctacctctctcttcccccacaaccctctttcctctttcccctttccctccttcctcccccttcccccatctcttctactttcccccttcctccatctcttctactttcccccttctctgttattaccctccctccttccttctccattccctcctcctccgccctcctccttcctctcctctcccccacctccaggcatcagctaatgtccaaccccctgccctagaccttgggcagctcctatcagccttggaggctttcctaagctcagggcctcacagcctcaggattccttggacaatctcagcacccaaaaattatcttaccctgaaagaagtggggtagagagggtgtccctggttgacacagagaggcaaaggtctggagttggggacacccgcagcctcctttttggcaggtgaaccggccactgaccatgcggaaggatggtattcagactcgaaaccgcaaggcatctggaaaagggaaaaagaaacggggctccagtctgggaggcacaggagcagccgaaggaccagctggtggctttatggtggtggctgggggcagcggtagcgggaattgtggggaggtggcttcaggcctgacactgggccccccaggtactgcccatctctaccaaggcctgggccctgtggtgctgtcagggcctgttagccacctcatgcctttccctggacccctactgggctcacccacgggctccttccccacaggccccatgccccccaccaccagcactactgtggtggctccgctcagctcatgagggcacagagcatggcctccagaggaggggtggtgtccttctcctcttgtagccagaattctggacaacccaagtctctgggccccaggcaccccctggcttgaaccttcaaagcttttgtaaaataaaaccaccaaagtcctgaaattgtgggtgtgtctatgtgtggctgaacagcagagctgagtggagtgtgtaacaatgcctgtggctctctgatgacagtgcatggctgcaatgtgtgaccatgtgaggctggctgaggcggcacatgtgacactttgtgaccaagggttatgttgtgtgattggaacaatctatgtgaaacttcttgtgaagtgtccaggtggttccatatgtcatggtaagaggccacgcagggcttgctgacggtgggggtggtgccgggtgactataagcacactggaagtgtgtgtgctggagcaggtgataaggaggtgtgcggggctgtggtcttgtggctgggcatgacgctgggggacctttgagacggcatgacgctgggggaccttttagacagcatgacagcatacgtggtgggcacagaatctggtaaagattcttggaatgttgaacaagaagtgtgtgtcaggatgtgtttgtgggtctggcgatggcaatatttcagtgcaagtccctgtgcatgggcatgggtgtgcgtgtgtgtgcattacgtgtggcatgtgccatgtcacagtgtctctgagtggctgacaacatgagcagctctgtgtacatttgtttgtggaggtctcaacagcagagtttcagagggtataagttagggactctcttccaagggacaaaagacacattcaggaaaggaacacggagaagggtggagctggaatggtagctggcaaggtcagaggccagtgctggggcgcagggttgtccgtgggtcttcctgtcggactggtcttatcttgctcagcccagctcagcctgcagccctgtgggaaatggtagagaatgagagggggagattagggggacaaagcagcccctggaggtggtttcaacctcagtaggtggggcgctccacacagtgccaaccccttccccaacattcccactcacctgggtgaactgctccccccacagcggagtctgttcctcaatttcacaaacacacaggagcataatctgagtcatgccttaagcatcctaaggcagactgcttaagtggctcaatggaggccacacagccagtggcaaggggcccagcggggcagtctggcctggtgtccatgtgctcagccacaccccacagccagcagcaccctttcctaagggctcactgtgggtcaggcggcaggctgggaggctccagttgctttagttcattagtgcctgaaataaatattctgaggaaaatatacccatactcatttcactaatggaagagtgaggcccagaactgatgagtaacttaccctgaccaccaagtttaaggagtggattttggatggggtgacacacccagcccagcaaataagtgctgctcacacttaaccgctctttatggcttcttccctagagccccggatatgggggttgcagggacccacaggtcctgaccatattataggtaagcagctgtcctccacagaacaccagcccatcagctagcgggcattccagctccactaagtagcctgctgcagaatcacaggagtctattatgctcactgtgggcattgtccacaacagccctgatcccataaaagacacgtgtctggcctcccctcagaagcccagccctcacaccctgcaggaggccccatcctctaaaaacccccttcagaacctgtgctggacacatgcctggccccaccttgttcaggagccccgggcctcacccccataagtatagctcccccagcctggtacagaagactagctctgaagctctaggggagcccttcatctaattatcgacaggaaacccatcctgatcctgtacaggaatgccagcgcttaccctgaataggaggaacctctgcctaaccccagctagggacatctggactaagctgtaaggaagcccctgcacaccctggacaggaacccttgtcctgaccatccacacaagcctcagtctccctatacgaatcctgtcttgacctcagacaggaacacctttgtactcacactgctgcagtcctgtcctccaggtagcattttaaaaacacctcactcacaataatctgagtagtaaaccatggacccagctctgtctttacagaaatccctgtcctcaacctcttcaaggaccctgactgtgtgtggaacctcttgccttcattgttgacaatgatccctgatgttgccctgcacaacaatccatgacctcacaccctatcccatagagtccacaggaacccatgatccaactctcaacatgaacctcagtctttaacttgtatagaaaaccacttcctgaccttatggcaggaatgcctgtcttgaccatttactttaagccctgacctcagcctatacaggcacctatggcctcacctgatacaggacccccccttctcactatataggtcgcatttattgatgctgcacgaggctcctgggccttaccttgtattagctccactaccctgaccctctacagcaggggttcccaacccccaggacacggactggtactggtccatggcctattaggaattggtccacacagcaggaggtgggcagcaggcaagcaagcattaccacctaagctccgcctcctgtcagatcagcagtggcattagattctcataggagcacgaaccttattgtgaactgtgcatgcaaggaatctaggttgcgtgctccttatgagaatctaactactgcctgatgagctgaggtggaacagtttcatccccaaaccatcccccaccatccgtggaaagactgtcttccacgaaaccggtccctggtgccaaaaaggttggggaccgctgctctacaggaagcctgaccctaaaactgttccaggacttctgactggtctctgcagaaagcctttgtcctgaacctcaacagaaatcctttacttttacagtaatttatttacaggaatctctgtaatttacaggaatctctgatctttataggaactcctagctttactctctggaaatacactgcttaccctgaacaggaagcttaatgtgattctctataacagccttttccctggccttgtcccagaagccccacctgcaccctgtacaggaaccactgccctgacccaacaaagaaacaccgacctgaatctctgaaggggcagtgtcctaactacacagaggatctttgtcctgaacccgcacaggaacctctattacccccagcaggaacctgtgccctgagctagcacagaaaatcctgcccttacactcaacaggaacctttgatttgcctctttagagtaatccaaagaatgaaccagtataaaaaacctctacactgtacaagaacctctgttctgtacttgttaaacaacccataatcagaatcaccatgaatacctgcctggagactgtacaggaacccctgacctaacccccaatggaatcacctgatctgtctgtctctagtaacacagctctgatcctggacagaaatacctggcctgagtacgctgtgatcctctggcctggccgtctacagaaaaccactctcctggcctcaaaaggaacacctaaccttaatctgtatgggaaaaaatgccttcacagttttccctctcactttacaatgtctccaacctttgtatttccctgcaaacctgccttaccaggtaacagaatcattctcctgaccccagacaggaaacactaacctgacccagagatgctcctacccctacacagtaagagtccctgtctcaatgctttaaagagaaatttctatagcagtgctgtccaatagaaatatgtgagtcacacgggtaattttatattttcaatgtagccacattaaaaagagaaaaaaaagataaaattattttcaataacatcaatatacttaactttacccaatatattcaaatattattttaacatgtaatcaatataaaaattactgagctattttaaactttttatactgagttttgtgatctggtgtacatttcacatttatagcacatcatctcaagttagactggccacatttcaagagcagtagccacacgtggctggtagctaccatataggacagcataggtctgtggagtctacggaaccctatagcagacactgctataagctcattgagacctgttcctgttcttcctgagctcactctacctattccagcctcctctgcagatagatgtgggcacatgacagagttctgaccaatggagtatgggcaaaagtgacatataccagttccaggcctgacccataaaaatctctcatgcaatcctccatttcctctctttccctgtctaccaactgaaaaccaactaactccaaggacctagaggaggacagagtcacaaaatagagtttgcctgggtccatgaatgaacagtagtaaatattcagattggcttttgaatgagcaagaaataaacatttattcgttaagcccctgaaattctgggttacagcagctaggataatttagcctaattaataataatctctccccctctctctctctccttttttttttttttttttttttttgagatggagtcgcccaggctggagtgcagtggtgcaatcttggttcactgcaacctccgcctcccagattctcctgcctcagcctcctgagtagctgggattacaggtgtattagcccggctaatttttgtagttttggtaaagatgggatttcaccatgttggccaagctggtctcaaattcctgacctcaaattatctgcccacctaggcctcccaaagtgctgagattacaggcgtgagccaccacgcctggccagtaattttttttttttttttttgagacaggatctcactctattacccaggatggagtacagtggcacaatctcggctcactgcaacctctgcctcccctcccaggctcaagcgatcctcacacctcagcctcccgagtagctgggactacagatgcacaccaccacacccagctaatttttgtgttttttattgagatggggttttgtaatgttgcccagctggtctcaaactcctgagctcaagcaatctgccctcctctgcctcccaaagtgctgggattacaagtgtgagccattctgcctggccaataataatctcttgaccgaaatctagacacctgatctcactgtctatatgaacacaagctctgaacctatacagaaacacctgtgacccagtactggcccacctgatctctttgtaggaagctgtcataacataggtctaagaagccccatcctggccacgaatggtggctcacacctgtaatcccagcactttgggaagctgaagcaggcagattgcttgagtccaggagtttgagaccagcttgggcaacatggcgagaccccatctctataaagaaaaaaaaattaggcaggcatggtggcatgcacttgtagtcccagctacttgggaggctgaggtaggaagacagcttgagcccaagaggttgaagcagcagtgagccgtgttcacaccactgcactccagcctaggcaacagagtgagaccctgtcccctgtatcaaaaaacaaaaacaaaaaaacaaaaaaacaaaaccttaatccttaacttgcacaggaacaggaacccatagtctggagctctctagaaacccctgcttgattcagtaaaggtacaatatagaaaccataggaatccctgtcctcattctgtccaggaacatttggaatgacccaccagaggtacactagaagtgacctgaccctgcccatgaatccctgtcctcacacacctcacacaaaaggaatacctctccttaggaaaaaaggcccctaccctcaatcctgcaaaagaataccagccagatagagaccaaggcctgacactacagcacagatcggcaaactatggcattcaagccaaagccagactgtgggctgttttacatttttaaagggttgttttttaaaaagagaaaaaaagaaaaatgccactgagaccgtatgtggcctgcaaagcctaagatgtttactctctgtccctttataaagtttgctgacccctgctcttcagaaacctctcttctgatccaacagaaaaatgggccttgaccctttgcaagactccctactctatcaggctgcaggtatcagaactctagaatttttttgtagtgtgttatcattgtatgtgttttctttggtgagtgtaggggtttaaaggtcttaggtctgcaactcttttgcgctgagacaaaagataggttcacgtaggaggggtgagagggaagaggcggcaggacatcttcaagaggatcagagggcaaagctactgggcggtgagaccgtcaatctgtcagtctgatgcagaacccccggactgcttatctctccggtcccagcttatagcccggtaggaaatggtggagaatgagacagggagattaggaggacaaaccggcctcctgcagagctgacatttagacatggagtgggagttgcgggggagagggggtgcctagggacagctccccagacgcacacacactttctattactgcttgggagcagtggttacccgttggagggggcagatagggagagctgctgcccatgagaactcccatcctcaaggccattctggccctgggcactattattatcacaactttccagatgaggaaacggagcacagaactgttcagcaacttgcccaaagtcacatggttaagtcccgtaacctcagtttccttatctgcaaagcagccttaataatgggaactacctcatagaattgtggtttacaacgatgcctgtcacataatacttgctatcattaccattccctgcccccactaagactccttccactcagaatattgcggcagaatattaatagctaatattcggccagtgtttcctgtgtaccaccatagtgaatattaactcggaaaatcctcacatttagcatcgtcaccacgcctattttggccgccaccaccaacgtccagtggcaacctcgctctcggcccagccacaaccagcccgcccgcgctacgtcatcacggcgcgtcgcgcgggaagtcgcggggaaaaggtaagatgccccttcctaattccctcgcttccttgcttgctctccagacaccgccgacccgaagggctcctaagtgactggacagggacggaggggcggcggctatggcatccgggacgacagcgacgatagccgaggcaagaaaaagcttgcaccgcagccctgtcgggaaccgccggcgcctgccttttacgtaggcgcagcacagctggcgtagcacgccgacgcaccgccccgtcgcctgtgagctcgcggtgtggctcagcccagctggcgtagcacgccgacgcaccgccccgccgcttgtgagctcgcgagaggtgtggctcgcgcgaggggcgcggccttgaggcacggtcccctctggaggcgggatctgggcgggcagtcgagagacgaggcccaatggaaaagaaaagcctgagcgctcgcgtccccacaggtcgccagaaacttggtggagcgagccaagggcggagtttgagaaaggggctgcgtccaatgagtggagcggtgagtacagcgcgtcgacggcggaggcgggaagggggcggaggccgaccgaaggcggctagggactggctgaagagggttagcgaaacgttagcggtcgggtctgggcagggggtggagctggttgaaggaacggggcagtcccctgaggagcggggctggttgaaacgctaggggcgggatctggcggagtggaaggtaccggtccggcccgataaggggtggagttaagtgaatcgttaagggtggagtcgaaaccggggtcggggccggggccggctgagtgaaagggtgggtgattatcccgggagataggccgaaagggcaggttcgtgaaggaatggggtctgggctgggcttagagggtctgggaatggggcttaggagagtagaaggggcggtgattggttggaaagggcaggccctaagacggactgtgtgagcccgggggctcattgctccgtgaaagggcaagaccagggaaagagaatcgtgtaaaaggggtggagtctagcgggccgggcggggccgggtagaatggccacctgagtggagggagaaggcctgagagaggcggagtttggaaggctgtggagaatcagatcgcgtaaggaatggaatctaatagagggggcggagcctggaaaagggcagagaggtggggtcctcagggcacactagccccctcacatacccacgctcctccccccacccccagaaccgcggcaggggccaagcctcctcaactatgacctcaaccggccaggattccaccacaaccaggcagcgaagaagtaggcagaacccccagtcgccccctcaggactccagtgtcacttcggtgaggccctagacccgccctgatgagggggagagggagcaagttggtcatgccctggactctgacccttctctctgattcacagaagcgaaatattaaaaagggagccgttccccgctctatccccaatctagcggaggtaaagaagaaaggcaaaatgaagaagctcggccaagcaatggaagaagacctaatcgtgggactgcaagggatggtgagcagggcctggctgcagtttagcctcgtatgacaatcaaaacccaaaggttccccaccctggacagttccctctgactcagggcctaaaatggatctgtgtctccttttttttttcctctgcaggatctgaaccttgaggctgaagcactggctggcactggcttggtgttggatgagcagttaaatgaattccattgcctctgggatgacaggtgaggctgggtcctccaggctgtctccaaaccacaaaaatacacacacttagagcccattagcaagaataaatcttttcttaccccagcctggatactggaagcagatgatttggggaggtagggctcacacttgaaagggttcttttatgtagctaacaaacatttattgagtgcctattgtgtgccaagagttggtgatacaaatgtaccaaacaacagacaggggtccttctctaggagcggattgatgagtaggagggcagatcattaaacagccaacagcagtatgaggtgtttaatgaagacagacttaagaccaggggattcaagggtgtataatagaggatcctaaactagtatccgggcttcccagaagcctttatagaggaagagacgtttgtactgaaacagaaggatgaaacctcccgtttgctttacttttcaaaaagaatcagcaaatccttttggctatatgttcaaaatatattcaccatctgacctctcctcaccacctccactgccaccatcatcatcactcacctagacttgcagaggcctcctccctggtcccctacttccaacctcacctctattatctgttcatgcagcaacctaaaaaaatatgtatgagttgatgtctttgttaaaatactttaaggaggccaggcatggtggctcacgcctataatcccagcactttgggggggccaaggcaggtggatcacttgaggtcaggagttcgagaccggtctgaccaacgcgatgaaacactgtctctactaaaaatacaaaaattagttgggcgtggtggcacacacctgtaatcctagctacttgggaggctgaggcaggagaatcgcttgatctgggaggcggaggttgcagtgagccgagattgtgccattgcaccccagcctgggcaacaagagcaaaactctgtctcaaaaagtaaaaataaaaaaaaaaaaagtactttaagggcaaactgttgccctcaaggtaaagtccaaatttttcatcctggcctcaaaggttccacatgatctggctccacatcactttgtgacctcatcagccaatccttctcgc

SEQ ID NO: 77 - DNA, 1498 bp, Homo sapiens
gcaaaggccaaggccagccaggacaccccctgggatcacactgagcttgccacatccccaaggcggccgaaccctccgcaaccaccagcccaggttaatccccagaggctccatggagttccctggcctggggtccctggggacctcagagcccctcccccagtttgtggatcctgctctggtgtcctccacaccagaatcaggggttttcttcccctctgggcctgagggcttggatgcagcagcttcctccactgccccgagcacagccaccgctgcagctgcggcactggcctactacagggacgctgaggcctacagacactccccagtctttcaggtgtacccattgctcaactgtatggaggggatcccagggggctcaccatatgccggctgggcctacggcaagacggggctctaccctgcctcaactgtgtgtcccacccgcgaggactctcctccccaggccgtggaagatctggatggaaaaggcagcaccagcttcctggagactttgaagacagagcggctgagcccagacctcctgaccctgggacctgcactgccttcatcactccctgtccccaatagtgcttatgggggccctgacttttccagtaccttcttttctcccaccgggagccccctcaattcagcagcctattcctctcccaagcttcgtggaactctccccctgcctccctgtgaggccagggagtgtgtgaactgcggagcaacagccactccactgtggcggagggacaggacaggccactacctatgcaacgcctgcggcctctatcacaagatgaatgggcagaacaggcccctcatccggcccaagaagcgcctgattgtcagtaaacgggcaggtactcagtgcaccaactgccagacgaccaccacgacactgtggcggagaaatgccagtggggatcccgtgtgcaatgcctgcggcctctactacaagctacaccaggtgaaccggccactgaccatgcggaaggatggtattcagactcgaaaccgcaaggcatctggaaaagggaaaaagaaacggggctccagtctgggaggcacaggagcagccgaaggaccagctggtggctttatggtggtggctgggggcagcggtagcgggaattgtggggaggtggcttcaggcctgacactgggccccccaggtactgcccatctctaccaaggcctgggccctgtggtgctgtcagggcctgttagccacctcatgcctttccctggacccctactgggctcacccacgggctccttccccacaggccccatgccccccaccaccagcactactgtggtggctccgctcagctcatgagggcacagagcatggcctccagaggaggggtggtgtccttctcctcttgtagccagaattctggacaacccaagtctctgggccccaggcaccccctggcttgaaccttcaaagcttttgtaaaataaaaccaccaaagtcctg

SEQ ID NO: 78 - DNA, 1242 bp, Homo sapiens
atggagttccctggcctggggtccctggggacctcagagcccctcccccagtttgtggatcctgctctggtgtcctccacaccagaatcaggggttttcttcccctctgggcctgagggcttggatgcagcagcttcctccactgccccgagcacagccaccgctgcagctgcggcactggcctactacagggacgctgaggcctacagacactccccagtctttcaggtgtacccattgctcaactgtatggaggggatcccagggggctcaccatatgccggctgggcctacggcaagacggggctctaccctgcctcaactgtgtgtcccacccgcgaggactctcctccccaggccgtggaagatctggatggaaaaggcagcaccagcttcctggagactttgaagacagagcggctgagcccagacctcctgaccctgggacctgcactgccttcatcactccctgtccccaatagtgcttatgggggccctgacttttccagtaccttcttttctcccaccgggagccccctcaattcagcagcctattcctctcccaagcttcgtggaactctccccctgcctccctgtgaggccagggagtgtgtgaactgcggagcaacagccactccactgtggcggagggacaggacaggccactacctatgcaacgcctgcggcctctatcacaagatgaatgggcagaacaggcccctcatccggcccaagaagcgcctgattgtcagtaaacgggcaggtactcagtgcaccaactgccagacgaccaccacgacactgtggcggagaaatgccagtggggatcccgtgtgcaatgcctgcggcctctactacaagctacaccaggtgaaccggccactgaccatgcggaaggatggtattcagactcgaaaccgcaaggcatctggaaaagggaaaaagaaacggggctccagtctgggaggcacaggagcagccgaaggaccagctggtggctttatggtggtggctgggggcagcggtagcgggaattgtggggaggtggcttcaggcctgacactgggccccccaggtactgcccatctctaccaaggcctgggccctgtggtgctgtcagggcctgttagccacctcatgcctttccctggacccctactgggctcacccacgggctccttccccacaggccccatgccccccaccaccagcactactgtggtggctccgctcagctcatga

SEQ ID NO: 79 - DNA, 61265 bp, Mus musculus
  misc_feature (653)..(807): "n" at positions 653 to 807 can be any base
  misc_feature (47360)..(47753): "n" at positions 47360 to 47753 can be any base
  misc_feature (59683)..(59755): "n" at positions 59683 to 59755 can be any base
  misc_feature (60724)..(60922): "n" at positions 60724 to 60922 can be any base
atagtgaaactgtctcaaaaacaaaaccagggctggagagatagctcagtggttaagagtattgactgctcttccagaggtcctgagttcaattcccagcaaccacatggtgactcacaaccatctgtaatgggatctgatgccctcttctgatgtgtctgacagcgacagtgtactcacatacatgaaataaataaataaatccaatttaaaacaaaacaaaacaaacccaaacaacaatatggcctaaagttatagattcattcctttgtctctgcccttaccaagtgtatgttttatgaagacacattttctagaacaatgcctgaagcagcacacttgtttactggattcccttccagggactcaaactagggcctcataaataaataaataaataaataaataaataaatggagttttataattttatgtgagtggatatttttcctgcatgtaaaccagggcatccctgagaccccagatggccaggaaaggtggaaggatcccctagacctgcagttccagatgggtgcttgggattggatccgggtcctctggaagagcagccagtgctgctaaccatgcagtcatctctgcagccctgaaggaagcttgagttaggaaggagagcactgagagtacccatcagnnnnnnnnnnnnnnnnnnnnnnnnnnnnnnnnnnnnnnnnnnnnnnnnnnnnnnnnnnnnnnnnnnnnnnnnnnnnnnnnnnnnnnnnnnnnnnnnnnnnnnnnnnnnnnnnnnnnnnnnnnnnnnnnnnnnnnnnnnnnnnnnnnnnnnnnnnnactgctgaggctgagttaggctagcaagtaaggctccgcaggtggagggagaccagactcctggcaactgtcctgatcaccacatctgtgctatagcaggatcccctccttccccattaataaaccaactgtgatttgggtttaggttgggtttgtttttgagacagggtttctctgtgtagctgccagtcttgttatccagtggttctcacctgtttaccagtgtagtggggctctgcctgctgaggatctttgcagacattttagaatacatataagcaaatacatacacatttcttccaaaaacagaatcatgtcacaaattgatctacatgtgccattatcttttctaagaggatttgttggtgcctggtgtctggcacacatccctttaaagcaggcagatctctggtgaatttgaggccggcctattctacatagtgagttccaggacatccagggctatgtacagagaaaccctgtgtattagtgtatggggtggggacggtttggcagctttctagtttttgtttgtttggcttgtcagtattacaaggttgtttatctgcaatgggtaaagtttcacttgttccaggcagatggggtttgtagctgtcttaatcctaagggggagatggtaatgaaaacagacatttgacatttaggtgtcagcctgtgcagttgtaatcaggtataaactgtgtcaactgcagtcataatgacacattctgatgcatgccttctcatccgtaactcttcagtgtctagggggccaagtcatcactcatgccatagggacacgctggataacggcattcttcgtaatgcactttaatgaaagcaacagtgttctttttgaataaacatttacagatttcttccctagttaggtaacttaagtgttttttactgttagaggtaaaataatcttcaattggacatagatttagctcatctttttcacaactgtgacattcatatagtatgcatttccaaatgtttgcactttcatgattattcacttgaggaattgtttttttttttttaagattttatttatttatttattatatgtaagtacactgtagctgtcttcagacactccagaagagggagtcagatctcgtgatcggatggttgtgaaccaccttgtggttgctgggacctgaactcctgaccttcggaagagcagtcgggtgctcttacccactgagccatctcaccagcccgaggaattgtttttatttgtgactggagagattgctcagtaattgagagcactgactgctctttcaaaggatccaggttcagttcctagtgcccacaactatctgtaactccagtcttagaggaactctctggcctttgtaggcaccaggtatgcatctcgtatgcatatatacatcaggcaaacacctatgcatataaaataaaatcattttttaaaataagagcatatttttaaaagaaacatttttatttagccacactgttaatttagctctaccttatgcagcctgtggatatttgattcacagggagacctgtacgcctccgtttctgatcgcgacttttcattccttctggtggtttcccttatgaagtgaagcatgactggttctttgtacacttaaacctttccttccctctgctaaagcatttcatgtttccctctaaacccagctgcaaacgtcagactttccacctgtcaccttggcatctctatcgacccctctcctgcttcactttgaaactcaggacgcactgttattctctctctcccaatctttactgttgcccagtgcctctgaaaggcactagtgaacacgcagactcagcacttcatgtccgtcgtttcaaaacaacctttagccaaatactcattcttcagaaatgtcctctcttactctaagcagcatctgcagaagagtttgaagttatagtcacaaaattacagacaaagtactcagggaagtgagcaatcacataataaaagatggtgaaaaacactactaatgtctaaaaggtctctgtgacacactaaaatttgtccatagctgctgaccaaataatgacctagaaattccatcatcaaaaatctctcccaacgtagagtgaaaggacagtgatggaaaggagagaagcggtggctccagccacatctgctgcttgggagaccgtgcagtgtgctctgactcctggtgcctggatgctgactcatcctggccctctggttggagtcaggcacctacagcattttaaaagctctgtgggtgatcctaatgctggcagtgttaaaaaatgactaagaaacctgaacggtaagacaggtctgacatctctccaaccagacttcagggcagagggccagattactgcagtgtctgtgcggggagacctgtaaggatgggagacccatcggggctgagggaagacgataacacctgggtacctctctgcttactgtaattctgagaagcaaaaatacttttgtactttccatagggaaaatacaggagccacactaggagcaagagaagcctgactggtctatgggacccaacataggtcctgctcttggcccctgagttctctagtgaaccccaagtctagcgctgcacttgtaatgccctactccatggtcagggcaccagggaagtggtttgcttctctgttggatccattgatctcgtctgctttctattccccgacttctcacaatcagtgctgcatgcctaccttttgttgctgttttctggactattagggtattacagacttactggacctgagcttgtcatgtcccttcagtgcagaaaacagcttgtgtagtatgaccttgagaagcaaaagcttcaacctgcttgaagcccaggagggtaaaatagtaagaggtaaaatactttattcagatttttctttattgcataatgttaccattaggtagtataatattttctagggtttttgttgttgttgttgttttgttttgctagcaatacaaccctgtgcctcctgcttacttaatcattcagaccaaaatgatgacacacacctttaatcctactgctcaggaatcaagcaggaggatctctgtgagttctaggacagcctaggctacatagagagaccctatctcaaaacaaataattcacctggctaaaccgccccagcaaagcaaagctgcactgtgagaatgtgttgggggttctaggcaaggagcgtctactttatctcttcccaggagaacagtcccgtgttgctcaactctgctgtggtggacatggagctgtgagggaaggggaggctgcttcccttgccagccagctcagcaggtcaaccctcacaacaacggagtgacagacagagccacattaccttacatccaaggcgagtgaatgaagaatgagtcctccaaagcattgtgtatattgaagactagactgagtagtttcaggctgtgaggtagcagagcctctttcttaaactgtctccttactggacctctcagagcccttggctgagaggctgatggaatcactcccagaaatccagctgaggatcgaggaaggacactgcaactgaggaagggaggaagacctcagagggacttgggactcaggactcggaaaggtgactccagctggctggctgcccttggctggctggccgctccgatacatctgtctgatcaagctgtttctgttgatttttcacttcttataaaagtatacatgcatacgtgtatgataaaatatactgctttagacatttaaatgttcctaagtggcattaagtacactccctcccaatattgtgaaaccatcaccggtcattcttttcatcaccccaaacagaaactctgtaccttacaacaccccctagtaacctttaacctactttgattctgagtttgactctgtatgtgttgtatacatgtgtatgtgttggcatgtgtctgcacttgtgtacaggtctggggtcagcatccagtgttgtaaaatgtcttcgtattttatttatgattggtgtgtatgcatgtatatgccacagcatttgtgtagaggccagaggatacttttaggatatggttctttccttccatgtggaatccagggatcaaactccagatttcaggcatgtgtagcaagcgcttttactttctaagccatctctccaatcctgcaccaactctagactgtctggccagcaagcccctgagatccttctgtgtcagcccatgctaccctcacccagcatgcaccactgtactgggctacaaactcgggtcctcacatgttcagcttgtgctctgacactgagcaattaccgtcgaatccccaacacgtacactcttattttcccatgatatccattctgatgggtaggaaccggaatctcttacagtgcttctttccctttaactggtcactgttgatgtgaaacatcttgtcattttctgcatgaatgtgtatgtgtatatatatatattttgagagattgtgtgtgtgtgtgtctgtccagtcccaccacctcagtatagaagaaagacatttctttgggaaaagtagctgaataattgtagtgtgtaatttcacggagctgtgtagttgtttcctctacctgtgtagttagctctttttttttttttcttttttaaagtgtatttcttgtctgccaataaataactattactatctctagctctaggttggaatgtctgagagaggtcagaggttgaattttaagtgaggattttccagtccattcttataacaaaatgtcaaaattgaggtccacttagcatgccctgtgttctgaggttgaggtatgcttctgtgctgtgtcttttctcttgtgtggagctgaaagctatagacaacaaggccaggagttggcggggcttagaaacactcgctgtggttcctcagtgcttctaacaaagaagctagggatgtccgatgggacaccgtggaggaagagaagcaccggtcacatgcacagactctgcaaagctcagggtagcttcccacgtgagagaccgtagttacctgaagttgtcagtacctgttgatgagacactgtcttctcatgtctctgttgtgtctcgggtcattgccgactggtactttggagggtgagtgcctatctgccatgtccataacaggagcactgggtgttccccttctggagcactggggtgcagtttccctcccttagctggtgcagtacagtacgctttatcatggattagtaatagcgttaggtaaaggtgaccagaggaaacaagactctgttagaaaaatactgatatttccctagcttttcttaaagctttttaagaattgtctttttttatgtaataccataaagcaaaaaggctacttattttgtttgtttacttataaaaatttatacttctagtgacctacatgaatttaaggggaaatgtttagaaaataaaaggatttgggaagggagttgctttggtttttgtttgtttgtttgtttgtttgtattttctttgtttggcagcttagtttttgttttttcaaaacagtttctctgtgtctagccatggctgtcttagaacttgctctgtagaccagattgcactagaactcacagaaatctgcctgcctctgccaactgagtgctgggattaaagttgtacaggatcaccgaccaacttagtttatttctttattccttaagatttaaatggctttgaacctggaaaaaaaaaaggttgttttctggttttccagattcctggtgcttctcttcctgtggacttggcggttctgttccaagtcagtctcagatttgcacgctcgcatccttaagttgatgaagttccttggtcaagttgacacttagcagaagcgacaaatgggttgaagggagttaagacttacatgaatagcaagccaagttgttcttttcttcatctttatttttaatttatttatcttttgagaatttaatatatgaatactgattttacatcatttctcctttaattcctcccatatccccttctcaaatttgtgccttcttatttgttgattattgttacatgtgtgtgcattcatacacttgggcgtgtgtgtgtgtgtgtgtgtgtgtgtgtgtgtgtgtatgtttacctatgaatacagcctgttgaagtcttacagttttgcttgtatgggtttagagagggtcttgtgtagctaaggttaatgctcacccctgatcctcctgcctccacctcctgagtgctcgtattgcaggcagcatatgctgctgtcaccagcatgggcctggctgaaaaaaaactgtttttttctcttttttaaaaattaattttgtgttgtctgcatggatgtcttcgaatcatctgcatacagagggcagaagaaggtatcagatcttctagaactgtgtaacggacagtcgtgagcctccatgtgggtgctgggtatcaaacatcagttctctgcatgctcttaaccatggagtcatctctccagctttcccattaagtatttttggaagaaatagcacatagataaagtccgcctccccttacatcgccatgaggcagtttgtctaattgctgctgtcacaggtttggttatggcgcacagtgcctgttacaaggatagttcttagatcagccccttccaccttggagtttttgagacagggtattcctgtgactaggctggcctcaaactaagaaatccgcctgcctctgcctcccaagtgctgggatttaaggcatgcgccaacacacccagccctagatccagcttcttaaatgttcctactcctgtctcctttttgcccaagatattcctaagcaatcccagacatgtgggcatataaaatagacatacaaggagaacatttattgataataagtcatagtttattttaaaacaatctttgctgtgcagatatttttactatttattcgagataagcaaatatgcacaccaaaagatggatatgcttgtttgtctagtacagttgagtccaaagatagactgtgttttgatattacctgccgagaggtggcagtaggaaatattaggtccttgttgtatgtccctaaaccatggtgtttctataagagcagaaaccgttgtgcgtgcgtgcagcagaaacactgcgtagctcacaatagcctttggtgtgagctgaggggctgtgagcagcaccgtttagcattgcatgatgcagtggcatgcatggtgaattgcacgtgtgcgctcagccgagtcccacactgtggcatggccagcactgccagcacaccgtggattccttgtgaatttattcttgtttgggtttggggccagtgtgtattcagaaagcattgctgctgctcagctggtctccccgggtgtgggctcaccacttcctctttagttatggtgcacatcacctgctaaaggtttatattgctttgttggaaaggccctctcaccttttctggtgggtaacctgtgggtgaggctggtgaatatttctcaagaacttttcacctagtgcctttaatgtgctcagtgcttctgtcctgttgtgttgctagaggcccacgtgtctctgaaaacctaccgaacctttcccaaggataagtcgatgagcagctccctccagatagttaaagaccattccctgctgtttaggcgcttcctataagctcacgcaccagatatgtgtcaccaagtcctagaagctgggggtcggccccccggtctagtttccctgattatctagtccagcattgtgctgagctaggtacttaactttggttgtttgtttgagaacagcttgttctaggctttcccctaccctgagccaaacatgtggaccttttattctggtataaactgtgctaggaaatccacacaggggctgggccctgggattgtgctgctctcttcgaaaatctttcagcacaacaaacagctcaacctgaagaaaacttagcttgtttggaaatgagttaaaacactcatattttagttgcccaattctcagttctattagtaaagcgggttctttacaatactgggagctgttttgtgtttggtttgactgtaagcagagggcccaccaggtgacttgactgagcctggagtctgtccttaccctagtgtggaatagctttagaagtggcccacagtgagccggttttggtaatgtccttaactttcagtactcggaacgctgaggagagagaaatgtccagtttgaagccagcctgggctacataagaacctgattcagaaaataattggcattgttattaattcttcatttccctgctcagtcaaggagcagtagaagataatcccggcagtagacaagtgtgtttcgtttagcctattgatcactgatatgcagattggctttgcaggagaaaaggtaacagccctcaggaggcagacaggtggatctctgttagttcaaggccaggccagtcgatacatttgagttcaggacagtgggtctctgtgaagcagagtttgtattctgagtacactgctctgagtaacagtttagagtgcctgaagtaggagcgaaaggcagccctccagagttccctgctgaagactgtaatatgcaaagcacacatcccgtgttctacaagaccctttatctaccaggagtgcttcataaatatccacatccagctgagaagagctaaggaagggtaaaatggcaaaacgacttgcatgggcattgtggatctggctcatgagagaaagaagagagagtaatcaaatgggtgtggctggttatggaaagggagctggttggtttgaccagtgtgtgtgaaggagagtggcagaacaccagaggcctctgttctctctcaacaatatggctgtaggagaagacttgttttatggttctgagagggcagcttctccctgtgttgtcctgttaaggaatataattaccggcaggcctgacttatactgctctcatctaggaccgtggctagacgggaaattgaagaagtgggtgatgttttatttccttgtctgatggcatcaatgcatgcccacagcaaatgcttttgttattgtttctgtgttttaactctattagtcttatgtaagcttagttctcagggacttttcaggtgtgttaagaagtgatactttgattgaaggaaatgcatttctcttggcaggtcttctacttacaaaggacaatgactactgatgagggcaccagtaacaatggagagaacccagcagccaccatgactgagcagggtgaagatatcactacgaagaaagacagaggagtattaaaggtaaggccacagaagtgtgaagcagggaggtctctgtgtgggagcttgtgggtgctttatgcagcctgtcttgtggacgggatagggttaagtagcaaacactacagctcacttcccatctagcttcatagctgggcgtaatctcagattataaatggtgcagcttccgctgggctgggtaaattaactcacatcttaggccctgcagaacaagttccagttatgcgttccctcaaaagaacccctccttgtttcagagggtacatgtagattgcagtttaatatgccatcttagtgtgctaaagctatgcagtgactgcaaaagagtctgtagagaaaaaggagaggacttagtttttatatacaagtactgtttctatgtgtcatgatgtaaggacacagaatatatatttggatcatcttccctattaaagtgtgtgtgtgtgatgcatttgtgtacacatatgatgtatacttgctcctctgtcaggatatcttcctcagtcacttttctaccttatttctctgtgagacagagtctgtcaccaaacctagaaggaagcctgtttgagtaagactgggtagccagcaagcctctgggatccgtttgtctctgtcctccagcactggggttggagacacactctttcatgattatggttttacatgggtctaaggaatctaagctcggatcctccttggaccagctccatagacatttttttaatttgcgtcttagcaacagtgttatgagatagtaccttttgatcatggtgggactgggtatggttcctagggtctcactaagttgccaggctggccttgaattacagtgtaacccaggcaggtcttgaacctgccatcctcctcccttagtctcctgagtagttgggattacaggattgtgtccccaggatgggccaggttctcgtctgtggttctgttctgaatctccatgcattcctcttaccttgctctgtgctgtcagtccattgagatctctttttcctgcagcttcttagcctggtagctgtaattcctcacccagagctcctggaagcttctcaagacagtggagattcttcaggctgtccgcagcgtctcctacctcatctttttcagtgtgctgtgttcagagaactggtctcccaggtcctcagaccctgtgtattctgtaaccaagtactgagtgattcatgagggagaagtttattgtggctcacagtgctgtagtctgagaagtccaggaacagagcattcctgcatcaccttgcttctagtaaggactcattatagagtgaaagcagaaggcaggcaggcaggcaggcaggaagatctgagaggcacaaggacacgtggacagctttgtacaacttgtgcggtgagcctagtccctccacagggagctcacagaggcaagaccttgattccacctaacttccctcctaaaggcctcgtatcccagcactgtcctggtagcagttgatccagtgtaagcttttgagcggacaggtcatattcaaccctcactcagaccacagtatccctccatcgctgccgagcctgctcagagctcttggataggcagtatgctatagtctcctttgtcctagggagtaagtctaagaacaacaacagttaggtttattataactgtgtggtttgaagctctttaggttatgacacctgttactgtctagaaccttcaagtcacctcagggcctttggtaaagagtcagtatgtttcacagctgtggcccggagatttgtcagcctccctgggttaaggcttctacttataaaatgtgtaataataataataataataaaagttggttttacatttttcatataaattaaaactagatttttatcttttaggcaagttaagatttaagcacaagtttcatcttgctgggaagatagacacacacataagagggcactatcacgtgttagctgctgtcttctgcaccactgaaatggtcccattggcacagatgattgacagaccgaattgcaccaccacacgcctgggttacattttcttttccaagaattgaccaactgcattagtatcttgctctgccaagaataaaagaagtagtctggattttacagtggataaatgtttttcattttgaagttcttttcttcttttttttcccttttcctttttctttactagaaaacaagctacttggtatcgtctaagtctatattttacagattattcaaataatggatgtttaaactgttacatcagagcatacagcagagcgtttggaccctatctttagcaaaggagggaagtaaatatgcccccttgactctttgctgtttaggaagtccagcagtcctttggctagttcagtttgtgtacctttgcctgctcatgagtctgtgttttgagagattttagcatcttggctttcaaccaaccaagtgaggtttactggctaattctgttttgccttggtggagatagggtttcacaggataatctagctggcctggaacttactgtgtagaccaggctgtctccgcagtgatccttttgccttgctctggctttctattttgagagactaaatattgtggtgagctgtaataatagtcataacacaaagggttagtgaaaggcagttttctaagagcaggacaaagaaagctgtgaggaatggcggtgaatctgcccatctgtctgggtgctggggagtagtccttgtggcctttgtatccttttacaagtacaaagctctacactttttttcttatgtttgtctttcagattgtcaaaagagtggggactagtgacgaggccccaatgtttggtgacaaagtttatgtccactacaaagggatgttgtcagatggaaagaagtttgattccagtcatgacagaaagaagccatttgcctttagccttggccaaggtaagaggacaatattttcagggtttgtgtaggtttgattctgtttttattttttatttattttttatttttatttgttttttaagagttatttatttataaatacctaataaaaatgaaaaaaaaaaagaaagttctagagatagatgtgcaaagagaagccaggcaactgttggtcgcgactgtggaaataagagctaggttgtagctgacagtaacccattatgaatatacttcatataactgggcataagactggataagatgggaaatttcatgttacatatatcttattattaccttaaaaaatgggcagatgtaaacctaattctgtccacatatacttggaaaaaaaaagatattgtaaataagagtaaaaaaaaaaaagagttatttatttattatatgtaagtacactgtagttgtcttcagacaccccagaagagggtctcagatctcattataggtggttgtgagccaccatgtggttgctgggatttgaactcgggacctgcggaagagcagtcaatgctcttaaccactgagccatgtcaccagccccatgattctgtttttatatttcacaataaacatggcaaacatggtccatggatccctaggtgtctctgtggtccttttgggaccatagtgtaacttctttctgtagcagtgtgaaggtgatgccgctttcacttgctcacgctcacactggcaacctaaaatctgcagaggcacaaactgcagggaccctcgtgggcatcagtgacagtcatctctggagcccattgtgttgtcactgcctctcctgttggctgtcatctcagtgcttccaaagtcgccctcaggaagcctgctacactttcagttgggaactgagctagctcagtgttgccgtgaacaccattcttccttgcaaaggcagacgatgactgttcagacttgagaggtatttcctgaaggagaatgagataaacctgtcacttcaaggaaaacacccgacagatgttgttgccgttgcagcttcaggtggaaaaccagttttaaaatatttgtggctgtcccatgcttaacagcttcctgagccgtaagacttctctgtgagagcggtgggtactaatgagtgtgacttgacttctggacagtgaggttcgtcactgttagagtgtctgcctaactcagttagccagtattttcccagggaccagtgcaatacatacaccgtcaagtgtggacaagcagtccattcaggctagaccagtgctgtaggggctgtagtgtgagaagccctttgatgcagatgacctgctgaacctcttttgatagtcatctaggaattctgtgacgctgccctcctgccttttcccaggtccttgtgagtttgttcttttctacatcttcagtcagaagcaagcaaatgacttcctcttggcttatatcaagtcaaacatttcacttttgtaaaattaaaaatgacagctgaggactgactggggtggtgttctgtagtgagagtgcttccctggcatccacagagtgagtttgatcctcaggtgcagtttccgactgtaatgccagcacttggcagattggaagcagtggggtcagaagcacagaggtgttcagttgaccacagaacagagaaacataagccagcataatggcacacacctatcttctcagcagttgggaggtgtcctagttagagtttctattgctgtgatgaaacaccatgacccaaggcaagttggggaagaaaaggtttatttggcttacacttccacagcactgttcatcattgaaagaagtcaggacaggaactccaacagggcaggaagctgcaggcagaagctgatgcagaggtcagggaggagtgctgcttactggtttgctcatcatggcttgctcagccagctttcttatagaacccaggatcactagcccagggatggcagcatccacaatgattctccccaattaaccactaattaagaaaatgcctacagctagatttaccgatgcattttcctgttgagtgctctcctcaagttgatataaactaactaccacaggaggcaaaggagagggccaagttcaaagctgtgttgtatttcacagcaagaccctgtctcaggaaaagagaaaaaaaattagctaggccatttagattttatattaaatattataacagttgctgcttcatcaaaataaaaaaaaaaaaaaggaagaagtataaatactgtctcgtgagctctctagtcccttatagtatatgtctcccaaaggagtatatagaaatattccaaagagacgttccaggctaattttgggattctagtatgacttcagtgttttgttttgttttaagatatagtcttccctgcctatcttggaactcacgatgtagagtaggctggcctcgaactcaaaagaggtctacctacatctcctgagtgctggggctaaagatatgcaataccacacctgggctgattttagtattttaaataggactattatgagcctgactataaaaactttattgaaaaaacacatatacaatagagcactgcccctcctcctgctgtatgcccactgccttcctgtactgactgagctcatcccctacactgtaaatgactgttcttactaccaaccgctgtgcaatgttgggtgaagatagcacacaccactatgtacatcagcccagcatagtgcacacctgggtgttattgttattacagcaaaagattactggtggctttaaagtttttactgcagtcacagtaaaaaacgattgtaacttcttgtgtcgtaactctccttactgagcagtcatataaaccttttgaaacaatgcttagccagtctttttttttttgtctgaggaagttgggaaagagaaacagaatcagtctaagacctggttgttagcgcagaggactgtgtcccaggatagaaacaggatagttcccctcctgtgcttacgttacttttgtttgtggtgccattgtccaaattgattttttttctctgaagcacccttccttgattgtgaagtactaaatgatagaaaacttcaatgtccagttttccttttctaaggatgtctcttatctcccttgctgaaaattactgagtatacacttttaaatatatgcttacatttaaactctgagtatgtttagagtctgacagcttgaaagtgttttgtttgtacctgaggaggcagaggtacagagggtcacagtgtctgctcacttgtgcacagtgagtcagccaggactcacaccccaggttgtgttcctgaagtttcttcattcccaaggtgtgaaacagtccagtccaggtctaagaacagccgcagcctgctcacaccagctgctttcctttttgcagtgatgcattgctgtttgtaggacttatagactcagaatgcatgttcttgcttgatgatattgtgaagttaacgtgtactttaaaagaagtgtcatactttctcataatactaagcctaaaagacattttacatcacagttaatacacttattaaaagtactgaaacttggtgatggtggcacacgcctttaatcctccacataatccaccatgaggccatatcacattttgtttcagtcaggtgctgaaggacacttgagttgcttcacctctggatcacggtggctcacacttgctgtgagcgtgtgtataaacatgagaccctctacacagttctttttgatcaccatccagaagtggactgctggatcatagctgagtcttgtgtttaaattcctttttctctaacttttatttatttatttatttatttatttattcttattttatgtgcatcagtgttttgcctgcttggtggtagctggggattaaaactggggtcctgagggaagcagcctgtgctcttaactgttgagccgtctctccagctctaatatttcttttgtgtttcttttgagacagggtttctctgtgtagccctggctgtcctggaactcactctgtagaccaggctggccttgaactcacagatcctcctgcttctgcctcccgagtattgggattaaaggcatgctccatcacatggaccatattactcagtcttaaaggagaggaaaagtctggcacatgctatatcagtgatgagccccaatcctgaaccccaaagacatcctactaaatgaaataatccaacccaaaaatgaaagctgtgtgcctccacttgtattacatgtctgtagaaaaaagtctttgctggtggctgagaggaggaggaggaaataaggtgtgtgatcaggtataaagtttcagacgagtaaaaccagaacgttctggagataggtcgcacagcgtatacatgtagtcacatcaagtgcacactgaaaaatgcttaagatgataaactttgtttaaccccagcgaaacatgtttgaagtcagaggagttacacagtaaaaaaaacactagtcagttattaataaagtagtttttattatcaagggaagtattagcatatttaaactatatgttttttaaagtattgtgtgggttttttaaccagaaaatgtatatatcactacagaagaaaggaaaaaatatagtccattgtttttatcctgggctagtgtacattttacttacatatttatttgtgtgtgttgtgcagatgtgtgtcatgtttgtacgcatgtgtgtggagttcagccatgggagctgtccatgctgcttttgaggaaggagttctctttggacctaggacttccccattcggcgccactggctgtcccgagccttggggtcctcctctctctgcttcccagtgctggccttagcagcactgctgctgggcctggctttaagtggagctgggactctaactcagggccttacacttgaccgctgagctgtttgccaacattgcctttaaactcagattgcctgtgtctttgtaagtacaagaggtatgaatatgtattctttgatactttgttacaaaaagaatagaactaaaatggaaacattgtgtttgaggtagtaaaattgaggtccagacccagatcaaatgtaggactcaatttttaaaaaatttatttttggaatattctgtctgcaagataaagatcctgaagatgaaggctctttgcaacattgatgcttgtggcccactggttctccttctggggactagacctacaggagtcctgccatagtgtttaaccagctccagactagcttttgctctagttttgtttgcagatagcctgagtgatacaactagttcccatgagctgagcgatatttcacacactgtgcccatgagtgcccttggcattggccctctccagccacagaccgccaggagcacactacagttgaacaatctaggttcagccccttccagaaaggatgcatacagtgggcagtacagggttggagaatgcatgtcagaaaggatgttggggtgcatgtcagaaaggatggtgggtacgtgtcaggatgttggggtgcatgtcagaaaggatggtaggtacgtgtcaggatgttggggtgcgtgtcagaaaggatggtgggtacgtgtcaggatgttggggtgcatgtcagaaaggatagtgggtacatgtcaggatggtggggtgtgtggcagaaagaatgttggtagtgttgtgggctctcgtgtggtctgggagagttctgaagaagcagaagtttgctctggagtagaaaggatattgagtaatcctgtgctggagaatgaagacttgtgcctagagcagagtgagacgatattaatctatggtgaggtgcaacagttgcccagagcagccaggagagggggctctttgatattttgtagggtgtacagtgaccttatcttttatccaagcttagatgaaaatttgaagtgttcttgttttgtctgagtttctgatggttatgcagtgaccttgtctgctgttggtgttttataagcttgactgtgtgcagtcagagactgatgtggccttgctccgagcccaggctcgccccagacaacggagcctgcagcgagtgtcagcacctggccatggccaaggactatgctttatttctcttaggaagagtctttaacctaactacccatgtatactttttccaagtattttgtttcagtagacttagaaaacatcaagattaatggtaaaaaggaggaggagctgtctgagagacttgtaggatactcatacagacttgttacgagcagtgctgaaagcattcttgaaatgccattgacttagaggtggataaacagttaaagtaagtcgccttcagagcccgtcaccaggagagcctgcatattgatcacctgcattgttcggatcacgttaaaggagtttttctgtaaccaggattggccatactcactgacagagccttggccactaacatactatgaattaataagctggccatattttaaattttaaaatgaagtatatgttgttttgcatgattcctcgcttttagtttaaattaatgtatcagccagacctggtcctatcagttacaggctttcactatacaaagaacgttagacacacgattgttttctggactttgatggtagcacaggaaagcagcgacctggactagagctggaatactgtggttaataaagggcacgtgttcagacaaagtcaagaaaggggcttttataatgtaaactatgttgagaagctacggagccaaataatgaatcatctcagttctaagaataggcgtgtaaaggtttaaaatataacaaacaaaaattatgtgtataatttaaaggaaattaaccaggaaattgacaatttccttggttgcaaggattcagaagttttcaaatggtgttctctatgtttcaatgttttcttggtgttgcttttcagaaatttgatcggggaactggtaaggtggtccccacctataattccagcactagagggggagacaggggagagcaaaggagaaggaggtccagggttagccttggtgacagaggagttggaggtcagccttggagcacataagattgtctcaataatgacagcagtaacaatgccaggcccttctgtagcagcacttgtgcactgcaggctcctggaagggacaagagaagggtgtacttttatattacagtatcatttcctaccagttcttgtgactttcacatgcacacatacaataagtaaagtagtccattttaaaagaagagtcagatagatggggctggtaaggtggctgggtgacctcagccatgacccctggagccatgtgaagatggaaggagaaaccaactctaccaagttgtcttctggtgacctccacatgtgcaccagggcacaggcacacgtcatacacaggtcatacattaatcacacaggagtgagacagaggagcgctggctcatttttttttaaaagatttatttattattataaataagtctgtccccagatgtactagaagagggcatcagatctcattacgggtggttgtgagccaccatgtggttgctgggatttgaactcatgacctttagaagaacagtcagtgctcttacccactgagccatctcacagccccggctcatttcttaagatgaggtagaagattacgagttgagactagctggactgtgtaataagaccttatctcaaaaggccaaaagagagggagttatatgtggtggtgaatgtgagggcagcagcttttctttattttactaaataatttattctttactaaataccagactctttgtgtgtatatactgtgccatgcatttggggtgggggctgttattatgttgtctgggtcaggaaacagattaaacttgcacaggtttgcaaagcaaacctaaggttggaatctggtactttgaacccctacagtgcataatcctccctttagtaatcaagaaagaaagtgaagctattaaataaaaaggagttcagaattgaatgataatacgctgccatatattgaggtgttggtttgtattgttttgtttaggtttttcaagacagggtctcactatgtagtcctggctgtcttggcactctgtatggaccaggctggccttgatctacccacctctgcctcccaagtgctgggatcagtcccctagaactgaagttacagacagctgtgaactgccaggtggttgctgggaactgaacctgggtccttgggaagagtggccagtgctctccaccgctgagccatgtctccagcccctaaatgagacatagttcatgctgcacatgataagagtattactcaagcatggtgcacacacctgtctgtcatccaggagtcctagacccagacaccatctgccagaattcagagttctaggccaccttgtgctgcattatgaggctgtcttaaactttcagaacaaagacttgtaaatattgacactgaacaggttgcctgctacaggtccataagagagcagtaaagctgagtttctcaagttggcaagaaaggaaacttcccaaatgttacagttcttatgatttggcagatctggggtttgtttgaagattttctttgacagatttggtttttgtttttgttttcttgttttctcttaggccaggttatcaaagcctgggacattggggtgtctactatgaagaaaggcgagatctgccatttattatgtaaaccagaatatgcttatggctcggctggccacctccaaaaaattccatcaaatgcaactctcttttttgaggcaagtatgtgtagtgctgtgcatgtgcggccatgacacggagctgcgctggccgctggcagcctgctccagcttatttattttggagcttggcttcttgaattgtttcccacacatccagggggtgtgccagtgctttcttagaaatgtgtctggcacaaagtgggcatatccaaacaaacaaaagtcacagatgtggaagtaaaagttctggtcagtagaggaagtaagtcatatgcatcctgacaggctggaaatggtggtggggagtgtaaagttgtgaaggtttccgactgtctcctcatatccatcaggagctgtgagtcgtggtccattgtttactgcgctgaattaattacacataattggccaaactggatctttatctaacacggtgaaagcacttctcaagtcagttgaaggccagtttcttaaatcttaaggtggcaaggtcacaagtctggggtgggaagcggttgtcctcagagtcagccaagactgttttgcgccagcaccttgtcctcctggccttttgcccacaaggcagttgtcctactatttcctgtctgtctttgcacggcagtcccacaggatgcagtcctagacggtgtcattacacggagttccttccaagaactgcagagtacatcgctctcatgtcccacgttactcttatctaagctgtatagataaagatgtagcttaaagttttataaaaataactgttaaactggctttcatctttgcattctagattgagctccttgatttcaaaggtgaggatttatttgaagattcaggcgttatccgtagaatcaaacggaaaggcgagggatactcaaacccaaacgaaggagcaacggtaaaaggtgagtagtgagtactgccgggagccagccttccctgaggaaggagacatgcttctaagagaaaaagtcattaaactgtctataagaagaagaaaatctatctaaaacaactagaatgattttcttgattttagcatgtatataatatttagaccaatattttattacacaagtctagtttgggtttagttattttcttcttgcagtgttataggtaacatgtcattcaggattggttctaaacaaagaagctctcaaccaggaacaggaaattgggatctaaggctggctctgcacctctgggcctctcctgcgccctcacttcttccaagactgaggctgtgctgggcttcttggtctcaaaggctctgcgagccccaaaaacccacattgggagtcgtgcttatgaaagtcgaaaaggctagagacagctgtgacacagccacttaaaagcttactcataacatgttttcatcgtttattatgaaaaattcaaatctatacaccagggtttttcctgtgctgtgggaactcctccagagtcagtgattcataacaacttgttttgttttgatttagtttttgagacagggcatttgttgagaccaggaagttaatagggccatcccctgtcccactctcgttaccatactaacttcttttctagtctggatacaaattcaaaacctggagctgcatttagccctcatggctttattctattccaatgaattagtcttccatctttgtttcctgtgactttgacacttttttgtttttgtttgtttgtttgtttgtttttcgagacagggtttctctgtgtagccctggctgtcctgtagaccaggctggcctcaaactcagaaatctgctgcctctgcctcccgagtgctgggattaaaggcgtgtgccaccatcgcccagcaactttgacatttttgaagacaactttccatttgctagagaatcccatagttgttgtcttatgcccacagggactagattgagctattagaaaatgccctgtgcgtggcgctatgccctctttagctcatcattatcatcatcaccaccatcatcaccatccctgtcaagaggcatgtggtgacttggcactggtgactgagggctagggtagagcctcccatgcttctcttttgtcaagttattctttgttgtgagtgctgagtgcttcagaaacggaatgctgggaagcccccagcctctccacagcgtccacaatgcactgcgtccacaatgcactagtgaggtctctggacagcagttatcactgtgctgtgtgattggtggtaactttctcattttacattcattagttggaattctactgcaaggaagatctgtctctcttccctgtgttgattcagccttttactttgtcaccaagcacctaggggtattgtccccctcccataggatgctttcccttgctgctcagattgccccagtgttgactggtgggaacaccttccttcctggggttcaccacattgctgcctgtgctttgttgttgttgttgagaacatccttaactgtttttgctttgtcttcctcactttatggtgctgtgagatgttctgagatcatgcagtttccaacgagctctgttcccttccactggaaaatagcatctagaaacagtgccgcatgctcatgtgtgtgtgtgtggcgggacttcatgttcctagagcatcttagcagacagctcggtaggacacttccaaagtatagacaagcctctgcatctgcatggatctctgtgtcagacacatttgtatttaaagatttatttattattatatgtgagtacactgtagctgtcttcagacacttttttcttctctctttggcccgaagattgattgattgattgattgattgattgattgattatgtaagtacactgtagctgtcagacacactagaagagggcgtcagatctcattacaggtggttgtaagccaccatgtggttgctgggatttgaactcagaaccttcagaagagcattcagtgctcttaaccgctgagccatctctccagccccacatttgtatttaaaacatgagtactaggcatagcaggtaagagcactgcttgctttctcagagaacataggttcagttctcagtgtgtacatggcagcccacaattgtctataattccactcccagggaatctcaagccttgttctagcccctgagggcaacaggcacacatgtggtccacaaacatacacgcaagcaaatgacccatgcacgtaacaacttcttaaaagctgtgagtacacacggtgccgtacagcaccacacgtttgttctcctcccctcatccagaacttctctttcccatacagccacagtgtgtttacgtctgcagtcctagactgcatcaggccacacattctggtaaacacctaagagtgtctgggtacagtggatggtaagacatggggtacatagggactttggaggtcttagtctcaactattgaatcttgcaattactgcctaatttacatcttcagacaactttaacacccttgagcatcaagttttcttgtgtgtaaatggggctgatttttcctgtttgagttgtgatagttgtggcacaggcaggggaacctcttatacaatgggctttcccttctaaccctctctgctgtgtttacataacttgttttgcttcctttacctggatctatggaaggagttcttgactcttcatttcctacacctaatccttggttaatttgtctctagtgacagtcttcattttgattttatatcatcttaatagtggtaggctttgttctgagtgagtgggctacatggaaggcctgctacatcatggtcttctgtgctgcttttatatttgtgaaaatcatttttttctcaaaacagtgtgctatttactcttatcagaattctcactcttacaaatcagccatgggttctcccgtgctttttcttgccagataaaatgactgtcttgtcgtttgtatttcagtgttgtcctttttccatcagatagagaaccagtgtgtgctgagggttagggggattgactatgatgactgacaccttagtcgtcacacttgagcttaggtgctagccctggctgcattgcagtgcgaaagttttgctgtcatgggcagtcgtattacactgaagtagggctctgagtagcccccatccgtctggtacaaacttgcattttgggtttcagcttgttagtgttggtgatgggaactgactgtgggagcgcaggcttgtgggctcctttaccccaggctttctgctccatttgactgtagctgcagtgtgtggtgcagctccaactgtaatctccaggttcctattctgggaatttttcttccctctcacctcctaacccgatacagtggtataggtggagaagggagagatttactctgtaaaaagagaaggtcgtggtggtccacaccttagaacctagcactctggaggcagtggtaggaggacctctgtgagttcaaggccagcctggtctactatcgagttccagggtagctcgagctacatagtgagaccctgtctcaaaaaataaaaagaagagagagacagagagagatggattagaattgtgaacttatgaaatatataaagtagaccggctcggactgacggaaactggattctataaatccaacccaaagcaggtgttgagaagacctctgtagaggtacataccgttcttcccaaccagctctggcagaactccaagctcacagtcagctggtgcaagggagccacagcaggctctggggcaatcatcagacctgctataaagcaatatggggcagccagccgcaccaggaagcctctgctgcaagaaatctcagtcttggctagtggggacgatctcagtgcccaagcctccaacccattaaatatatctcaggggagaaactggcagaggcaaatagtttttaaactccccagtgactctagtgtgcagccaaggtctgaaaatggactgcctgagggtctatctcactgtgatctctgctcaaaagctaaagcctagttctagagtgcagcagggagcctcagaggctgcaggggtcagaggtagactgcagagcagaggagtgtgcagtgtcttggaaattcttaattatgtactgggcgtggcagaaccccacaatagtaatgttgtgaagggttctttctctaaaaggaatcttttccatacatcaacagtaaggcagggcatccccaaccttttatatatagctgcctaataatacataaggaatctgcacctatatccttcacaatcaccctgttgggaatggactgtcatgtggcctgcttagatatcagtgacaggtagctgcagtcatttgaacatctttaggtgtatgtgtgcagatggtgagcattggtcagcaagtatgagacggtgtaagggagatgaacagaaaactcagaagtcgtttaagagacaattcagaactaacaaaaccaaaaacccatccacacttctgaaaatggggaggataaggaagtctggaaattgatgttcagtaacattgacctccagagttagaggagaggcgtgcgcgggcaggtcctctagtccagactggtgatctgagcagtgggcaagggagcaaggcaagaagtgggggtggggaagagtaaggaaggaggaaaataagggttcatctcatcagtcacagacagaaagtgtgttaagacttagaaagggcaggtgacagtgacaagcaggaagaagtagcttttcattcagttatactcttgatgaaattgctaaattcttacaagatatagtagaatttgctagaaaaatatccgggccagcaaaagaacacttgagggctggagcccaatgcctgacaccatgttgggtgacacacaatacaactccagttgcaggacatctgatgccctcttaggcccctaaggcatctgtacatgtgtgcatatacacatacactgactgcacacaccatctttgtttaaagctgacttagggtggtgtggtagaacaggggagagaggcccttagagttcattggccatccagtctagtcaaatcaataaattttaggtcctgtgacagaccctgtttttaaaatactaaggtagagcctagcatagtggcatccgtctttaatgccagcacttgggaggcagaggcaggtggagctctgtgagtttgaggccagcctgagctacacagagaaaccctgtctcaaacaaaaggtggagaaccactgaggaaaatacccagcatcaaccactggccttcacatgacatgcatgcatggatgaatgacagctgccaaaggcaccaggactcagaatgtcgacatggtcaggctatttattccttgtacttgaagtaagaaaaacatatctaaaattaaaagtagagtagaggcttcatgtatgttcatgctaatgtctgagtgagctgtgtgttgttcacatgcctttcaaacattgagtgatggctagcaaatgaccacaggaagaaagcacagggttttctttgctttttatcttaggttttgttttgttttaagacaaggttcctctgtatagccctggccatcctggaactcactctgtaaaccagctgtcctcaaactcacagagatgcctccgcctctgcctccacctccacctcctgaacactgggattaaaggtgtgtgacaccactgcccagcaaaatcacaggtttttaaaactatttcattgtgtctcagaaaatagcagtatattcttttcaggtgttttagaggtagatagctcctttttctagaaagtatctccaggtcttcaagtggagtgaatcataatagaaaaaaaaaaaaaaagaaagcaaaacaaaacaaacaaaaatccaagccactaatgaagtgttcattttaggatttcgtacaggataaaagctctggggcagtgctgcattgacagcctcctggagcttgttaaaatcagagtactggacagacaaaacaaaagccagtgtggtggtagtgcacacatttcggcccagcgctcggaagcagaggctgctggatcacaaatttgaggctaacctggtttacagagggcgttccaggacagcaaggactatacagagaaaccctgtctcaaaaaaccaaaaataagtaaataaataaggatgttgactgatagattcagaaaggaaaaatcctataaattggtgtaaattgccactgttttctctgctttcagattagtcattaagtaaatacttatataggggtcctgagctgtgtgctaagtgttgtggcatacaaaggcagtgtggagctctgggctggcctgctgggactcttccttgtacttgacaactgtgtgggacaaaagtgcattcttacagggatcctaaagtgttcattggagggcacctccctactaatgtgaggaataaccctgtatgttgttccctgagttcatctccacacccacacgtaatgcactgcttgcctatgaacagatgaatgaatgaaatgccagctctgttcaaatgctttaatgtagcgcctgtcttcttttttctcttttacaattaaaaaaaaaaatcagttgtatgcttatgcatgctttacctgcgtgtatgtctgtgtaccatatgtatgactggtgcctgaggagggcagaagagggcatcctatcctctggaactggagtgataggtagttgtgagccacttgtggctgctaggaactgaacccaggccctctctacaagagcaacaagtgctaacagccaagccatctgtccagcccctttgttttcttcagagacaaggtctcctgtcactaaggctggccttgaaatactggtcctcttgcctctctctgcctcttgagttgagtgataatcccccaaagtgcccgtgccactatgcccactctaaactcttagttatttactttgtgtgggtctgggactcatacctcgtgcttcaagagtgcggagtaagcactctactctgagtcctatcaccaagctcctcagtacttaaaactccctgttgttgttgctgctatgtgtgtttgcttgagaacaggtctcaccaggtagctctcaacctcccagctctttatgaagccctagctgctctcaaacaggctgggatcctcttgcctctgcttgccagacgccactacacttagctttggaatgcttcgcttctgctagcagtttcaggctagccaggatcatctcaccaacggaggagagaccacagacagagttgttaggcggcagaatgacactggctaatgttgaggtgtgctcaagtcctctgctgttgtaaaaggaagagcagttaagatcataaaagccattccagtagtcaggacccgcgcctgccctgggctagggtctggctcgcagtgcacccttcccctgagttagagcaggaagggaggctgtgtggggggagtctgagcaccatgcctgacaggaatgatgtccttgtggtcagtggttaatgtacctcgctgctttacaagagtcccggcttgccttcttggggcataataacatccactctcctgggaacccttgcccagtgtcattgactggtcccaccctgggttctgctagccagatgaccagtctttcctagtagtgatgccattacaacactgccgttcagagcccatcacccagtctttggggacgagtgcagagctatcagacaccagctactataattagaaaagggaaagcaggcgctcaccgagctcacatcttaggctggggcatttacagcactttttttaaaaagttgcagcctcttcctcagttttgcttcctgaaatacaagctgtacagttttggggttctcacatttcagtttttgttactgctgtatgctccccacccccattttaatcggagaacaaattgctgtcagcacatcgagttcatgtgccagccacattcagaacagggtgttctgtgctcttcaaaacaaaattgctctagggcagtaagagaacaataagtcagagctcagtttaagtgatgtctgcagtgaccagactcacttgatgtgcttacactctggattgcacagctgaacttggctagtttggtttgctttgactttgtggggtttgttggagtaccccccttacaggttacatagacttttaagtcaagagaaaatattgccagttttaaacttgtttgtttctctttaccaaaaaaaaaaaaaaaaaaaatccctaagaaaagcctcctgtgtgcacttgtgttcacttggagaccattgtagatcatttgcttcctgtaaatcatgctggatgagattagcagcagacctcctgagccctagaggctgagctcccgagtgagtcatggtggcttgtattaaatatttatgaaatgagtatttgtgctatggaatacaaagtcaaaagcacccacaggtcttccagagtcagagcaggggaagtgggattactaggaaccgggcgcctctgcatggatccgctcagagcaagtccttactgtgcagaggcctgccagggccctggtgctgcgagctctcgtcagcaaccttgcaggacttgtcacaccagtgttcagaagccaaacaatccagcctgtggtgacctttctccatgtacatggagacaatcatgggctgtgtttaccagctctgacccttcatttttcctgacttaacattccatcatgtcctgaagtgattggtgcatgcatgtatgtgtgaggaatcgggaatgtcacctaagatctctaatttgtattattatgtatgtaagtgtgcacgtagagtgagaagaaatgattcccctcttctaccactgacgcccaggtaataagattgggacatcaggtgcaggcaaccttgggctagctgctgattttccagacacaattggacaacttaaaaaatccacgtaactccatgttctagggctctgatgccctcttctgacctctgtgggcacctgtacatgcatagcatatagtcaaacacacacgtatgtaaattaataaaacctttttttttcctttttagatttttatgtgtatatctttttttgtctgaatgtatccatgcagtgcccatggaagccagaagagggcattagaccccaggagctggaggcacagacagttattacagttactggcttccatacagatgctaggaatggaaccccagctctgtggcacaagcagcaggttctcttccccactgtctccagccccagcaattgccttcctgctctgcctttgtcacatcctgactttctggttactttttgctttcttctgacattcattcatctttcctgcacacagcgatgcttagcacacggaaagagaatgtctgaaattttttacagactctgggaatctcacttaggtctttggttttgttttgtttttttaagatttatttattatatgcagctgttttcagacacaccagaagagggtatgggatcccattacagatggttgtgaaccaccctgtggttgctgggaattgaactcaggacctctggaagagcagtcagtcagtctgctgagccctctctccagccccctgttgtggatagccctggggctaattatatttgttaattctgttctcctgtgagtagtttagaacaaggaatgagtcagcactcaggtgatttcctgtaaacctgcttcccaccttaatttgtaaaataaaggagagctgatgattgggcagataaagggaaggtggagaggaaggtgagaagagaagaaggagaaaatgggagagagagaggatgcagaggaggagaaagaagaaaagcggagtagaagcacatggtctggagaaaccgcaagttctttttttttttccactttttattaggtatttagctcatttacgtttccaatgctataccaaaagtcccccatacgcacccacccgaaaccgcaagttctaagggatctcttagatggagaagatggcagtgtagcggtagatctgcccaaactaggcacacatcatgtattcatattaattgagttgtgttttcattgccggagcatatttgggttagagaaatttaccgcaacagcccccctccccacacacttaagatttttaattacacttttatatattatgtagataagcttgtacatagaggtaagacattccactctgcaaatcaggaaactgattggggatcctttgcagaagtctggatttcctgttttgaaaacacattcagatttgatcaaccaaaagccacaacaaatgtagttataatttcctccgtgctgaaggcactccattgtagggaggaaggtgatggtgtgacagtagacctcagttctcttccctcgaaagtctgttcagttggcagtgcccagactgataaatctcagtaccaaagagctgcttccgtggctcggcaggagttcctgcactcacggacagcaccatccattagtctaaattcagttatctggacaaatttaaaaacagtagttacatgaacttatagttttgtttgattggttcttccatgtatatttatttattgtggttgttgggacggagctcaggctctgtacctgttaggcaggtccctagcaccaagctacacttctttccctgcctctccctttacctctcatccttaggtaggctatggctgtctgaagacctgggcctacaggcccaagtcaggctcagcttagacacctaacctaagaaccaggagacaccacctcttctccacagagaaccccataagcctcagggtgtgcccaagcctctgatgctcacactttacaatatggttaattctttgtttaaactagaagatgctgttgactgcatctgctgccacccagctgggtgcctctgtgctgtatgcagcctgccttggttttgttttttgtttttcctgttgtatgtgcactaaaagtgggggggggggggctgtaagttagctgttttatctagaacattccaaaagttaatataatatatagaagtcatcatataaatgagtatggctataaaacaagagacagtaggcgacatctgagagctaggctgctgtagcctttgtcttgtaggaactgacttaggatttgacttgacagcagtaagagcagccaagatggtgtctttcctagctttagtgcgactctgaggtcctgatgtatagcttacggctgtttatcttccaaattttctctcatttctcaggcctagactaatggtgatccgctcagatgattaattaattaatgtggaattagctttgaagctagtttccaggacgaaacagtcatagactttgagggcttttaacagactgttgagatcagatagtaaaagtagagtaagttgtaattggattgcttggaagatgatagtatggaactaatgtttaagagagggtggtttctcaagactaaggcaaattactggcccaaaataagttaagcggccttgtcaagaaatattttaggaaattactatatttgaggtagaaactactcttcttgtcaaagagagatcatggtgcctatcgaactatctcacaagccgtccatttttcttactgagtaaaaggcctaattgaaaaggcacatagcatgagtattacaagtagttgagctggggggtcacttagtgcttgagtgatggccttattgcacaagtccctggagtctccatgaccacacaagagaactggatacatgcctatagtactaatgcgcttggaatacaggggcaagagcaagaagagtttcaggccagcctgagcacgtgaccttcatctaacatgtatgcagtattggagagctagcatggagaccttcatctaacgtgtacagtattggagagctagcatggagtcctaggctttatttcttgcttatatactttttcccaagcatctcaaaccaaaatactgtcacagatggttaagccattgtatgtattcaatactagatatatggcattctcctaatggtgtgtttaaatgagctagtgtatcttgactctgtgtcacagataagaaaataagtatacatttaacttaaaatggaaaaacttttgttcttaaactttcagactaggtgggcaaagcttccagaagacactgtgtgtcttatgaactgcaggggaagtagtgttactgcactgtgggccagtcacttggcaggcagtgctgaggggtggcttgtgactgtcctgtgtcctcaccctcagtccacctggaaggctgctgtggtggaaggacatttgattgccgagatgtggtgttcgttgttggggaaggagaagaccacgaacattccgattgggatcgacaaagccctggtgaagatgcagagagaagaacagtgtattctatatcttggaccacggtaagacgtgagcgcccgtttcagtgcagtgcagcccggccgcctgaagaccaaggactgcttgctcactctcattctcactctctcagtgccttgttggcgcagggaagccattgcattgagttgtgtgatggttagtctgaaacttggggcctcacaccaccatagaagtttgcgagtgagttggctcagctggagtatatctaagaataggactatcagtgtagccttgattttgatttgtttagctgccaggatgccacatcagcaaagattgacttgatcctgtggctctcctgctctgcttttctctgaattcagcgagggctttgggaactgcagtagtgcatgatttactacacttgaatccatgccacgttcttctatggagtccctgaaggaagaaagagccagcttgttcttcctggacctaaaggcagcggagatgactcatttttgcctaactttttcccgtcataaggatagccattagcactgccaagcttagaaccatccggcatgacagtctcctgtgaaaacatgcttcctattatttttagatctaaaattataccataaattcatctcttctatcttgagaaatgggcccctgaggatgcaggagtgctgcctgtgtgcaatggcatctgcttgttgccactgctaagactgagactctgtgggctgccctcaccaaagggaacacagtgcttttgtcctgtctcttgccttggaggggttttgctataattcactctccaataaagctatttcatttttattgaaagagctttccccccttacagagtaggttcttcataacctacagtcactaatctgttttttgtttgtttatgagatgtattcttttatgttgtagccctgactgccctaaaactcagtatgtagaccaagctggccttgaactcacagagatccacctccttctggctcccaagtgctgggattaaagttctctgattatgtttaatctaccattccaaaattatagtagctctacactcaggtatctcacgtatggtcttacagttcagttctttaaagatggctctgtaaagtctgagcattcagaaacacatagcccagatctaagttttaaccttgcggtagatgctttggagagcagacttaccaaacttaacagcagagtgaatcaaactgcctctgtttattagtgcagctagttctctgcaggtgtacagttcctggctgaacgactctctgcagcctaccagtggtggcacctgggcaagtcacctaactccccaagccttgcaaggttgcagaggcccacatggagtaatgaggcagatcacttagcacaccgccccaccctgcccattagctgttactgtctcagcgatggctttcattcattttccccttagaccacgagaaaatagaaatctctgcaacaaatggtatttttcaaatcttttcaggcataaaaagaacgtcaagttctcctacgttgtatataaaggggttcctcccctcattgggggtggggggtgtgagtgcatatgttagtacatctccagggcgtttgctggtacatggagttctgccaatacattctatgtaatgctctccatactgtctccatgtgtgtgtgtcacactgcccatgtaggtagagcatccctaagcagattggcttgtcctagtcagagtccaccgagtctgggttgcttataaaatgcagatggaattcgtactcagtgtcttctgcatttcccttctaccctaccccaacctcacccccaccttgacatctgtaggctccttggcaggacgttttcataagaaactaataaagcattcaagtttctctctctctggaacactatcttttcttggtagtgttctttagaatattgtggcaagggtgtaccctatttgagacattgcaccctcagattttttttctcaatttttaaaaatttgctgttctcctcaaatagataattaaatattgtgactgatttctatgtaggctaagtatagatgactactttttccttcctttttctttatacctgttttgtaacagtcccagacaaaccataggctgttgagagtggtcagtgtgtgtcagccttagttatcttaggacaggaaggtctgaatgtggttctgcctctatatcacctctcagaaagcacatgtctctggcctccgctctctcacctgtaagaagtagctggcgagggcattcacaatgctgtgttctgcagggttggctgtccctccacgcccttagtgtatcttccctccaaggcagctgccgtccagaggccttgactctggacttccatttctgatggttgtgagccaccatgtagttgctggaaattgaactcaggacctctgaaagaggtcagtgctcttaacaactggcccatctctccagcctgtaagtttcttttagacaggttttcatgtcctcagtactatggatgtttgtggtggatcccagttgtggcagaagagggttgtccttgtcccataaggtgtgcagtaatatgtctgacacctacctgccatccaatagcaactctaggcattgcttaatgttcctctgacaaagaagggttaaacatcaatccaggtaagtgacatggttccaaagtgatgccaggtcatctgtcatattctttcctccctggtaaagactgccaatcatagcatgctctcagcaacagacttgagaagtacccatctgtatgccttctttgcagcgaagagagggacagaccttaccacaggcaacacacacacattcatactccagggaaaaaaccctggctacgtttccaacattgccactggccattgctcccttttcgagtgatgccctctgcacggtgttaaggctgccacccagttcttccccagctctgtgtgcctctgctccagctgtgccttttcttttcttttttttttttttttttttttttttcgagaccgggtttctctgtatagccctggctgtcctggaactcacaactcactttgtagaccaggctggccttgaactcacagagatccatccatctgcctctgtcccccaagtgctgggatcgaagatgtgtgccaccaccttgtatttgtgccttttaaagtctttaatgccacgagactttaggatcatgagagctgttgtctctgctaatgtgttgccccctgcagtttttctgattggaggtagtactcttggaagttgacccttccttaaagtgaaaagcttgttttgagtacacatggacatgtgggaaagagttcctgtgggggagggagtggtgagggagctggggtaaaatgagaaattctatatacaagtacgaaactgtaacagaacagtaaaaacaattgtaataaaatagcaaaaatgttaaaagtattcaaacagaattatagtgatttttactactataataattatagtaatagactcttctgtcctttctgctcataaagcttaaaggaaaaaagtccttgtaaccaaacagaaaagaataaagtctaaaaccaggcatcgatattgaacagcatgctaagcacactgtcctagggagtacaggaactgtgcgcctgcgctaagagagcatgcgctaagagaacacgatgcagcaggtctcaggaaaccacagcagggattccacacagaaaaccaaagaagtataccagtcctcctgagtcttgttttttcctctccgtttcagctatggttttggagaagccgggaagcctaagtttggcattgaccccaatgctgagcttatgtacgaggtcacccttaagagcttcgagaaggtgagcaaacccaacttcgctaaagctgtggtgtggggtcttctcatcctgtgcctgtaactgtgcggtagatgacttggctaaatagtgtttgtttctgtgtttgcttttcttcatccatgactcttgtcccccacacttctgctccgagcgtgggaagctgacacaacacagttgatacaggagaggagctggtgttcttattttttactgtgtgttagcctctttttttcttttaacttttgggtagaatccaagacttgttcctgtatttgttcctaggcttgttctttttgtacttttttttcctgagttgaggacaaaaaagttcacgtactgccaagcagctccttaggggagttggggtgcagcctttcagtgctgaaggaattgcacactccacaggagttacaaagaggcctccgctggggctccaggttacaatcccagtgtctcagcctcgggaccagcagctgcaaccaaggagaagaaacaaacgtacccaggctgtttctcatacgtgtccaagaacaggagagggaacttgccgtggccttcaggctggtgtacctcctcggacagcctccaactctgggctgtctttgcaggctcccacctgtactgcacggtgtccccataagctgagtaagctgtcatcctcagctgtggctcccctcagagaccgcctttcttattacgattttattcctctgaaatgaccccatgctctgtccacgctggactatcggggcctcgagtttccctgccctttccatagtggaacctctacccttctccgtgctttgtgacaacatggcatgcctgccatctaatcctgtcactcgggaggatcagaagtcagtctcagctacgtagtaaatggaggcttgcctgagatacatgcagtgctgtctggaaaaaagaaaagaaaaagttccccaggtccacacctgcaaactgatcctgttagaggccatactgcatctggttctgtgaattcggagacagctgcctgaactgggattttagaagtgctccatgcacgtgcagcttggcctggaccataagtagcaatctcacttccaagctggaaagcaagcctgacagaaacagcctgctaacgtgacagcagcccatagtgagggagctttggggctccaggttacgatcccagtgtctctaaggagggaggcttgctttgtcaccctcaaaatgcagtctgtgagagtgctccgtgcttgtgttccttggacaacacaggtcagaccacagcttgctatggcatgtgctcttagtggaacaccggtgcattggcctgctggtatcccagcagcggcccacagttgctggggtctcatagagatcgctgctgtcccccaggcatgaactgctgcgtttcctcctctcctcagctaactgacgccacaaatctctacacaggccaaagaatcttgggagatggacaccaaagaaaagctgacgcaggctgccatcgtgaaagagaagggaactgtgtacttcaaggtgtgtgagtctctaagtcctttccatgtggggatacctacccagtatccatcagcaccctgtgctgagacgcaccctcagttctcacaggcctgctgtgctctgtaggaggattagtgagcagagtgagttcgtgtgcaggaggtaatgcagaggcctcttctgtgtgctgtgagcaggtggagcttcctcaggagcaggcgaggtggaccagacctggctcgctcgagtgtgtgtgtcccaggtcagagttcacaggggcggctccagcccgctcccccctgacaggtgagacaggaaaggccttgcagatcccccagttcactttggatgatctctctcaggttgccgtgctgtggctgcttttatgtaactacaatgaaggcaagtctcctcctgattgttttaattataattttcaattgaaattttttttaggctggagagatggctcagcagttaagagcattggctgcttttccaaaggttctgagttaaattcccagcacctacatggtggctcacagccatctgtacagggatccgatgctctcttctgacatgcacgtgcgcatgtgcagagtactcataaataaaataagtaaataaaaaataaaaacaaatcttaaaaatgttttaaaacattttcgctctttaaattaaaacagcagctttcacagcaaatatcctcaaaataaatgtttaatatttaaggttttatcaagaaatatatcattacttatcagtaccactattaactgagcaacaagataaagatgccattaatgatactggctgaggggctggcgagatggttcatcgggtaagagcactgactgctcttccagaggtcctgagttcaaatcccagcaactacatggtggttcacaaccacccataatgagatctgatgccctcttctggtgcgtctgaagtcagctacagtgtacttacatataataataaataaatctaaaaaaaaaaaaaaatgatactggctgggtaccaaaaaggccctgcagaccggcatggatgaccaggctcggccctcccaagaacctgatgaggagaaaacactgagccttgtggccacagtgataagatgtcacttacagctgccccagggaattactgcctctccagagccctgtctcctcaggacccaggaaccagtgctttatcccccagggctgacacccacactcattaagtgaaatttcggagtgctgtgcccattgcttgccagcccacttccaaattcctgctgtctccacatcaagtgaagggcttctcgatgagtgttcagagcgggcagtcttctgctgggccaagtgatgctgtgcaagtggctgactcctgtctctgccttgtagtgtggagacccaagccagaagccagctttgttggcacacctttaagcacagggctctggaggcaagtgtatgtatgtgagtttgaggctagcctggcctacagagcaaattccaaacaactagggcaacacagtgaagccctgcctcaaaaaaaaaaaaaaaaggacttggagggaacccaagttttctttgctttttctttcttttaccagcagtctttaaacacaattattggggtttttgtttgttgtttgggtttttttttttttttaagattttatttatatgtaagtacactgtagctatcttcagacactccagaagagggagtcagatctcattacggatggttgtgagccaccatgtggttgctgggatttgaacttcagaccttttgaactctggaccttcggaagagcagtcgggtgctctaatccactgagccatctcaccagccccctgggttttgttttgttttgttttgttttgttttttatagcactataaagcagagacctgaggctactcttcatgagcctctgtactgagaaatgctgtcacatctactactgacttacattagggggttggaacaagaacaccatgtgggacaactgcagaactatggggccatagtcacctcaaaagaaacactggcagagacagtgtgtatttgtaacaaagttataaactaacgtatgactcatgggcagccaagcagatggcgataggagccctgagcagggatctggaaatggagctgtcccttccatgtcattgaggccaatcacctgtgttgcagggagcctttcaggggtgataagtatatttcaacatgtttcaaatcttcctaaaatgaccaatctggataaaatctggatcactagtcacacatacggaacacattatttttaacatgtaatctgatagacaggatctttcaaaacatcagtctgttggggggaaaaaaattaatgaaaggttcaaaatcactgacctaagacttaccccagaatgtctctgaacattttgtctcaccaagcacttcctggaggctccttcctcattctaggtgaggagcaagggcaccgcccaccgccgccccacccccccacccccccagtcaggctgtctgcttcagaggctggaggactgccttctgtctgcttgtcccttctcccttcaaagtttaaggagcctttcttttggctgtgctgctctggccagcgtcatcttcccagagtatctgacgtgatgtgtgccatgtgcagagtgtgggtgactgtagggatgggctggactacagttctatgtcccttaatatctgcatgatctattcacctgccaggccagtttcagctgtgggcagagagggactgaatgtggtatttagactgatgttgaaacttcctttcaacctctgaacactcatgcagagacacagaaagcactgtcctcatccggttctgaaagttactgtcaggcactgtagcactgtcactgcacaaaggaaggctaaggacgctctgctgtgtgcgggcatcttgcgccccctagtgctccttgggaaggaagtgtggccgcggctggctgattgtgcttgagagctggagtgttgtaggaagagctctacatcgtcatggctccctctcccgagtgcagtcaggtctgccatcccttgtacagtcgtacaggaagggtcctctgtattcaagcttgtaattactgtgcagaaaagaactgtcacctatattccaggtttactcgtgttgttacaagctgccattccgtggtgcagctgtacctacagtagtcagcacgctgtctccaccccacagtttgttgtttagggcatgtgctatgtacaacattcagtgtttacaactctcagaactcagtagtaagcaggaccatatctagagtctggttactctgaaacagcgcctcacaggggtcacatatcagatatcaggtgtctacgttctgattcataacagtagcaaaattacagttatgaagtagcaacagaaaacgtttcatggttgggagttttatggttatgagaaagggggtcatagcgttaggaaggctgagaagcactgcctgggagctgaggcaggaagactgagtttggcactagacttgtcaatttagcaaggccttttctgtgtgaaataaaaacatcagcctagaaatagagcagggatggtgcttgcttagtatgcatgaggccttggtacggcggaggaggctgctagaccagacaagagcaggacagtctctcacacggtaagcttgctctttagggttatgtacactgtgtgctatcaatggccgtggtcagcacagggcattctggcccacccactcttaacaatcacatggtgccggggtagagccccggcactgcagctctgccgtgctgcctctgctttcactgctactgagagccgagcgtttgcacaatctgctttagacaggcctgctgtgtggggactgccagttaccatattgcagtatttactatcagtgctgaatgccaagagaaaagaggaaagtcacctcctcttccataagccaaatggctcaccatccttttgaaagactgaggaatgttggttccaaacagtgtaacctcctgctgccaggctgaaagaacactgaagcagccatgcggtggcattaccctggtccaggccacctcacaggccagcagagcttccgcagaactagggagggacaggagatagagtggggctgacatgcagaactattccgtgtgagcactcggctagggcaggccacgctcacacttcactgcatcctttccagatggatacaagttgttgggggcttttttctcctagggaggcaagtacacgcaggccgtgattcagtacaggaagatagtgtcctggctggagatggaatacggcctgtcagagaaggagtccaaagcctcagagtcgttcctcctcgcagccttcctgaacctggccatgtgctacctgaagctccgagagtacaacaaagccgtggagtgctgcgacaaggtgggtgagccgtacttcactctccgtttatctgtgtggcacctctgcccccttcaggctgttcctctatggtcagcatgagctgggacgccataaaggatggggctttttgtgcactacttttatcctgcattttacataaagccattaacagaattgataagagtcttcatctgtggtcttccttaccctggtcctttgtgggagaggagacaaagagccttgaggttccctctttattgttttgtttgcaaggctggggattgaacccagggcactgtgcatgctaggcaaacactttaccactgagccatacagcctacccccagtgacacacttcctccaacaagccacacttcctaatttctaatccttctaatcctttgaaacaattccattccctggtgatgatgtattcaaatatataagcctgggggggggggggggagacattcttattcagagcatttaccaccatggttaatgcctatggtctcagcatttgagaggcaaaacagaagaattgagagttcaaggctggcctgggctacatgagttcttgtctcaaaaaataactattatcaagatagctcagctggtaaaggcacttgctgtcaagcctgatgacaggagtttgattcctaggaccttgtgggaaagaaagaacaactttgtcatatgtcctctggcctcttcctcattcatagtattacatgtgcatacacaaaggtaataataatatattattttagagatttattgatgtgtatgaggactctgtacctgcccaccagaagagggcatcagtcctcattacagatggttatgagccatcatgtgtttgctgggacttgaactcagaatccctggaagagcagtcagtgttcttaactgctgagccatctttctagcacaataatacattttttaaaaacaacaaaaaatagatataaagtggcaaaaaagacattttatataagagtttagttggcttgttttgccttgagagaggaatattattgttaattatactttttaaagtttgtgctgttttttttttaaatatatagctgttacaaagttcagaatttaagcacacaagaaagcccagctatcaaaaaaaaaaaaaaaaaaaaaaaaaaaaaaaaaaaaaagccaggcagttggggctcatgctttttttttttttttttttttttttttttttttttttggggtttttgaaacagggtttctttgtatagctctggctgtcctggaactcactttgtaaaccaggctgtcctcaaactcaaaaatctgcctgcctttgcctccgagggctgggattaaaggggggccccacacaaaaaaaccctgactcgaaaaaacaaaaacaaagaaaaagaaaaaaagcccagctataaaattcccatcaactttctctcccaaagccactcatttaaagatttactttatctttaaaatatttgtacatgtacagataatatttgtgttatctgtatgtggcgcgcgcacgcgtgtgtgtgtgtgtgtgtgtgtgtgtgtgtgtgtgtgtatgcgcaggtgctccctgggtccagcagagggagtctgatcgttagagcttgagtcccaggcagctgtgatagggttgctgggctgctgggaactgaactcgaggcttctgcaagagccatgctcttagcccgggaatggcttctccaatcctttagacatttactatggtaggagaggttgtctgcatgtgcgtgtgcacatggtacacacatgggcggcctgggggtagttctccttcccccatgctgaaggaccaagctcactgaagctcatcagcaggtgcccttcccactgagtgtctctctcccctcccagagcatctttctctatagagtcctagtttttccaaatgaagaataactgctttatttttttcagtcaaactctcatatcccagtttgacttaagacttgctttgtagctgaacttctggtcctcctgcctccacctcctgttggtggtttgttttatttgtttgtttgtttttgtttttggtggtggttttttgagagagggtttctctgtgtagccctggctgtcctggaactcactttgtagatacggctggcctcaaactcagaaattcacctgcctccacctcccgagtgctgggattaaaggcgtgtgccaccaccgcccggctgttttgtttttaagatagggataaaattcagtattttgtatatactaggcaagctaagataaaccccagactttgcatatgtattcttaaaatatgtagatttaggactggaaaggtggtcagaggctgtaagagtactcactgtgcaagcatatagggcccgagttnnnnnnnnnnnnnnnnnnnnnnnnnnnnnnnnnnnnnnnnnnnnnnnnnnnnnnnnnnnnnnnnnnnnnnnnnnnnnnnnnnnnnnnnnnnnnnnnnnnnnnnnnnnnnnnnnnnnnnnnnnnnnnnnnnnnnnnnnnnnnnnnnnnnnnnnnnnnnnnnnnnnnnnnnnnnnnnnnnnnnnnnnnnnnnnnnnnnnnnnnnnnnnnnnnnnnnnnnnnnnnnnnnnnnnnnnnnnnnnnnnnnnnnnnnnnnnnnnnnnnnnnnnnnnnnnnnnnnnnnnnnnnnnnnnnnnnnnnnnnnnnnnnnnnnnnnnnnnnnnnnnnnnnnnnnnnnnnnnnnnnnnnnnnnnnnnnnnnnnnnnnnnnnnnnnnnnnnnnnnnnnnnnnnnnnnnntatatatatatatatatatatatatatatatatatacactaaatagagaaagatttggacatagttattatgtgaaagcagcagtctttccacgtcagatgagtgcattctacacttgtccctcactgagcttggtgtgaaaagactcacctctttagatccattctgtgaaccatggggtttcacttaactgatcctcacaggaagattttcagggcttgtttttattataagggtcataataataaccataataataataaaggcagtggtggtgcaagcctttaatcccagcacttgggaggcagaggcaggcggatttctgagttcgagggcagcctggtctacagagtgaggtccagtcaaagctctcagcaccatcaggggctcaagcttcacccccgagctggagacattttatactaaaatactgacaagtgggtggaccgtggttgattgttgcgtgactcttgtgcatagttctgctcacctccgtgtgattgcgctgcctcagcactgaggtgacaggagcggcagttgtcccttccaacctgtgacctgcccacctgtccttctgttcttaggcccttggactggacagtgccaatgagaaaggcttgtacagaaggggcgaggcccagctgctcatgaatgactttgagtcggccaagggcgacttcgagaaggtgttggcagtcaatcctcagaacagggccgctcgcctgcagatctccatgtgccagaggaaggcgaaggagcacaacgagcgggaccgcagggtgtacgccaacatgttcaagaagttcgcagagcgggacgcaaaggtagtgtgcccacagccccaggcttgtaaggacgctagcctagggacaaggttgggcagcctggctggaagaaataagacttaggaagggactccatgtgggcagagacacaggtgggaggccctggcgtgtccctgagagctgagggctgactcctgaggtggagcagtgctcttcttgttctctgttttgttcttaaaatggtttctctttgtggacccagctagctcatctcagagatcctcctgcctctggcgatgagcgttaggattataggcatctgccaccaaaccaagttctcttgttatttttaaaaaataaataaggagttacagagacaaagtgtggagcagagactgaaagaatgaccatccagagactgccccacctggggatccatcccataaaccaccaccaaacccactatggcagattccaacaagagcttgctgacaggagcctgatatagctgtctcctgagaggctctgccagtacctgactaatacagaagtggatgctcacagccatccattagacggagcacagggcccccaatgaaggagctagagaaagtacccaaggagctgaaggggtttacagccccctgggaggaacaacaatatgaactaaccagtacccccagagctccctgggactaaaccaccaatcaaagaaaacacacggagggactcatggctctagctgcatatgtagcagaggatggcctagtcagtcatcaatgggaggagagacccttggtcctgtgaaggctctatgccccagtatcggggactgccagggccaggaataggagttaggtgggttggggagcagggggaggggagagggataagggaattttcagaggggaaactaggaaaggagataaaatttgaaatgtaaataaagaaaatatctaataatgaattagttaaaaataaataaatgcagccaggcagtggtggcgcacagctttgatcccagtgcctgagaaacagaggccaaggtaggcagttgtctgaacaggaggccacatacacagagaaaccctgtctggaaaaaatgacaacagccctaagcccttcagtgttgtttctctggggagacttcctagtaaagtccaggttggattggaaacgggtgtgcctgtggtggcctttactgtattctctgctgtcatcgggagcctcgctggcagtgggtgtgtctgaacacaggtcaacttcctgccccatggccaccctgtggtcccaggtctgtcctccatcttcagctatgagtagcataaggacttgagctactcagcagctgcctgaggtaggcagctcctcattgcttgccacccctacttacccagtgtgcaccccagatccaagcgtacacacttgctgcagacctgatggaccatctcgggaaggcagtggttgagtgagctcctcttctcctttcacctcaggaggaagccagcaaagctgggagcaagaaggctgtagaaggagccgctggcaaacaacacgagagtcaggccatggaagaaggaaaggccaaaggccatgtatgacgctgcgccacggagggaagagagtcctaatgaactcggccctcctcgctgggctcgcctccaactcaggactgaacagtgtttagtgtaaggtttgttacagtctctgtgattctggaagcaaatggcataccagtagcttcccaaatgaccacctgctgctgcgggggggtgggggtgggggacatgccaggaaacagcagagaaggccgctggtgtgaagagaccaggccagcagctcagtccagcccatttcagtttgtcacctttcagtgtccagcacagcatccctgtgaacctagggcccagctgctgtgggttctacatcggcactagggtcacactgcagaaaccgttgataaaacaaactcagtgatctctgctttcctattggtgggcatggcaggggcgggtgatgagatttgcttagcactgactgactggcctgctaagaacacaagcccacagccaggggctccctggtccacagctgggtctcaggccccttacctgccttccaagtcctttcgcagactcttgagtgtggctttctgtcctagccagcatgtcccacagactctgttgttcctccaacgcccgtcattagtgacagctttctctctgagtttctgtggtgtggagagtgggtagaagtaggtttatctttcccgctgtctgccccactcaaggacgatgttagcgctcagccatccctgcccagcacagctgctcagcctcatgctcccacccgcacccttgctgtgcagaacctaaggcttgctcccgtcccagactcgagtggacggacatccatgtccacccaggattgacgaaggaaggaacttcacactcctctatcatgcaaaaatagttttcaatttttactttttagcttgggttttgaaaggcaaactctaggaggcttaaaacgggcagttactcttaaggcgaggtagatacctcatcctgcaccgcagcctctgtattctggtgggagctgtaagggttgcgggcttccggtgtcccatgcatcaagccaaagtctccaaaacttgggcattgaattagggcaaatcttaaatagttttggggttggattttagtcctacaggtgatgattgaacgtggctggcttctccacagcctaaggaacccccatggggacacacccaccacccaatgacccatgcacctctgcctggacagctcacttccagccctaaggaccactgtgctcaagatgtgtggctgtagtaagacagtctcatgtcaggcattaagtcaaggccttccttcacacctgcgggacagcgcttctgaggctccagttctgctctgctcgaagcaggagggatgggttgtgaaggagtctgggatgtgactgggaccctcgcatctcacactcggcactctgcctctttccatccatgtttgagagccctggtctcaccaggaagtgcagagcaggagccgactgtgtgtgtaatgctctagtgtttgtagttctcttcactagccttgcagcgccagggaggccgggctggaatttgagcctaacatgttaggtttttacgggaaagctctttttccagctgtctcccaagtgcgtattgtgggccaaggagactggtatgggaaggggggatggtcaaggttccaagccagaaatggaaggtgcccagcacccctggattttacatgttcttgtattcagtaatctcagacgatttacacggaaatcagaagatgtcttcaaatacccttagactggatagagtgatggggaagcagatgatgcattgaaattttggtttttaaaaaatcacttagatgctgggagtaatggtgacacacacccttggtcccgtgacctgggaggccctgtctcaaaacaaaacaaaaaatcatttagatgcattttgtgttccttaaataaattttttaaaaagtggtttttcattgttcatggctttttgtttttgttgtttgtttgatttttgaagtttacttttatctttgtctgctagagttttgtgtccagctgcccttggggaccagaaagggactttgaatctccttgaaatgaagatacagttgttagccagatgtgggtgttgagaactgaacccaagtcctctgaaaagcaggaagtgctcttaactgctgggctgcccctctcccacccctccattgtttgggtttgacttaaacacttgattttttttatgatttttttaaacagatttatttattgtatgtatgtgaatacgctgttgttgtcttcaggcacagcagaagaaggcattggatcccattacagatggttgtgagccaccatgtgggtgctgggaattgaactcaggccctctggaagatcagtcagtgctcttatccactgagccatctctccagcccctttttatgattttattttatgtgtatgcacacttttttgtgatgctttattgagttcctatggaacccttctaaccccctacctcaggtaggggagaaagaaggttagaggggggaagggggcatagatcttttcagactgcttcttgctgattaggggcatcgagttccttgggtcaacttcaaacttcattgtcagaatatccaatctactcgtctctttgctcacagccttgtgacaagccacagcagcaacagacacagtagcctcctctgcagagcgcactcccacctgatagcccctctcagagctcggcatttataccctatgagaagttcccagaatcccagagttcacagaaactgtctgcagctggcaaaaccacgcctctgccagagcacgaggcaaatgatagtcagctgctgtgaagcagtcacctatctcacaacatagtcacatgacatacctgggttttttaggaaaccgaaattctcacatgtttacctgcatgcatatacatacatcatgtgcatgtagtgcccagggaaggtagaagaaggcatcagagtccatggaactggagttacaagatggttgtaagctgccgtatggttcttggaactgaacccacatcctatgcaagagcagccagtgtttttaaccactgagccatctctccagcccctgattaaatagtataaaaaggaaaaaaaggtctacagccatcatgccctaaacccactgaatctccactgatctcagaagctaaacagactggccttagtctattgctgtgataacacaccatgaccaaggtaataatataaggaaaagattatttggagcttgctgtttcaaagttaagagaacccatgtagggggctggagagatggctcagaggtggagagcactgactgctctttcagaggtcctgagttcaattcccagcagccacatggtgactcacaaccatctgtaatggaatctaatgccctcttctggcatgaaggcatatatgtaggcaggcagactattgtgtacataattaataaataatctctcttttcttaaagagtacatggtgacaggcaaagtggaagaaatgtcagagagagctatctgggaataacatgagtttgtcaaaccttgaagcctattcctaggaacacctctaacaagccacacctcctaatctttcccaagaagttccaccaactagagaccaagtattgaagcccataagcctttggggaccattatcatttaaaccacctcagatgcagaaaagctgttgggttgaagaactctagtagaattcaattgaagaatgtggttgaggggctggagagatggctcagcaaaggttaagagcactagctgctcttccagaggtcctgagttcaattcccggaaaacacacggtggctcacgaccatttgtaatgggatctgatgccctcttctgctgtctctgaagagagctacaatgtactcatatacaataaataaataaacaaacaaacagacaaacagaccagttctccaactgaaccaaagtgcatccattttgctgggctgtctggccaataaggttcagggacctacctatctacatagccccagttccccagttccagatgtggtgccctctgtacccagctgtgtgtgccactatgccgtggatgctggggatccaaactcgggtccgtagtgtaaagtaggagctttcccagctgagccatctcccctgttccttaaagcctttttgacagacagtctccacatttgtctgagtttccactctccagactttgcctcctgtttgccaaaccacctggttctcttgggagacatattgaagggcttacaatttgcataatgagatgaaacctatctaccctcaacaagcataccagttaagcattgctgagccacactgccccaaccagtggagacacatgctcatggttgttgggaactgctggaaatagaagggtactgaaccacaaatgccccatctccttgtgtgcacaaagagcaaacatttggcttcataaattgattttggtttagtttggttttgcgtttgcacttgaaattaagaactaatccctctttttggcacgtgtgtgtgtgtgtgtgtgtgcctggtacggaggtgcatttgcacaggtgtgcttgggagtagagatcagaagttcacatcagggctggaaagatggctcagcggttaagggcactagctgtttgctcttccagaggtcctgagttcaattcccagcaaccacatggtggctcacaaccatctgtaacgggatccgatgccttcttctggtgtgtctgaagagagcaacagtgtacttacaaacattaaacaagtaaattgttaaaagaagaaaggagggaaggaaaagaaagaaggaatgtctgcctttttctttgttcccagcttatacatggagacagagcctctccccctgaatccagaacttgtcaagtgagctcaaactagccatcttgctcggaggtcccctgtccccacctcacaagcactggggtcacaaggtgggcacccttgcactttcttcagtattttcgtttttagttccaattggacatgagtagcctctctgttttcttcaatgcaaatactgctgcctggtgtaaaaggcacttcctgtgcccttggaggcacagctttcttccctgaaatcccagacgctgccagagacagacagacagagagaacgctcgcacacatgatcacacatgcacacgagtgagtgcaggtgtccccaggggccaacagagagcatgcgattccccggggttacaggcagttgtgagctgccatgtgtgcttgcttgggaaatgaatgtggatcctttgaaagagtaataccagctctccattgctgaaccattttcctgtggggccgtggtccgcgagaggaagtctggtaaggtcgagctgggcttgaagctccagggacccagaagggacagtaggagcttcacctgctcccaacatcaggcccctgtcactgtcacagccacccatagagagaattgtggccatcagtcacataggcgcagcaccccccaaacccctccacatgtagatgaggcatccctaacatctcagaccaagccaataggaagcacctgctgtcagaccccacccccaccccaaaacggtgcataatatcctatccagaggaataaaggtgtgtgtgagagttactccatcatctgggagcatctgtcttagaagagctgctgttacactgcctgggaagaacagcagcagccaaggcagcagcagcagcagcagcagcgcatcggtggtggctgcgggccagaggtctctgcagatagacttaggtacgcagaccagcagttccctagccccaagatcttgtctctttttaatacagacttatcggccctaacttcccttctggcttgccacagcacatatgcattggtatggcgatttttgttttgcctgcacgtgttgatgtatttaaaaaaagatagagagagaggggaatatggtctatggagatgtgatgaggtataggggaggggggtgcctcctccagcccatgtcaaggcatcccttccaactgagtgaccagccacatgatggtatagtatagaatagagtttattcagggcatggggaggggagttaaaagggtagtagaggcagagaaaggcagagagagggagaagagtaatagggagaagtagaatagaggccggccatgaacacatggacaaatggggaagggactagggaagggaggggaggagggaaacgcctacgagggcaagagagaaacaagagaacaaggagggggcaagcagctccttttatagtgagccagccctacctggctattgccaggtaactgtggggtggagtttagacagaatgctaacacgtacgcctgtgcaccacgtctgtggaccacatgtgtacccagtgcctgtggagggcagaagggagtcagatgccccagagctggagtcacaggcagttgtgaaatgccacatgggtgccaggaattgaacccgcgtcctttgcgagagcagctggtgcttgtaagcaatgagcggggtctccaggctgcattttttgtcttgattcatcccaaggtattttctaatttccttcataattttttctttgaccctcagcttgctaaagagtcggcttccttcccacatatttgtatccttttccaactgcctgcctcccttctgttattaatctgatttcattccactgtggtgagagtgcacaccatgtacattctttgtttgacttacgttattttaaatatattgagactttttgcggccacatatggtcacccccaccctccccccggagaatccgtcctgcttttaagaagatctcatacatgtttttgcttggcattttaaaaagcttttagtttcacattttatattgcttgcggatatacatgtgtgggtgtgcctgtcagcagacatgtgtaggtcagaggacaacttggggaatccaccccctggcccagggtggcattaatcgcgtgtgaggtcggctgggtttccagtgcatgtggctcgggcttgtctggttcctttgtggacgtatggtatttgcagcctctgtcctgactgatgaactagcttgcatttgcctttgcattctccagcttggcttcctatattttggggcttggtgtgcacacgtgtttctaataatatctttctcatgggttaacccatttctttttcttttcttttttttttaaagatgtatttattattatacataagtacactgtagctgtcttcagacacaccagaagagggtgtcagatcttgttatggatggttgtgagccaccctgtggttgctgggatttgaactcaggaccttcgtaagagcgatcagtgctcttacccgctgagccttttcatggtgagatcttgggttcatccttcaagagtgcttgctgctcttccagcagacccatgttcaggtcccagcatgccacatccacaccttacgctgccatctgaactgctcccccgactccagtttgcacgtgttctgtctcactgctctgccctgtttgtcattcttggccaccgccttagtttgtgttacataaatattttccagtgtgtcattccaatttccttatcttttaacatcttaaattttttttaaagatttatttatcttatatatgtaagtacactgtagctgtcttcagacacaccagaagagagcatcagatcccattacagatggctgtgagccaccatgtgattgctgggaattgaactcagggcctctgaaaaagcggccagtgctcctaactgctgagccatctctccaacccttaacatcataatttaataggatataatttgagcccataccgatgtaatttcaatagccaagcatggggggcaatgatggtgcacgctcttaatcccactgcagagtcagaagtaggcagatctctgaattccaggccaggtctgtgtagtgagttccaggacagttggggctacacagagaaaccctgtctggaagaaaacaaaccaaacaaacaatcacacacacacacacacacacaaattgttagccaaacatagtagcaagttccagtccttcagataagaaagcaggagggttagaatttcaagaccaacctgggctgcatgaaaccctatcttagaaaaaaataaatctatttctctatcactcctttctccctatcgccccctctgacaccgtgagccggccagagcatagtttttcctttgtttgtttgggtacatatgctgctagctcctagctaatgagccatctctctattcctctctctgtctgtacacctggatttgaatttctgtctttggtgttcctgccccccttctacccttccccccagctatggggtttgggttgggggggtgttttttattttattttttaaggtttatttaatatgaatacactgtagctgtcttcagacacaccagaagagggcgtcagatctcattacaggtggttgtgagtcaccaaatgcttgctgggaattgaactcagtacctctggaagagcagttagtgctcttaacctctgaaccatctctccaggccccttgtgtttttttgtttttaactgaatttcaacagtgatcaaatcatttgctcctttttatggagtttagatccttgcaaaagatctgggggcaggagggttttattaccataaggccttgctgggggacaccaggaaagagctttgttttctctcggagcagctgctcactctgactcccctgcccatgtacatgggttgcttacagcagctctcctctgctccaggattccgtgctccggaaaccgcagggagggcccaggcagccatagacatggggtcagcttcaccaagttaatgcaggaacccaagagtctcagaagcgcggctgtgcctcccccccccccccccgcctcgctcccctccaccccccagggtgatttcagctgccagcagtgagcctctgggcagctggtgaggcttcaccaagtcaatggagcctcagccactgtccacctggacgggaagagggtccccacctctctctgcccttcagcgagatcagttccaccactctgccctctgccgcagcggcaggcgcgcgcccaccagtagccaccacgtgaggcccgggctctaaagtatctttctggacttgcagctcagtcctccctgccctcccctgcgtgcctggcagcttcctgtaattccaggtaagcaccctccacgaagccgcggtgtgcaagcctgctgcgtgatctggtgactggctaggacgtgggtggaagtctggaaggaacctgggccctttggttcagcacagcaaggtgccactgagcagcgtgctaggggtggggacatcagagaagatgcagagtcacctctgccaccctcttcaattcggacaccattgcagccatgtgcaggagggggacagggcagagatgcaccagaacctggctttaggaaagaaaacaaaacaaacaaacaaaaccaaaccaaccagcccagctgnnnnnnnnnnnnnnnnnnnnnnnnnnnnnnnnnnnnnnnnnnnnnnnnnnnnnnnnnnnnnnnnnnnnnnnnnctgagccgggcagtggtggcgcacgcctttaatcccagcacttgggtaggcagagacaggcggatttctgagttcgaggccagcctggtctatagagtgagttccaggacagccaagactatacagagaaaccctgtctcgaaaaaccaaaaaaaaaaaaaaaaaaaaaaaaaaaaaaaaaaatcaagctgtatagtgctggtgagatggctcagcggttaagagcaccgactgctcttccagaggtcctgagttcaaatcccagcacccacatggtgcctcacagccatctataatggggtctgactccctcttctggtgtgtctgaagtcagctacagagtactcacataaataaataaacaaacaaacagacaagtaaataaatatcagcctccagggatgccagctctggaggaaaacctgacacagggcagaggctgcagctcagttctcagtgtgcgaccaggaagcacaaagccctgacttccacccctatcctcaggaggtggaggcaggaggatcagtggccatcttcaactacattgcttcttagagcctgctcgccttgagaccccatctcaaaaataaatcactataaaaagaaaagccagaggctggtgagatggctcagtgggtaagagcaccgactgctcttctaaaggttcaaatcccagcaaccacatggtggctcacaaccatctgtaacaagtatctgactccctcttctggagtgtctgaagacagctacagtgtacttacatataataaataaataaatctttaaaaaaaaaaaaagaaagaaagaaaagaaaagccagccgggtgtggtggcacatgcctttaatcccagaggcaagcggatttctgagttcaagaccagaatggtctacagagtgagttccagggaagaagaagaagaagaagaagaagaagaagaagaagaggaggaggaggaggaggaggaggnnnnnnnnnnnnnnnnnnnnnnnnnnnnnnnnnnnnnnnnnnnnnnnnnnnnnnnnnnnnnnnnnnnnnnnnnnnnnnnnnnnnnnnnnnnnnnnnnnnnnnnnnnnnnnnnnnnnnnnnnnnnnnnnnnnnnnnnnnnnnnnnnnnnnnnnnnnnnnnnnnnnnnnnnnnnnnnnnnnnnnnnnnnnnnnnnnnnnnnaggtgaatagggcgggcagaacctggagccctctgggctgaagattgagcgggattttggtggatgggttttgtggtctgaagggaccctgctggccggtcctggcctgccctaaaggtgaggggaagagaaaggaagagttggggaacagttggggtgggggggatagtaggtagagaagctaactgagccctggaggatttgctgttgatcctggcaccttccctttcccccaggctgagctctgccctgcagcctcttgccccagtgacctggttctagaactaacctggcaggtggtccatcctgtagtgagggaggcccagcttggaggccatgcctg

SEQ ID NO: 80 - DNA, 2643 bp, Mus musculus
gtccggcgcgcggctgagcgaccgagcgtgcggacggagcggcggcctgctgggcgggctgagcggcgcgcgcggcggcggagagacgcggagcgagggacgcggcggcggcggacgcggcgacaggtcttctacttacaaaggacaatgactactgatgagggcaccagtaacaatggagagaacccagcagccaccatgactgagcagggtgaagatatcactacgaagaaagacagaggagtattaaagattgtcaaaagagtggggactagtgacgaggccccaatgtttggtgacaaagtttatgtccactacaaagggatgttgtcagatggaaagaagtttgattccagtcatgacagaaagaagccatttgcctttagccttggccaaggccaggttatcaaagcctgggacattggggtgtctactatgaagaaaggcgagatctgccatttattatgtaaaccagaatatgcttatggctcggctggccacctccaaaaaattccatcaaatgcaactctcttttttgagattgagctccttgatttcaaaggtgaggatttatttgaagattcaggcgttatccgtagaatcaaacggaaaggcgagggatactcaaacccaaacgaaggagcaacggtaaaagtccacctggaaggctgctgtggtggaaggacatttgattgccgagatgtggtgttcgttgttggggaaggagaagaccacgacattccgattgggatcgacaaagccctggtgaagatgcagagagaagaacagtgtattctatatcttggaccacgctatggttttggagaagccgggaagcctaagtttggcattgaccccaatgctgagcttatgtacgaggtcacccttaagagcttcgagaaggccaaagaatcttgggagatggacaccaaagaaaagctgacgcaggctgccatcgtgaaagagaagggaactgtgtacttcaagggaggcaagtacacgcaggccgtgattcagtacaggaagatagtgtcctggctggagatggaatacggcctgtcagagaaggagtccaaagcctcagagtcgttcctcctcgcagccttcctgaacctggccatgtgctacctgaagctccgagagtacaacaaagccgtggagtgctgcgacaaggcccttggactggacagtgccaatgagaaaggcttgtacagaaggggcgaggcccagctgctcatgaatgactttgagtcggccaagggcgacttcgagaaggtgttggcagtcaatcctcagaacagggccgctcgcctgcagatctccatgtgccagaggaaggcgaaggagcacaacgagcgggaccgcagggtgtacgccaacatgttcaagaagttcgcagagcgggacgcaaaggaggaagccagcaaagctgggagcaagaaggctgtagaaggagccgctggcaaacaacacgagagtcaggccatggaagaaggaaaggccaaaggccatgtatgacgctgcgccacggagggaagagagtcctaatgaactcggccctcctcgctgggctcgcctccaactcaggactgaacagtgtttagtgtaaggtttgttacagtctctgtgattctggaagcaaatggcataccagtagcttcccaaatgaccacctgctgctgcgggggggtgggggtgggggacatgccaggaaacagcagagaaggccgctggtgtgaagagaccaggccagcagctcagtccagcccatttcagtttgtcacctttcagtgtccagcacagcatccctgtgaacctagggcccagctgctgtgggttctacatcggcactagggtcacactgcagaaaccgttgataaaacaaactcagtgatctctgctttcctattggtgggcatggcaggggcgggtgatgagatttgcttagcactgactgactggcctgctaagaacacaagcccacagccaggggctccctggtccacagctgggtctcaggccccttacctgccttccaagtcctttcgcagactcttgagtgtggctttctgtcctagccagcatgtcccacagactctgttgttcctccaacgcccgtcattagtgacagctttctctctgagtttctgtggtgtggagagtgggtagaagtaggtttatctttcccgctgtctgccccactcaaggacgatgttagcgctcagccatccctgcccagcacagctgctcagcctcatgctcccacccgcacccttgctgtgcagaacctaaggcttgctcccgtcccagactcgagtggacggacatccatgtccacccaggattgacgaaggaaggaacttcacactcctctatcatgcaaaaatagttttcaatttttactttttagcttgggttttgaaaggcaaactctaggaggcttaaaacgggcagttactcttaaggcgaggtagatacctcatcctgcaccgcagcctctgtattctggtgggagctgtaagggttgcgggcttccggtgtccatgcatcaagccaaagtctccaaaacttgggcattgaattagggcaaatcttaaatagttttggggttggattttagtcctacaggtgatgattgaacgt

SEQ ID NO: 81 - DNA, 1371 bp, Mus musculus
atgactactgatgagggcaccagtaacaatggagagaacccagcagccaccatgactgagcagggtgaagatatcactacgaagaaagacagaggagtattaaagattgtcaaaagagtggggactagtgacgaggccccaatgtttggtgacaaagtttatgtccactacaaagggatgttgtcagatggaaagaagtttgattccagtcatgacagaaagaagccatttgcctttagccttggccaaggccaggttatcaaagcctgggacattggggtgtctactatgaagaaaggcgagatctgccatttattatgtaaaccagaatatgcttatggctcggctggccacctccaaaaaattccatcaaatgcaactctcttttttgagattgagctccttgatttcaaaggtgaggatttatttgaagattcaggcgttatccgtagaatcaaacggaaaggcgagggatactcaaacccaaacgaaggagcaacggtaaaagtccacctggaaggctgctgtggtggaaggacatttgattgccgagatgtggtgttcgttgttggggaaggagaagaccacgacattccgattgggatcgacaaagccctggtgaagatgcagagagaagaacagtgtattctatatcttggaccacgctatggttttggagaagccgggaagcctaagtttggcattgaccccaatgctgagcttatgtacgaggtcacccttaagagcttcgagaaggccaaagaatcttgggagatggacaccaaagaaaagctgacgcaggctgccatcgtgaaagagaagggaactgtgtacttcaagggaggcaagtacacgcaggccgtgattcagtacaggaagatagtgtcctggctggagatggaatacggcctgtcagagaaggagtccaaagcctcagagtcgttcctcctcgcagccttcctgaacctggccatgtgctacctgaagctccgagagtacaacaaagccgtggagtgctgcgacaaggcccttggactggacagtgccaatgagaaaggcttgtacagaaggggcgaggcccagctgctcatgaatgactttgagtcggccaagggcgacttcgagaaggtgttggcagtcaatcctcagaacagggccgctcgcctgcagatctccatgtgccagaggaaggcgaaggagcacaacgagcgggaccgcagggtgtacgccaacatgttcaagaagttcgcagagcgggacgcaaaggaggaagccagcaaagctgggagcaagaaggctgtagaaggagccgctggcaaacaacacgagagtcaggccatggaagaaggaaaggccaaaggccatgtatga

SEQ ID NO: 82 - DNA, 87878 bp, Homo sapiens
caaaaaccagcaagtttttattagggattttcaaaaggggagggagtgtgtgaatagttgtgggtgacagacatcaagtacttaacagggtaatagaatatcacaaagcaagtggaggcagggcgagatcacaggaccacaggacagaggcgaaattaaaattgctaataaagtttcgggcaccattgtcattgataacatcttatcaggagacagggttttgagatcaactagtctgaccaaagtttattaggcgggaatttcctcttcctaataagcctgggagcgctatgggagactggagtttatttcacctctgcaatctcgaccataagagacaggtatgccccgggggggccagttcagagacctacccctaggtgcgcattctcttttctcagggactttccatgctgagaaaaggaattcagtaatatttctcccatttgcttttgaaagaagagaaatatggctctgttctgcccggctcaccggcggtcagagtttaaggttatctctcttattccctgaacaattgctgttatcctgttcttttttcagggtgcccacatttcatattgctcaaacacacatgctgtacaatttgtgtacttaacgcaattattacagggtcctgagacgatatacatccttctcggctgacaggattaagagattaaagtaaagacaggcataggaaatcacaagggtattgattggggaagtgataagtgtccatgaaatctttacaatttatgtttagagagtgcagtaaagacaggcataagaaattacaaaaatattaatttggggaactaataaatgtccataaaatcttcataatccacgttcttctgtcatggcttcagccggttcctccgtttggggtccctgacttcctgcaacaccttcttatatgtatcaaaactcatactgaacaatgagttctgggttgcaaaagaggatttattttttgcacctaaccataagtctttgtccacaagttaaacaaaaacagtgtagtatacagtatttttaataattttgtgcattaaataaaatttgtgtaccttgaatcattagaaaacaagtattaggtgtggagtttttcacttgtggcatcatgttagaattcaaaaagtttcagagtttggagcatcttggatttcggatttttccaattaggaatgctcaacctaatcagaagtaagacttggatattaaaagtttgaaagccacggttttatttgcttagtagtatataactgcaacagtactttttatcttaattattgtgtagaatctgatgactccccaacatataactgtcacccacacttctctcctgagctcaggccttatctctgataaccttctggacatcgcacaagcaccccttgctcaacataccccagccagagttctcttgctctccataaaaagcaatctgaaatgttcgaattaaattgaagagaaagaataaaaagtcctgatgagtggaaccatgaaatgtttcatcttttttccctaagtttaaaaagatcatgaaagtaatacatgtttaatgttaaactatttaaataatataaaaataaaatctaagaagtgaaaattccttcttatcttcccaaatctcattctccagaggtaacactgtttgagcagtttggtaagttatctttccaaacttcttctatatataagcaaatatacaaacacatatatacttttttcctcttggaaataggatcatgttacaaatcattctgcaactcaccattcacttaatagtacatcttgaaaatccatctgtcttttcatgtgagtattagaagattgtttatgtggaatgggtaagacgtcacctgctccatattagtgatattttcagagattagctgtcttaaagggaaaacagtgaaaaagacattttggcatgtaatgaacaatatttgcataattgtaatccagtgctctaaaatgatcatacccacccacccaccaaaatctacaaacaactgggaaccatggttggtggctgcaaatatattggtataaattacactgtttgtgccaggtgcggtggctcatgtctgtgatcccagcactttgggaggctgaggcgggcgggtcacttgagctgaaggagttcgagaccagcatggctaacatggcgaaaccccatctctactaaaaatacaaaaattagccgggcattggtggcgcacacctgtaatcccagctactcaggaggctgaggcaggagtatcatttgaacctaggaggcggagattgcagtgagccaagatcaggccactgcactccagcctgggcaacagagcaagagtctgtctcaaaaaatttaaaaaaataaaaaataaattacactgtttgtgttacatgtattagcccattgtggcatcatcaactgacttttttttttttcaatggtccagataaccaaatcatcactgggcactatgcaccattaacaatacacttcatttactacaatgctattcttttttccttttttttttttttttggacaatatcttgctctgttgcccaggctgcagtgcagtggtgcaaccatggcgtgatactcctgcctcagcctctccagtagctgggaccacaggcgtgtattttttatttttagcagagatcgggtctcactgtgttgcccaagctggtctcaaactcctgggctcaagccttgacatcccaaagtactgggattacaggtgtgagccactgcgcctggcattcttttataatggatgaacatttacaaaatattttcccaatttagttgtttggatgtttttgtttagactcttagctaaatgattctctactgtatagatttatctcatgcttttcaaaaactgtatatttttatagtatgcatttgccaaattttagtctaacattcccatgaccatccttttaaggaaaaactttgaaatacttttatttagccatacggttaaaatttagctggaactaagtgatctgtgtttagttgatgaactgatccatgctattcttgcatcatgactttttcatcttcccttgattcttttccctatatgcatttaagcctgtctggttcttttctcaagcctttgctctctactcccctttcactcaaagcatttcatgtttcgcctttataaccctagtataagtatcaaacttctcacctgtgacttttgcctctctctacatctctcttctacttttaactttcatgtttacaataagctacctttctcttattttcagttcttaccttctcaaacttcagagaatccccactgcttagtgttcttgggagatgctagaggttacacaaaatgccacctcccagaaggtcgaggcattttttttctttaaaaaaaaaaaaaccttttagccaaatacttactcataagaaatgctccattttattctcagtagtatcttcagaaagatttcagaggtaattgcatctacaaaataaagacttagtgctaagaaaatgagcaatccgataagaatatgtaaaataaaaaacattattactaaattcttttttttttttttttttttagacagagtcttgctctgtcgcccaggctggagtgcagtggtgcgatcttggctcactgcaagctctgcctcccgggttcacgccattcttctgcctcagcctcccaagtagctggaactacaggcgctcgccaccacgcccggctaatattttgtatttttagtagagacagggtttcaccatattagccaggatggtctcgatctcctgactttgtgatccgtctgccttggcctcccaaagtgctgggattacagatgtgagccatcccgcctggcctttttttatttttattttttgagatggagtttcactcttatcctccaggctggagtgcaatggcacaatctccactcactacaacctccgtctccagggttcaagcgattctcctgtctcagccacctgaatagctggaattacaggtgcccgccaccatgcccagccagtttttgtattttcagtagagatggggtttttccatattagccaggcttgtctcaaactcctgacctcaagtcatctggctgctctggcctcccaaattgctaggattacaggcttgagccacctcacctggccactaaattcttttaaaaatctcttgagcacactaaatgatatattgaatatagctgatgaccaaatggtgttgtaaaaattccatcaggccaggtgtggtggctcactcttaataatcctagcactttgagaggacgaagtgggaggatcacttgagcccaggatcacttcaagaccagcctgggcaacatagtgagaccctgtctcttctgaaaaaaataataaaaaaaaaacattaggtgtggtggcacatgtctatagtttgaactactagggtggctgaaggggaggattgcttgagcccaggaattcaaggctgcagtgagctatgacggtaccactgcactccagcctgggcaacagagcaagaccctgtctcttaagagacaataagaaataaataaaaattccatcaaagaatttctcttagggtataaagccagagacaaagatgaaaaatgggagaaatgtccagtggttctcaaccatgtctgactgcacattaggatcatctaacatggtttttgaaaacaccattaccctggccccaccacagaccaattaaatccagactctctgggctggagtccagacatcagtagcttttttaagctcctcaggtgattctgttgtttagcccaggtttagaaaaatacttaagaaacctgaagaataataccaaaatgtccgaagtctatctaataatacttctagaagtagaggacagagacatcaaaggaaaagaaataatgctagaaaatttttctggagattctgcaaagacttgtcttcagcagttaagggccagaatatcaaggcccctgcaggaattaaggaaagaagacaagtaccttgacatatcctttcgatgggtctgaactccaaaaataaggattattatgtcttccagagaagaaaagatgggagccacagtgtgcactctggaaggaaagaaacctacctggcctaactgatccaaacacagtttctgctttttcccccagatgctgctctccagtgcattcccctagctcactcctgctttctggggctgaccccagacctagagcttctccaggctccctgggaagagctgctcttaacagttggtgtttgggaggcaactttctcttctttgctctctccttcggtctgacctcatctgctgtgtagtgttcagaaattcccccaaagttctggttcagttaggaacatgtcttgttttccacctcagagttttgcagattttaaaaactttttcttgtcatcccagcatcttcctggggagaggaagttgatgacttagtcctgtcgttcaacctttttgaggccaaatagggtaaaatcatattaaggggaataatcctgtattcaggttcatcctttagtatataatggtaacatttggatagtctaatattttctggggtttttttgtttgttttaatataatcctttgctttctgcttacttgaaaacagtaatttatccaactcagcactcagagtcaggggaagtgtggtctcttagctttgttttcttcagtaattatttgttccgagaagaaaaataagtttaccaaagaaatatctttctgaaaactctcctgttagtagcataatctgaggcaagacactgatattttaacaaagagaacaatacagtaatttacataatatacatagggaattggtagatatggctttaaaatgacttctcatttgggggacctgatagtttagttatgttaactgaaatttttagtacactgttgataaaatattaagtgtattctcatttttctgttatgtctcaggtgtttgctgactagcactttggagagtgtatgcttatctgccatgtccataacagaacgaactgtgttccctttctgatgcattgggtagcaattttccgcctttggacagttcagcacagtaagctttatcatagattaatatccatagctacatagtgattttaaatccagaataaatctagggtgagggaaagaagaaaagtctctcttataaaaatggtgaaactgtctcagtgtgtcattacagtttttaggaattgtctgtccttactgtcttttttatataacattcaatcaaggaaaaagttttatttgttttgttagcttacaaaaacctatactcctaatggcttaactggaattaaggggaaatacttggaaaattcagtttatgtctttattcttccagctttatctgcttttgaaagttcaaaagtttgttttcttgttgtttttatctttgtgttttaattattcatagtacttctcttcatatggactcagtactactgacaagagccatcctctgagattactaagatgacttgcatcccttgaagtgttggagccaaaacatgaagagctaattcctttatcagatgggatttagaaagctagtaaatcagcttatacaggttgcctatttactcgaatttaaacaagccattgttttcaaaatagcaaggtgagaaccaaaagaaaatgtttctttttttcctctctcttttttttgagaaagagtcttgctctgtcacccaggctagagtgcagtggcatgacctcggctcactgcaacttctgcctcccaggttcaagtgattcttgtgcctcagccacccgagtagctgggattacaggcgtgtgccaccacgcctggctaatttttgtatttttagtagagacggggtttcatcatgttggccaggctggtctcaaactcctggcctcaagtgatcccacccgcctcagcctcccaaagtgttgagattacaggcgtaagccactgttcccagcctgaaaacatttcttcattgacagtattttcatttaaaaatttagctgaactccaaatgatgaacattcaaaagaaagcattgtctttggatgatttgaaagcaagtggcagatatcatgacacctcacccctaaatactacagcatgtgtctcctatgaacaaggatattactctgcataaaaccataatactatatcacattccaaaaggctgacatatagtagtaataagctaatatgcagtctcctgttccaagttcttatattttgtcccctaatccaggatccagccaaggatcactgattacacttggttgtcatatctctatagtctcctttaatctggaacagacctcccgtctctccctctctctctttctctctctttttttatcttttaagagatggggtctcacccttcggcccaggctggagtacagtggcatgatcacagttcactgcagtctcaaactcctgagctcaatcaatagtccttccatctcagccacctgagtagttgggactacaggtgcacgccacctttttggttctttatgttgttaacattttttcaggagtgtaggccaatggtcttgtagagtgctccacaatctgtttttgtcttttcttcctggttagtttcaggttaaacatttttgatagggatagcacataggtgatagcacatctaaatcacatcactacatcatattaggagacagagtaatagcactttttttcattattggtgatgcagagtttggttatgatgcagatcatttgttaaagtgttatcagtcagattgttttacttgaaaggtctttttccttttttaataataagtaatctgtggggtactttcccaataacctctcacctggtggttttcatttgttcagtgctttacacccagagatctattgatggatgtcagcatctctgtgaatccccaggaaatttttttgtgtgcatatattttcccaggcatacagtccaggaccctccaaatatttaagagatcttttccctctgttatcaaggtgccttttacaagtttctgtgcatcacagaagcatattataagcagtgggtttctagaagctgggaaccaatcccgttcttctgattttcctgattatctagctcacctcatgtagagctaggtacataatttttgttgtttgtttgagaacgattgttctggcctttcgcttatcctgagccaaacatttggatctttcatgtttggtataaagcgtactagaaactagagcagagagacttagcccctggtttttggtgttctcatttgaagattttggggcacaacaattggatttgtgtctctgttgaactgaatagtggtcatttggaaatgagttaaaacactacagtatatgttttagttgtctaattatagttgtatcaataagacattttctgcaagtgcagaaagactctttgactctgtagacaagaaggctcaggagatgagtttagggggcattaagtttgttattagcctaatgtgtaatagctgtaggagtgattccttcttgattttccctgcccaaacagggagcagtgtggaattcatcatggcagtggttaggtgtgttttgcttagcctatgattagcctgttggttacattggcttgccttgcatgaaaaaatgtctgtcaggtgactaccaataacaataagagctaacatttgaatagtataccttaaaaatacacattataccacttcagaagattatctgtgaaaacagatatttttattctaatcacataggtaaggaaaaaatcttagagaagttaaggtagccaacatcaaacagcttgtaaggagcagaggaagaacacccccaaattccattacaaattccttgcactttttgtcttaccattctcaaaggtagaggcattctagggaatctaaatatgaacaaagcatggaccttgctctgaaggatcttttaaacctaacaggcgcatagtcttatgaatctcttacagacaacaaatcgagagaagagctaaggaagtacgtaaaagggcaaaatggcctacaaatagagggtcaaggttggtatgacagaagtaggatttgagagaggtggatgttttggaaacaagaaagggagtgaccagaagaatgactatgggaaagcactgggtttgttgtagaggtggaattggcctagtttggctggagcatgagctgcatgaaagaaagtaaaataaaataatggcagctagaactcaaagatagattagggccagattgtgaagggccttgaatgccacatggaagaacattctgtaggtattttgggcaggagatgaaaaatgaccctacagaaggcccaaaaatgatgataaatggttaaatatgtttaagttaccaatctatgctaatcttttaagaaatgttatctcactgtaactatgaatagtgtactgtgtccattttgcagatgaaaaatgaaggctcagcaagattaaggaaactggaaatgtcaagagctgcagctaggacccagacttgggtctgttggattctaaatcctgttctgtgtctcactgtgattgatatattgtcacttcttttattaagaactgataaggtcttaatcctctgtcaagaatatggctgtagaaaaaggatgttttcaaagttgtgaagggactgcttctcaccatgttatgttaaggaatgtaatcactacccaacttgacttgtactgttctctgttttgagaccagagctagatgggaaattaaagaattggatgatgttttatttacatgcctgatgacatcaatacatgctcatagcaaatgcctttgttttcattttcagtatctaagcttattggccctaagtaaatcttaggttaggtagagctcagttcccaggggcattcaagattcataaagaagtgatatttttcccagctaaaatatttttcttcttaccaggttctctacttaaaagacaatgactactgatgaaggtgccaagaacaatgaagaaagccccacagccactgttgctgagcagggagaggatattacctccaaaaaagacaggggagtattaaaggtgaggccacaaagctgagtgacatacaaggaaacctgctgtctggaaagattatagcatctctttctgaggggggctggggtggataatgtttattgatggttactaagtgccaaacactagagctagattctcattttgtcttcataacttcaaggttttttttaagagttgagtctcgttatgttgcccaggctggtcttgagctcctgggttcaagtgatcttcccatctcagcttcctgagtagctgggattttctttttaaattaattaattaaatttttgagagagggcatctcattatgttgctcaggcaagtcttgaaatcctggcctcaagcaatcctcccacctcagccttctgagtagctgggattataggcacgagccactgtgcccagctagagattttaatttttaatcccagattatagatgttgaaattgagactgggctaggtaaattaacttgcctaatatcatatatcttagtaatgcagatttacctggggttcaggtccaagttatatctcactctaaagggctatatttccctattctcagagtatacaaataggttactattttaatgtatccttttagtacactaaagctagctaatgacaattttgaagactttttaaggaaagaaaagctaacttgaaaaattcaaaggggttttattttattttattttattttattttattttattttattttattttgagacagagtctccctctgttgcctgggctagagtgcagtggtatgatctcagctcactgcaacctccgcctcctggattcaagcaattctgcctcagcctcccgagtagctgggattacaggcgcctgctaccatgcctcgctaatttttgtagagacagggtttcaccatgttggccaggctggtcttgaactcctgacctcaggtgatccgcctgccttggcctcgcaaagtgttgggattacaggcatgagccaccgtgcccggcccaaaggggtttatttttatatataaatattgttcctgtgtacagtgaagatatcttttgcgatttcctcttagaatatatcttacttttgaattagctttcctacttattaaagcactatacagtcattcaccatataatgacatttcagtcagtgacagactgcaccttcagcagtggtcccataagattataatggggccgaaaagttcctatggcctagtggtgccatagctgttgtagcatgggtagtacagtgtattatgtgtttgtggtgatgtgggtgtaaacaaacctactgcactgcagtcacagttatgtatagtacataatacttgataataaatgtttatattactggtttatgtgtttactatactttctatcattattttagagtgtgcttcttattttttaaaaagttaactgtaaaacacccttggctgagtgcagtggctcatgcctgtaatcccagcaccctgggaggccaaagcaagaggatcacttgaggccaggagttcaagaccagcctgggcaacatagtaagacccctatctgtagaaaaaaaattaaaaaaattagccaggcatagtggcatgtacctgtagtttctactactcaggagactgaggcaggaggatcatgtaagcctgggagttccaagctgcagtgaactatgatcataccactgcattctagcctgggtgagagtgagatcctgtctcaaaaacaaatgaacaaacaaaaaacagccttgggcaggtccctcaggaggtattcaagaagaaggcattgttattataggagacagcagctccatgcatgttactgtcctgaagaccttccagtgggacaagatgtgttggtggaagacagtgatactgatgatcctgaccctctgtaggcctaggtttatgtatgtgtttgtgtcttagttttaaacaaaaaaaagtttaaaaagtaaaagaataaaaaatttaaaaaacagaaaaatgcttatagaataaggatataaagaaagaaaatatttttgtacagctgtacagtgtttgtgttctaagtgtcattacaagagtcaaagctaaaaaaaaagtttacacagtaaaaatgttatagtaagctaagattgatttattattaaagaaagaagaaaaattttaaaataaatgtagtctaggtgtccagtgtttataaagtctacggtagtgtatggtaatatcctaggccttcatgttcactcactgctcactcgctgactcatccagaacaacttccagtcctgcaagttccattcatggtaagtgttctgtataggtgtaccattttttttcttgtataccttttattactgtacctttttctatgttgagatatgcttagatacacaaataccactgttttacaattgcctgcagtattcagtgcagtaacacaatgtacaggtttgtagccttggagcagtaggccaaaccacctaacgtgggtgtgtacaagtaggccaggccatctaggtttgtgtaagtacactctgcgatgttcacataaggatgaaatcatctaagaacacatttctcagaacatatccctgtccttaagcgatgcatgactgtgtgtgtttcttcactctatagttaatcattttcacgtgcatttcttttgttttgtttcttacaacaatgtggtgagacaatcagagcatctcttgattcttccatcttataagtgaataaactgaatctgagaaaggttaagtggctttagtcacattaaatagttatttctcctacaccattgttaacacatgtaagttttgtatagttaagttttgtttttcctgaaaagattatctgatgcattctgaatattaccaggatgctgagttttaatatctcttgtgccagcagtagcaagtaagaatttttgttttgtgtaactttgcttatgtgaaagccttctgtgcctggatctcttctgaatatatgtgaattgctattatgtgctaagtcaaattttggggacttgcagctatagaataagggctttatgctatagatttacatcctattgtctttttttagaaggcttctcaaccttgtagctatagttactcatcctaaattccaggaagcttctagaaacagtggagactttgcaggctgtcctcagcatctccctgcctctgtttacgacttaccctttcatcttttcagagtgcccatgcccagagaacatgatccccaacttgcctcagaccctgttctgttctagggagtaaatctaattgcaagatttttaggcttattaagaaacatttgagatttgaagccctttaaattatatcatttatcattgtctagagcctcggatttcaccatgaggcttttggttaagatttaaataggtctagtaactgtgcaagctagggcaatttagttaacctctctgtgattaagttcctgtttgtaaaattagaataataatgccatcaacctcatagagttattaggattaggtgaagcacttagcatagtgcctgtcctatagtaatctatcttattaactattacgtatttttaaaaaaagaaccagtgctggtttggaaattcagtaactatctgaggaagataaaagatggatttatattttaaaaatgaatagaacctagattgtgttcttaaggcaactctagatttaggtacaaattcatcttgctagggaagcctgaagtgataccatagtaccacttgctggtgtggatggctctctgactctctggtagccattcatcccacatgcccagttactgtttatagtcctagaaatgcagattccttccacgtgaggcttacagttgagcatagcctcccaaataccacatgcagttcgtgaacatgagcacttgtagaatattgtgtaatatcttttagattaatgttttgagactttttttttcttttgaagtcctagaagggcagtagtgtttctttgcctttaaagaatatttggggctgggtgcgatagcttataccagtaatctcagcactttaggaggctgaggcgggagaatcattggaactcaggagttccaaaccagcctgggcaatgtagcaagatctcatctctactaaaaataaaaaaatttgccaggcgtggtggcatgtgcctgtagtctctgctactcgggaggctgaggtgggatgatcacttgagctgagtgatagaggctacagtgagctatgattgtaccaccgcatgcactctagcctgggtaaaagagcaagaccctgtctcaaaaaataaaataaagatgtttgggcttttgagttaagaaagctgtggaatttaagttcacagtgtttatgtgatatttatgttaggtggacggtatacttgtaaaaaaagaatttaggagcaaataatcgaattatttaaataaaactcaaagcaaactccttccccaaaaagatgttcatcagatgttagctaccatcctctgttatctaccaaaaatgattaatttggcatagattacaaattaacaaattacaccatcacacacctgggtttgattttcttttcccagaactgaccaaatacattagcagcttgctctgccaagaacaaaataaatacactggattttacagtagttaaatactttactagaaaacaagttattcagtatcatatcaagcagtgcaatgatactcatgttttttacagatagactatgtttcaaataataggaaatgtaacctgttttaccaggaaattgggctttctgaaaataaacaagcagaatctagtcaggagctaatgtttttagcaaaggagggaaataaaattacacctttgaagctttgcttaagcttctttttgaatattttaaaagtccaccattctttctggtctaagtccgtgtgtatatggactagctcacaagcctgtgttagagagtttagtgtcgggcgcggtggctcatgcttgtaatcccagcactttgggaggctgaggcgggtggatcacgaggtcaggagttcgagaccagcctggccaacatggtgaaaccccatctctactaaaaatacaaaaattagctgagcacggaggcgcacgcctgtaatcccagctactcgggaggctgaggcaggagaattgcttcaacctgggaggcagaggttgcagtgagccgagatcgtgccattgcactccagcctgggcgacagggcaagactccgtctcaaaaaaaaaaaaaaaaaaaaaaaagagtttactgtcaaaatatagggcattaaaccaatgaacaggatttattggttaattctttgaaggaataaatagtgcgattagcaataaaagtagatataacataaaagacaagttggtaaaggacagttttctaacaatgagttattgtgaggaatgaagggaggcattagaaagaatggataatagtatatttgcatatctgcctggatgtcttgggatggactgtgtgacctttttattctctgattacaagtaaaaagtttgacctcctttttcttaatgtttgtcttttctagattgtcaaaagagtggggaatggtgaggaaacgccgatgattggagacaaagtttatgtccattacaaaggaaaattgtcaaatggaaagaagtttgattccagtcatgatagaaatgaaccatttgtctttagtcttggcaaaggtaagagggtatttttttgagttgtgttttacttagctttattactatttgtaatatataggagcagaggattctatcctttctaaaagtaaagaaattttagagtagtagtactcaaagaatggtctgagaatccctagggctccctgagatctttttagggggtcccaaatgtcatttattttcataacaatactaagatattatttgccattttactgtattgacatttatttgcactgatggtacaaaagctgcagttgtaaaaaaactgctggttccttaacacaaatcaaggcagtggtaaccagctgttccagtagtcatggtattttccactgccactccttcactatttacataagggaaaaagctagtttcacgtaaaaatgtcctgataaagcagtaaaaattattagttttattgaaacccaatctttgagtttcacatcactttgatattctgtgacagaaagggaagcacgtgtagagcacttctgtcccccaaagtatgatggttgtctcaaggaaaagtacttgtgctcttgttttagttgagatctgaactaactgcatttatttcatgagataccatttttacttgaaagggcaaatctgattatgcagacttgattcagtatttggcaggtgtttttctgagaatgaatggagtaagtctgtcatttcaaggaaaaacaactgacaatgttttttgccattaagttttcaagtaaaaattatagtttaggagaactcctatttgccactgtgggcttatttgccactgtgggcttgacagcttccgaagacttttctgatgagattggtgggtattaatgaatgtggttttaaatatacaatgaaatgtgtccacatttggaagatctgtataactaagaatgaatattttctcagtgaccaatgcaagatgttacaagatcatgtgtgaataaacaattcattcaaagttagaccaacagattttaatgtaacagtatgaaaagttcactgatacactttcagtttccacattgtaattgacttttatgaatcttacaagttgtacagttttgatgtagtatcagataattatattcacaattatctaaaaggttgttaaagggctcctacccttttcaactatctatctttgtgggtttggattttcttctctatgtacttcaaccaaaattgcaacagatgaatgcagaaataggagaatctggttgtctcgtgttacaagtcaaacacatttccacatgtataacattctaaaacaatgacactcgtctcactaattttttttttattttggaaaatacaaaatatacaaatactttgtacaaaattaaattacttatattaacatggggttattctaaaatgaattattaaataactacttttttactaaatctcagtagatatgtcaaataaacaagttctttggagtcctcaatttttaagatgttaaggggtcctgaggaaaaaaggttgagaactactattttcaagtattaagtatgatttttactaaattattttcaaatgccttttttttttgagacagggtctcgatctgtcacccgggccggctcactgtagcctcaacctctcaggctcaagtgatcctcccaactcagccccgcaaatagctgggaatacaggtgcgtgccaccatgtctggctcgctctgttgcccaggctggagtgtagtagcaccatctcggcccactgcagcctccacttccgaggttcaagcaagattatcatgcctaagccccccaagtagctgggactacaggcgtacaccaccacacctggctaatttttgtgttttttgtagagatggggctttgccatgttggccaggctagccatgaactcctcacctcaagtgatccgcccacctcagcccacccaaacacctgggattacaggcatgagccaccatgcccagcctaatttttttttttttttttttttgtagagacagggtttcaccatgttgcccaggctagtcttgaactcctgggctcaagcaatctgcccgcctcagcctcccaaagtgctaggattataggcatgagccaccacacctggcctcaaatgctgttaaatgtctttagttcatttaatgttcttattttttaatcttgtaggaataatagcccatacatcaaattaaactttgtagaacatgtggcttattggaagttggtggctgagttacatcttttattcttgtctgccacagacaagcaactgtagtttgttcctagattagggaaaaaagtattccccctattcaccaccatggctatgtgtggacttcattcccttgtccttcagctctgtatctagttgaattgctaactaagcatggatctggaaaggaaatatagtaagcagaaactgaggagttactttctgtctcttgccactcagccttccctgcttcctgtatcatttgtgtgcctggtgaattctgcttcccgtccagctgtgctctttccaagctccagttctggccacgcccctgctctcttctcctttgggtctttagtaggttaatggctcatgagatattaattttttgtttgaataagatagcagtaaaaatcaaatacagtcttgtggcagataattatgacagttattttagaattttgttgttgttgttgttgttgatttaggcatatgaacctccagggctgccagaatgggtgtggcatcattatttaggtgacctaagagtgactgaccttgtcagacccccttgttcctgccacctgctaaatccttactctatccttagaattcctgtcttaaagaagctgagagttaagataacaggtccttttagcagttatcttggtgagcagaattaagaattgttgagaatttatattggtatcttctctactgagattttctcagtaaaacactatggtgaatgagtttcctggaattttaagcagagtaagaagattttctgagttatttttttaaaatacaagttgggagaaaaaaagaggcaactttcagttgactttgtacctctgacacacctgtctagagtcagtgcggtctcatggaaaaagcttccagccgggcattaggaagccagggttcctgtcttccctgttccttgtggtgtgttaacatgagtaagccacttaatcttacctgcttctgtaaaaagaagtctgtggagagcttatgtgattccattcttgttccttctgtaaagaatgcgggaacaaaaaccataaaagactaataccaacacaaagagacccttagaggcctccttaagatggtaattggaaatactaggatagagcaatatacctctggtaaaacatctataacataacgtatttagttgcctacaaaacaagaaacattggttaggcagtttatagttttgtggggttttttttttcctttttttttttttttttgagatggaatctcactctgtagcccaagctgaagtgcagtggcgtgatcttggctcactgcaacgtctgcctctggggctcaagtgattctcgtgcctcagcctccccagtatctgggacttcaggcgcgccccaccacgcttggctaattttttgtgttttagtagagacagggtttcaccatgttgcccagggtggtctcgaacttttgagctcaggtgatccgcctgccttatcctcccaaagtgctgggattacaggcatgagccactgtgcccagactatagttttatacttatattttatagcattaggtagtttatcaaaatgaagaaaataatataaatggacagtagtataaatattattcattgaactccattgatcccttatattgtacctctcccaagggaataaatagaaatatttcaatggaaagtcatcctaatttggggattctagtatgacttcagtatttaacatagaactataagagcctatctgtaaaaatcccattgaaaagataaacatatcataaaatacacaaattcaagctatacctacacttgctttgtatatgtcttttgctttgtgtatgtctgttgcttttatcataccatctttttctcttttctttttttttttttctttctgagacggagttttactcttgttgcccaagctggagtgcaatggcatgatctcagctcactgtgacctccacctcccaggttcaagcaattctcctgcctcagcctcccaagtagctgggattacaggcatgcgccaccacacctggctaattttgtatttttagtagagacggactttcaccatgttggccaggctggttttgaactcctgacctcaggtgatccacccgttttggcctcccaacgtgctgggattacaggcatgagctaccgcgcctggctagccgtaccatcttttaaactctattctttactttcttcatctaaggttatgataatcatatatactacatatattatatatgattatataagtatatattattatgttgaggattaagataatgtacaccatcgcctagcattcagcctaacaaatggtaagcactcagatgttgattattattgtggcagtgttaggatttttcactggttttataatggaatggtaaaagctgtgttataacatcttgggtcctgacttcatctgttgactatgcatgcgtacaaaccttggaaacaatgctcagccatcttgcttagccccaggaagttgggaaagacagaatcaatctaagggaactgattattactactgtggaatatgttacagaaattagagtgaagaggtgatgatttctcttactaggttttcttaactaaatattagaggttgtgaattattagaactggtcatagcccatttaaaaagaagctgaattaagaacaaggattttcatacatacttctataataggggttctgttcttttaccctactccccccagcaaatatattttcactaaaatggaagagggcaatagatttggaggatgaaagaattatttctaccctttttttttttttttttttttgagacagagtcttgctgtgtcgcccaggctggagtgcagtggcgtgatctccgctcattgcaacctccgcctcccggattcaagcgattctcttgcctcagcctcctgagtagctgggactacaggtgcatactaccatgcctggctaatttttgtatttttagtagagatggggtttcaccatgttggccaggatggtcttgatctcctgacctcgtgatccacccacctcggcctcccaaagtgctgagattacaggcgtgagccaccacacccagcctcaatcttactattttttggattctttgtacaattagtataatttaggtgacaatcatattaatatttgtgtcgaagccactttggtttttttattgaggtattatttacgtataataaagtttacccttttaagtatatagtttgatgaattttgataatatttctgtaactaccaccacaatcaaaatataaaacaatttctttaccctaaaaagtatttttatgtccttttgcagtcactttccttcctggaccctgagccccaggcagtcactaacttggtttctgttactataattttgccttttgtagaatttcatataaacagaatcttgtattatctttggtgttgacttctttcacttaacataatgactttgggattcatgcatgttgaattcctgagaagtattccacaatttgggaatgccacagtttgttcacccattcaaaaataggacatttggttgtttgcaatttggggctattcagtttttcatatccttattaacacgtagtattgtcgatctttttaactttagccattctagtaagtatgaagtagtatctcaccttggtttttgtttgcatttccctgatgactagtgatgattgagggtctctcttcttgtgcctagtgggcatttgtatgttttcttttgtaaagtgtctgttcagatcttctgcccattttaaaacatcagttgtttgtcttactgagttgtacttaaaaggacaagcactttggcaaatatgatctcccagtctatcttgcctttttattttcttaattggtcttcggaaaagtaaaagtttttacttctgattaagtcagctttatcagttttttcttttatggtttggttacctactgttattaaccatttttggtttgatgtgattttttgtttactatattacagactaaggtacagagaagctcggtaaattgcccaaggctatacagtaagtggcagagccaggattcaaatccaggtagtctttcttaagttatgttagatcttaaggtttaaaacatagcccaaaccaggtacagaaatgaagtaggtcctggttagcagtatttatcgagtgcctgatatacagtagaaatttctctttttttttgagacggagtctcgctctcactcaggctggagtgcagtggcacgatctcggctcactgcaacctctgcctcccgggttcaagtgattctcctgcctcagcctcctgagtagctgggattacaggcatgcaccaccatgcctggctaatttttatatttttagtagagacggggtttcaccatgttggcgaggatggtctcaatctccagacctcgtgatccgcctgccttggcccccaaagtgctggtattacaggggtgagccactgcacccagccacagtagacatttcttaccagtaatgatatgtcatagtaaggtttatcaaaagcactggcgcttgtgttcgctcgctctctctctctctctctctctttcttcctcctcctccctctttctctctctctttctctccagagacttgctctgttattggggctggaatgcaatggcaccatcataactcactacagcattgaactcctaggcttcagtgatcctcctgcctcagcctcccagagtgctgggattacaagcatgagtcactgcactcagccaatatattcttagtatctgtttacttttttttacatgcagtttaggagcattcaggagatttttaaggaaagcttttaggctaaaatatttaatttttttaattgtccccaaaagtgtgagccagaaagacagcaaactttaagaaagtacttactttggtttttcctggtactttgcgatagaggaggaatgcttccaatttccactgctgagtggatatcagggaggagctgatttaggctgtggaaagctgagcaaatttctcactccatttaaattcgatattacatcatgcctttgttctctttttgagtacagtgttgtggtgctatagttctttgcaaagagtaattaaaacatgacccctaccttcaagtatgtaacaatttagtctggcagagttgatccttaaggctgtcccaggacagataatgctaccatatctgttttctttccctgtttgtttgtttgtttgttttaattataagccatgaaggtggggagggattatcctgtgattagttctcttagtagttagagaaatgacaaaaatacaatgtaacataagatatgaacactttaaaagagtcttaaacataaattactgtaatctcagcagtttgggaggccaaggcaggaggatcagttgaacccaagggttcaagaccagcctggacaacatggtgaaaccccatctctacaaaaaatacaaaaattagccaggcgtggtggtgcacgcctatagtcccagctttctcaggaggctgagatgggaggatcactggagcccaggaggtccaggctgcagtgagctatgatcacatgccttcactccagcctgggtgacagagcgagacactgactcaaaacaaaatacataaattaatttgtttaattcatgattagttactattggtagggagtagggatgattattagagcccttttatagctattttaaaataaaactaggccaggcgtggtggctcatgcctgtaatcccggcactttgggaggccgaggcgggcagatcacctgagtttagaagttcaagaccagcctggccaacatagtgaaaccctgtctctactacaaatacaaaaattagctggtgtggtggcacatgcctataatcccagctactggggaggctgaggcaggagaatcacttgagcctgggagtggaggttgcagtaagccgagattgtgccattgcactccagcctgggcgacagagcaagattccatctcaaaaaaacaaaaacaaaaaaacctaaaatatatgaggaaaaggtatacaggaaaaataatttgctttatttagtataaaaagaagaaaggatttctgtattatctgttatatgaggtttttcttatttttaacataaaaattagcagaatatgcaagtagttaaaatagagatcagaaattggtactgagtcctaggaatccctcaaggaaggtgaagcaggaatgaatcagatgcatttttattacctgaagcttattagtgattaaccttgtttgtcagcttttatattttgaaaggaaatcttttacagttaaaatatttacctttcttgttcttttctactcccatatgaaaaagtaattttttttctgtatgatatggtgtagctttcatcctatagtgtgttcaagatgctcatattcaaatgtaaatgtacatttaaaaggtagtgatttttcaacaagggtgccaagaccattcagtgggagaaagaacagtcttttcaacaaatggtgttggaaaagctagatatccacatgtaaaagaatgaaattgggtccttatcttacaccatctgcaaaaattaactcaaaatggatcaaagacctaaatgcaagatctaaaccttgcattagaaaccttcccataagaatatggaggaaggccgggcacagtggctcacacctgtaatgccagcactttgggaggccgaggcgggcggatcacctgaggttaggaattcaagaccagccctgaccaatatggtgaaaccccgtctctactaaaaaaaaaaaaaaaaaaaaaaattagctgggcatggtggcgcatgcctataatcccagctacttgggaggtggaggcaggagaatcgcttgaacccgggaggcagaagttgcagtgagccaagatcacaccattgcactccagcctaggcaacaagaacgaaactatgtctcaaaaaaaagaaaaaagaaaagataaagaatatggaggaaaggcttcatgacattggattttgcagtggtttcttggcatgacatcaaaagtacaggcaacaaaagtaaaacaattaaacataaattactgtacatcataaattaaacataaattagaatacatcaaaattaaaaacttttgtgcatcaaacagtaacagaatgaaaggcagcctatggaatgggagaaaaatgtttgcaaatcttatatctgataagggattaatacccagaatacacaaacaactcctataactcaacaaaaacaacaaaatagcccaatttaaaaatgggtaaaggaccagttgcagtggccatacctgtaatcccagcattttgggagacctaggtgggagggtcacttagacgccaggagttcaagaccagtctgggcaacatagcgataccctgtctctaaaaactttttaaaaactgggcaaagggcttgaaatttctccaaagaagatataaaaatggacaacaagcatatgaaaagatgttcaacatcactaatcattagggaaatgcaagtcaaaaccacagtgaagtattaccctcataccggttagaatgggtactgttaaaaaaagagaaaacaacaagtgttgatgaggatgtagagaaattggaacccttatgcgctgttggtgggaatgtaaaatagtgcagctgctgtggaaaacggtatggaagttcctcaaaaaattaaaaatagagttaccatgttgatctagcagttctacttgtgggcatataaccaacagaattgaaagcagggtcttgaagagatatttgtacactcatgtttgtagcagcattattaacagcaaccaaaaggtggaagcaactcaagtgtccttcaatagatgaatagataaacaaaatgtgatataaacgtacagtggaatatttacgttttaaagaaaaattctggcagatgctacaacatggacgaaccttgagggcattatactaagtgaagtaatccagtgacaaaaagaaaagtactgtctgattccacttatatgagttatctatccagagtagtcaaattcataaaaacaaagtagaatagaagttgccaaagattagggaaggaggaaatgcttaatgggtataaaattttagttttgcaagatgaaaaagttctggagattggttgcacaacaatgtgaatatacttaaaaatagtgaactgtgcactttaaaatagctaagatggtaaatgcttttttttatccccccacaattaagcgttttttttaaaactcaaggagaaaacattatgtagtcagaatgttctgaagtggtcactatagtctttactataaatgaaactgttaagtgattaaaatgttgtatcttaaaatatgttatataatttttttaaaccagaaaaaagtgtaacattacagaaggaagaaaaagtataatgcattgcttttatactgggctttgtatgcttttaaactttttcacctgcctatagttacatacgtataaaaagcatttaaatttagtaatagctatattatacatttgtatacatatatattcttgttttatattttattacaaatggaataagactcctgaaattgataaattgtgtataagctagtaaaactgaagtccagatcaagtgtaagaataaattgacgtggccaggcacggtggctcacgcctgtaatcccagcactttgggaggctgaggcaggcggatcacgaggtcaggagatcgagaccatcctggctaacacgatgaaactccatctctactaaaaatacaaaaaattagccaggagtggtggctagcgcctgtagtcccagctactcgggaggctgaggcaggagaatggcgtgaacccgggaggcggagcttgcggtgagcagagatagcgccactgcaccccagcctgggcgacagagcgagactccatctcaaaaataaataaataaataaataaataaattgacattatgtattcttggtgtgtttttttttgagacggagtcttgctctgtcgcccaggctggagtgcagtggcgcaatctcggctcactgaaagctccgcctcccgggttcacgccattctcctgcctcagcctcccgagtagctgggactacaggcactcaccaccacgcccggctaattttttgtatttttagtagagacgggatttcaccgtgttagccaggatggtctcaatcctctgacctcgtgatctgcccacctcatcctcccaaagtgctgagattacaggcgtgagccactgcaccggcctattcttggtgtatgttacctatgactgagatcctgaagatgaagaatctttaaaatgtttatgctttgggggttgggcatggtgactcacacctgtaatcccagcacttcgggaggccgaggtgggcagaccacttgaggtcaggagtttgagaccagcctgaccaacgtggtgaaaccctgtctctaccaaaaaatacaaaaattacctaagcgtagtggcacgtgcctgtaatcccagctacttgggagtctgaggcacgagaattgcttgaacccaggaggcagaggttgcaatgagccaagatcgtgccactgcactccagcctgggcaacaaagtgagaccgtgtctcaaaaagaagaaaatatttatgtttttggtccagtaattctacatctaggaatttaacctaaggaaatgtgtagaagcttgcttaaccctctccagactaattgatgctctccattctgtttgcatatatactgagtgatacaactggtttcttgttctgtggtgtggtctcacacattgctcccgtcagtgagtgggccttgtcagtgccctgcagccacagaccactaggaacacacctatagttgaacacgttggttcattacttgtgagggaggatgcacaccatgcgaactgtggagtatctcagtaagagtgttaggaggaatattttataggacttgtgcttgtattaggtgattttggggagtttaagaaagcagagctttctcgattggatgctgttaggatgtggggtgattgatgtttgggtatcttaataaatcttattaggacgtgggccaactagagtagagtgagaccaaagctagaactggtagagaagcagcagtcactcatattagccaggagagggggatgtttggtattttgtgaaaatgctcagtgaccttgtttttttcctctgggcttagacaaaaaaaaatttttttttcttttttgaaatggagctggggtgcagtggcgtgatctcagctcactgcaacctccagctcccaggttcaagcaattcttctgcctcagcctcccaagtagctgggattacaggcgtgagccaccgtgcccggccagacaaaattttgaagtatttttgttttgtctcacttgaacacagtctcagagtgaccttgtctcatgttgatattttgcgagattgtttatgtcccacaggagaataatatggcctccctatgatccctaggccagcttcaaacagcactgaggtccagctgtaagtgttcaagcagtttccagacgttggggaggctttttctttctcaaactcttgttaagaatcagttgaagccaggtgcctgtagtctcagccactcagaagctgaggtgggaggatcacttgagccaggagtttgagtccagcctgagcaacatagcaagaccctgtctcttaaaaaggaaaaaaactgggctgatgcaatggctcacacctgtaatcccagcactctggaaagctgaagcagaagtatcacttgaggctaggagttcaagaccgacctgggcaatgtagcaagactccatatctacagaaaatcatggtggtattcacctgtagtcctagctactagggaggcagaggcaggagattctcttgagcccaggagctcaagaccagcctgggcaacatggtgagactgtctacaaaaaaaaaaaaaagaagaagaaaagaaaattagcccaatgtggtggtacatgtctgtggtcccagctacttgggaggctaaggtgggaggaccgcttgagcctgggaggttgaggctgcagtaagctatactcacatcattgcactccagtctgtgtgacagagcaagaccctgtctcttaaaaaaaaaaaaagtgatgtagccatttcgtaaagacagttgggcaataactatcaaatttaaaatgcatatcacctttgcacttccaggaatttacattccaaatatacttatgcaaagtaggcaaacatacatggacaagtagtctcattagattactgttggtaatatatgcatcaatagaagattgtagtattatacacccattaagaatgaggtaggtctatttgcatttattatgatgatgatgtctttcctttatcaaatacatattatgtgccgggcaccgtgccatgcatttgatgtgttttatctaataactctttatttatttatttatttttgagacggagtctcgctctttcgcccaggctggagtgcagtggcgctatctcggctcaccgaaagctcctccttctgggttcacgccattctcctgcctcagcctcccgagtagctgggactacaggcgctagccaccacgcctggctaattttttgtatttttagtggagatggggtttcaccgtgtgagccaggatggtttcgatctcctgactttgtgatccgcccgcctcagcctcccaaagtgctgggattacaggcgtgagccaccacgcccggccttatctaataattcttaaaacaactattaatatatggcaagtactgttattatttacattttgcaggtgaggagactaagcacagagattaaataacttgcacaagtttacacagatagtaaagggcaaacttggtattcaaatccaggtattctgaagttagagtatgctgcatttttgacctctaaaatgtacatcctcctttctactgatggagaaagaggatgaagatatataataaatgaaaaagtagtttagaactgaatgtctagtttgctgtcatttgtattttaaatttttttaaaaagtgacagcacacagtaggataccaaagaaacgtaacagttacttataaggagcagatggatggcctttcagctttcactttccatctctttcatgggtgttttaataataggcatgtattacttgatttttttttttttttaagagacagggtctcgctctgtcacctagtctggagtgcagtgacataatcattgctcactgtagcctcttactcctaggctcaagctcttctcctgtcttaacctccaaagtagctggagctacaagcatatgccaccatgccgcactaattttttaaatttttgtagagatggagtttcactatgttgccctggccggtcttaaaactcttgggctcaagtggatgctcctgctttggccttccaaaatgctgagatgagaggtatgagccactattcctggccacttacatatatttttaactgaaataaatgtagctgacattttgaaaagttgtaatatttaatgaagattaagctaaagtcatgaataaaaaatggtttatctatccctgcttacatactgttatgtagggtttcccttgtcctaatatcctaccaccagctcacttcaaattcacttcctctggggttcatctcttatctgatcctacttttgaatacttacatttttgtttttgttttttgagacaggacagggtctccactctgctgcccaggctggagtgcagtggcatgatctcagctcactgcagccttgacctcctggactcaagtagtcctctctcctcagcctgctgagtagctggcaagcaccaccacgcctggctcattttttaaatatatttttttgtggagatggggtttcaccatgttgcctgggctggtctcaaactcctaagctcaagggatctgcccgccttggcctcccaaagtgctgggattacagctgggattacaggcgcgagccaacgtgcccagcccccagatacttaatatttctgattgacagagtacctcatttgtcatttagcctttttttttttttttttggagacagagtcttgctgtgtcgcccaggctggagtgcagtggcatgatctctactcactgcaacctccgcctcccaggttcaagcaattctcctgcctcagcctcctaagtagctgggattacaggcacgcactaccatgcctggctaatttttgtatttttagtagagacggggtttcaccatgttggccaggcttgaattcctggcctcaagtgatccgcctgtcttggcctcccaaagttctgggattacaggcgtgagccaccatgccccaccaaaatgtaatttagccttttaaatggcctaaattttctattgtttccgaaaggacttgatactgcttacagtaagataatgatgcacatcataggaactataaacattgagattacaattatatagcctaatatagttctacaattgagcagtaaatttaacttagtttcctggaagtaggcaaaaaataaaatattttaagttctgtagttgtggtttgacaaaaagacacatatgtttttgtttaaaggaacatttttctgattctaaattttgagaagaaatgtgtttcatggacccttttatgcaatttatcctgttctggttacttcttgttttgttgttttttttgtctacccaactaaattataagcttccttaggacacactctatttttcaatactatttttgttctatctctgcctagaaaatttgcgcttattatagttgaaatgataaattaggcaacaattgcaacatagccatatttcatggataatgttaccaccagttttcaaagacttaatttttgagtagtttaggaatttatattactttcatccctttcagcagggaatcctttttgagacagggtctcactctgtcacccaggctagagtgcagtggcataatcatgactcactgaagcctcaatctcctgggctcccaggcttaagctgtcctcccaccacagcctccggagtagctgggactacaggtgtgcaccatacccagctgtgttctttggttctttggggtgttttttttttttttttagagatgaggtcttgctgtgttgcccaggctggtgtcaaattcctggactcaagcagtcctcccacctcagcctcccaaagtgctgggccgatcaacagggaatcttttgtgatagccttcaaaaaaaataatttatttatttgtatgtagcactctgtcatcttgtagcccatactttctagctgagtatgtagtatgaaaaactggaaattagaactttggttttatgaaagttaaatctttttaaatagggcttatagctttcaactaccttttcctttcccttaggccaagtcatcaaggcatgggacattggggtggctaccatgaagaaaggagagatatgccatttactgtgcaaaccagaatatgcatatggctcggctggcagtctccctaaaattccctcgaatgcaactctcttttttgaggcaagtatgtgtgtgatgttgccttgtcagcatctgctctacaataggaatggctttgaagcaacaggcagtgggaaaaggagctaagcttgctatagagaatcagatccaacttacttattttggagcatggcttcttgaattgtttcccacaaacccaagggtgcgcgtgccagtgctttcttagaaacgtgtttctagcacaaaaaggtcatatccaaataaacaaaagacgctacacttagaaataaagattctggtccatggtgtgagtgtgacatactcaaaattgaccagagtacaggatggaaatgttggcgataaatgttgaaatatgcctatgtcacgttgcggggtatttacatattataaaaatttatgtgtcacagatctcacttctctagaagccgttggtggtgataaaacattattcatcctatgttgaattacatatatttggcaaaacttgatttttaagaaccaccccagctaggtaaaatacacctttaatcagtcgtaggtcacatccatgagatttattcttacattttgagaagggaactccataaacccaggatgggaaagttgtggcctcaaacaaaatagttctacaccagcaccttgtagctctggctttttgcccacagggtagttttcctagtatttcctatctttgcactgcagtcccttaggatatagttctagacattagcattacatgaaattctttccaagtatggaaaagtatagtgggtttttttttttttgctacttttccaataattaagatgcataaatgaatgtatatattttaaaacagctttattttgtaaaatgaaataattggttgcccttgccttcacatatgttcagttggctttatttggtcttttctcagctgaattccttttttctttctagattgagctccttgatttcaaaggagaggatttatttgaagatggaggcattatccggagaaccaaacggaaaggagagggatattcaaatccaaacgaaggagcaacagtagaaagtaagtattaaagtaagagggaactagtccttaaaagttgggccatttatgtggacgaaatggagacttaaaaaaaaatgtttgtagaaatgaatatatcggctgtgcgcagtgactcacgcctgtaatcccagcactttgggaggtcgaggcgggtggattgcctgagctcaggagtttgagaccagcctggccagcatggcgaaaccccatctctactaaaaatacaaaaaactagccaggtgtggtggtgcacgcctgtattcccagctactcgggaggctgaggcatgagaatcacttgaacccgggaggcaggggttgcagtgagtcgagatggtgctactgcactccagcctggatgacaaagcaagactctgtctcaaaaaaaaagtattgaatatatctcaaagatagtcttagctgggcacagtggctcatgcctgtaattccagcactttgggaggccgaggcaggaggatctcttgagcttaggaattcgagaccagccaggacagcatagtgaggccccatctctactaaaaagcatcaagagaattagtcaagtgtggtgtcacgtccctgtagtcccagctacttgggaggctgaggtggaagaatcacttgagctctggagatgaatgctacagcagagagccgtgattgtgccattgtgcttcagcctggacaacagcaagattctgtccaaaaaaaaaatagtttcaggttcaacatttatttaataattttatttagtaaatattaattcaacatctacgtgtcaggcatgctaccagcctctacaaactcaaaaatgaatacaaagtaattccatccacaagaaattctcaatctgtggactctctggtgtgccaacaactatattagttgcctgatatgtttgttcatttatttctcacaaccttaagaggtaaaatttcttgtccccagatgagaaaagttaattcagagatgttaaataaattgcccagggttacagagttactaaacagagcagtagattataatcccttttaggactcaaatacatctcatcagctgtcatcaagattaaaaaatagttcatcatttagatcaatattggataataatgttcattctattccatatcaggagacctaggttcaagtcctgctttggtgtttattgagtaacctgaagctattccgtttcttcatttgctaagtgggagtaggggcagctctgaggactgagatagctaactcttcttccctcccagagcaaattatatgtaccactgtgtatactacttgtcactttacattgtaatcagtatttgcccatttctcccagtatactttgagtgcttgaggaccagaatctttcttcatccttttgtgttcagcatttcctgcagtgcgtgacacacatttggtgttcagtaaaggctttctgcatggataagtgcttgagaagtgtcattagtgagctgaaatccttcaaaagagagttgtgagaaaacagagaaatacttccattaagaacaaaaatcaaatcattcaacaaggatgggaacatgaactattattataaaaggtctgtttaaaataattatttcaaaagccaggtgtaatggtgtgcacctgtagtcccagctacttgggaggctgagataggaggatcactagaggccaggagttcgaggctatagcgtgctatggttacaccagtgaatagccagtgcactctagcctaggtaccatagtgagaccttgtctccttaaaaaaaaaaagtaaagagttcatttaaacagaaaacaagaatagctgagtttctttcttttaaagtatatactattttcaacccatatttcatttctacgagtctggcaaatcagtttaaattctgttgttttgggaagcagttacaaatattatttatcccaaattgccatttgggataagtttttgaatacatgaagagctttaaatgtagaataccagggaaatagctccagactaggagttgggagatagggttccagcctcagccctggcctcaggctggcttcaactagacttcacctctgggcgttagcttccttcctatgcagtgaggcaagcttgaacctcttgatttttaaggtcctactagccctaaaactccatcatagaattctaaatatttacaaaagttgtaggaatgatagaaaatcatcttcactatattagtaagcacttaagcttgtctataatgtgtattttaaatttttcttatgaaaaatttcaaatgtatgtacaaaggtagaggtttactcctatggatacaggcacaccctagattcagtaatttataatatatatttttaaactggagggttttgtcaactaagaggaaaaacttttcccaattatagacaatatcacaaaattaccgctgtggagatgactttagagcagactaaattaaatcagatcttgcttttggtaatacttgcgatgggagtcaatttttttttaactttttgttttgaaataattttagaattacagaaaagttgcaaaactagtatagcgcgttcccttatatgctttacacagcttcctctaaatgttaacatcttacctaatcacagtacatttatcaaaatcaggaagttaacattgatgtagtaccagtaactgttttccagatcttatttgaatttcaccagttactacactactgtcgttttctggtctaagatcaaactcaggatccagcattgtatttactttttttttttttttttttttttttgagatggagtcttgctctgtcatccaggctagagtgcagtgatgctatcgcagctcactgcaacctccacctcctgggttcaagcaattctcctgtctcagcctcccaagtagctgggactataggcgcacgccaccatgcccgactaatttttgtatttttattagagacagggtttctaacatgttggtcaggctggtcctcaagctcctgaccttgggtgatacacccgcctcagcctcccaaaatgctgggattacaggcatgagccaccgcacccagcctactctactattttgaatacaactgaccgttttgtagaatatccctcaatttgggtttctgggatgtttttagattgaggttatgcattttttgaaaataccactgaagtgatgtgcctttcatcattatcaagaggtatatgatattgatgtctcattactggtgatgttaccttcgaacactgggttaaggtgggaaaccatgtttcactactgcaacgttactattttccctttgtaattaaaaagtattaggagtgaagtactatcttgttttgtatcacaactttacacactcattttgacatttgttgatttttgcttgcaacagttattactgtggcatttgactaatggtaaattttctattgctgttattctctctacattaatttgaatcctactgtatatttattcagtttatttatatcattatggatctgtgtatatttattccataagttattattcattactattcttatttattttgttgttcacattgtcccagatttgaccattggaaactcctttaagtttgtttttgtgtcctttcaatattatccccattttttttaagtgcttccttattttctggtaccacaagacactcatggctcatcttaaaattttcctgccctagacctggaaccaaccatttctccaaagagccctgattccttttattggagaaaggcatttagaaaccaagatctgagtgctaggtttgctcctgctatgggatatcatcattcctagacccacttagcagacagagagatagagaatatatggacctcaacatacatacgtatacatctatatgtatttctacatcagcctctgtgtgtgtgtgtgtgtgtgtgtgtgtgtgtgtagttgttgttgttgttgttgttgttgttgtttgcgacagagtctcactctgtcgcccaggctggagtacagtggtgcaatctcagctcgctgcaacttccgcctcccaggttcaagtggttctcctgtctcagtctccggagtagctgggatttacaggtgcctgccaccacgcccagctattttttgtattttcagtagagatgggatttcaccatgttggccaggctggtctcgaactcctgacctcgtgatctgcctgccttggcctcccaaagtgctggaattacaggaatgagccaccgtgcccggccagcctgtatgtatatgttaaaaaccagggatactcactggcagttgcagttccagttccaatccaacaccacaagtttatttgccctttgctcatttgaaactccattctccagaagtgagaaaatgctctcattctccacagcatactcattgctcccatcctagtgtatatgtaagatggttttagaattgctaacctagacccctgtgacaaactgactttaggaaatatttgtttatagtaccttttgtcatcagtcttatagtgtatattcaaaacacttgctttccaactgaggtaacttctttcttcctcacccccttcaatgtgattatgttactcaattgtaacaaattattcatttgttaccctgtatattccattttgggttcctgccatgctctggttaattttaattattcgttttattttggatatgtgaaacattaccatgattttaaactatataaaaaacgatatactcaaaagtgtcatttccccctcatccttattaacctgttcccacttccccattatttccaccctattccagtctcattagttatatcattagatcctggtttttcttcctgtattttattacgttttatgtcattttatttttttctgtttctgttaacaaagggagccagtcgtggtggctcacacctgtaatcccagcactttgggaggctgaggcaggaggatggcttgacctcaggaatttgagaccatcctgagcaacatagagaccttgtctctgcaaaaagtttaacatttagccacatgtgatggcacatgcctctagtcccagctacccagaagactgaggtaggaggatctcttgagcccaggagttcaaggctgcagagagttgtgatcatgccactgtactccagcctgggcaacagaacaaggctctgtctcagtttgaaaaaaagagagaaagaacaaaagaaagggcaatgactaatcttttgtctttcatcttgttagaatgtactttcctgggaaattttagattaaatggttgattttactttttcactcaaaagaccgtcttggttttctggaacaaatctatttcatagaaatttattgtgttatactttcatttatcaaggttaaaatgtcctggtttttcctcctttaaacaagttagctatctgggggaggagaaaaaagattaccctaaaggtggtcctgttcaaaaccaagatcaccttgttctttttgaaatcttctcagtctttactggtttgccttttctttatagcatcaccaaatacacttagatgtgaaaccagatataaaacctggaactaggccaggtgcggtggctcacgcctgtaatcccagcactttgggaggccgaggtgggcagatcacgtgaggtcaggaatttgagaccagtctggccaacatggcaaaaccccatctctactaaaaatacaaacaattagctgggagtggttgtgggcacctgtaatcccagctacttgggagggtgaggcaggagaattgcttgatcctgggaggtggaggttgcagtgagcagagattacgccactacactccagcctgggtgacagagggaaactccgtctcaaaaaaataaataaataaaataaataaaacctggaactaaagccggctatagagtgaacaagaacaatagacactgatcacccattacaatatgttgttatagatacgtgatttactaaatttctgtcatttctgtgtaaagagacaatgaagtggtatggaggaggggacagatagactttgtaagtgatggacttgatttttgaatcttggaattgctacctgatacttttatgactttagacaagttacttaactacgtggagcattcagtttttttaatctgtcaaatgggaatagttttcactcccacaggttgtgtgacagtgataacggtttggctgtgtgcctacccaaatctcgtcttgaattgtagttcccacaatccccacgtgtcgtgggaaggacccactgggaggtaactgaatcgggggggcattttctcccatgctgttctcatgatagagtgagttgtcacgagatctgatggttttataagggtctggcagggaaaccctgctggctcttccctcttctgccgccatgtgaagaagggtgtgtttgcttccccttctgccatgattgtaagtttcctgaggcttccccagccatgtgaaactgtaagtcaattaaacctcttttctttataaattacccagtctcaggcagttcttcatggcagcgtgagaatggactaatacaaacagttacaaagaagagtgtcagacatttagtggacacttaatttcttctaccctatatattgtgtttcactaatttgttttgcttccttttaattgatctaaggaaaaagatccttgactcctctttttctttttctgttgcccaagctggagtgcagtgggccaggctggagtgcaatggcgcatcttagctcactgcaactgctgccttccgggttcaggtgattctcccacctcatcctcccaagtagctaggactacaggcacgtgccaccacacccagctaatttttgtatttttagcaaagacggggtttcgtcatgttagccagactggtcttgaactcctgacctcaggtgatccacctaccttggcctccctaagtgctgggattacaggcgtgagccactgtgcctggctgactcctctttttcttatctcctacatgtcatccatcagcaaatcctcttggctctacctaccatggttattagagacctaaaattgtctctaataacagtcttcaaattaatgatatatcttaatagtaatcttatctaaatcacatttctcaaggttccggggaaagaataacattatggactcaaaaaggtttttactgaattgtaaacttttacttccttttcataatttgtctctgtgtggaagagaaaacttaggttagtttgatgggatttattctttctcaaggaaattttgatttttactctttatatgaggatcctaatggttacaaatcagtttttagaatctgtccccctacgctttttcttgtgtcagttaagatgaccatcttgtaatttttattcaaagtttttctttcatttaaaaagttactgtgttctaaggtactctaattgatatgattatgatgactgatacttcagtctttaagtttaattgcaggtcttggctacattgctacttttcagctttgctttcttagaaaatcaaatctgacttacataaggttctaaatagctaccagttactcttcccccatcccccagtctctcacatcgtctgatttgtcaactttagtggttggaagaggcccatcaaaatgctggctgtatgtggttctctcgcctctcagtactttcagccacatttgaatgcaaagaatgcagacagtcagcagtatttttaaatgtgaaattttcaacagagtgttctacaggttccagttgttggcgtacctcctttccctctccaaatctcactgaaatgatagatggagggaacaaagattttcaaaagaagaagaagagatcaataatagtgctggaaaggagaggaatgtaagagtggatcagaaattatggagaatttctggaatatgtaaagttgatgaagttgaaccaatggaaactagtctcagcaaatccaacccgagacaggtgtaaagaggacttaagcagaggtacacactgttcttctcaacaggcttaggcggaactccaagctcatggtcatctggtgtgagggagcccaagcaggctatgcagcaatcatcagggttgttataaaacaagatggaacagcggggccagtaaacctccagtgcagtagttctcaacttttcctgaatttagaattacctagggagcttttaaaaattctgacacccagaccagttaaataagaatctcacatctcagaagatggaactccaggcacaagtatttttttttaaactcccagattattctagtttgcaggcaaggactgaaaactactagactacggtctgactgtgactttttctcccaagctaaaaccagtaaggccaggttctaaaataaaatagaaaaataataaaataaatttaaaaataaataataaaacaaaatgtgcctcaaaagactccaagtgttaggacttcgactagggaaaatgaatgtattttttgaaacttttttttttttttttttttttttgagacggagtcttgctctgtcactcaggctatagtgcagtggcgcggtcttggctcactgcaagctccgcctctcgggttcacgccattctcctgcctcagcctcctgagtagctgggactacaggcacctgccaccacgcccagctgattttttttgtatttttagtagagacggggtttcaccgtgttagccaggatggtctcgatctcctgacctcgtgatccacctgcctcagcctcccaaagtgctgagattataggtgtgaaccaccacgcccggccttttttgaacttttaaaacaaatttaaaggggaaaaaagtgtaaagacagcttttcacagtaaataatactaaagtgttctgctcctaaagtcaactttcctgtgcccatcatgcccagctcatagtaaatgcttaataaatatttgtgaaatcttcacccttagatccccgcaatcagcccatccttttgcagaaaggcctgccatggaaacatatccaactgcttagaaaaatggtgccagctaactatagtcatttgatcatccagaatccttcctttataatacggccagacagcaaagaatcatcagcaaatatcacgaaaaaagcagcactaaaatggactaacagaagaagtagaagagaaccttaaaaatactaattattgtcttcagaaattgttaacaggacatcagattcataagtcaaaaagccaacttccctgaaaaaggaaagggaggacaagaaagtttctggaagttagagcatgattaatcaaaactgaaactcagaggaagggttgaagagcaaaatggacagtccctgaaatcaggtgatctgaaagatagccaaggatttctcagaacacaagaaaaaagagggatgaaaagtgaaaaagaaattagaagatatggataataaatccaggagaggtaatatgcatccaatcaaacatctaatagaaaatttcctacagggaataaaagaaaaagattcttaagatcgaaagggccagttgatagtggtacccaggaggaaggagtggtttttcacccagatatatcctggtgaaatttctgaattctgcagcttacaagaaaattctgaactcttccagggaagaacaagctatgtacaaaggaataagaatcttattcattacactaaagacaatgcttttgatcattgtctatagctatgtgtattttgaacctagaattccgtactcagcccaactgtcatttatgtatgagaacaaaattaactttttggaatttgcagactcatattcttttcgaaaaaaatactgtgggatgtaccaaaacaaaaaaataagtcaagaagcaacaactcaaggcataagaaacagtagcgagaaaaaaaaaataatttccatattggatacatttatcctgaaagatctctgaagcagtagagctgtaatgttagaagtaatattaataatgaaacagtctggcctgggcacagtggcccacacctgtaatccctacactttgggagggcgtcacttgaggccaggagttcaagaccagcctggccaacatggcaaaaccccatctctagtaaaaatacaagatttagccaggcatgatggcacatgcctataatcccagctactcaagaggctgaggcaggagaatcacttgaacccaggagacagaggtggcagtgagccaagattgtaccactgcctaggtgacagagggagactctgtgtcaaaataataataataataataaaacaataataacagtctggattctgggttattttaacaaaaggtggtgaggataggaaatgaagaggggaaggcaaaattgtctaagattattttcttttttaaaacattttttggagatgaggtcttgctctgttgcccaggctggcatgcagtggcacagttgtggctcactgcagcctcaaattcctgccctcaagccatcctcccacctcagccaccggagtagctggaactgcaggtgcacacccagctaactttttttatccttttagagacggggtcttgctatattgctcaagctggtcttgaactccagggcataagcgatcagcctgcttcagcctcccaagtagttgagattacaggctcgtgtactaccacaaccagctgccttaatttcttgttccaggggagattatgctgattaattcttttattttaagattcaggggggacatgtgccagtttggtacatggatatattgtctgtaatgccgaggtttgggcttctattgaacccatcatccagatagtgaacatagaatatagcccttgtacccctccatccttttttgcttttggagtccccagtgtctcttgtcctcatctttatgtctgtgtatactcagggtttagctcctacttataagtgagaacatgcagtatttggttttctgtttctgtgttaattcacttaggttactggcctccagctgcatctgtgttgctgtaggggacatcctttcattcttttttatggctgcatagtatttcatggtatatatgtaccacattttctttttttttttttatttcaagtctgtcaagctattctttatttcggagagagggcagggcagagtgctcagtccttggcagcggcttttgtcatggtggccaggacattgctcagctcctcctgcttcctcttggtgcatccccacccttgtcttgatgaacttgagggcccatttgtccttggagaccttcagtaactccatggtgcaccgctcgtatggggtgaagccacacagctctcagatcatgtccggcacgaacttggtatatttggtcaggtgcctgcagcagtggctgtgcctgggcgtcctcatgttctcggtcaccttgtggcccttgttgaggcccatggccatagggcagcacagagccatggccgctgctctccaatggtggccgtggcagaaggaagcccacatttttatccaatccaccattgatggacacctaggttgactccgtgtctttgctattaagaatataactgtgcttaagagtaagtgctgtgtgtggctcatgcctgtaatcccagcactttgggaggccaaggtgggatggtcacttgagcccaggagtttaagaccaaactgggcaacatagtaagaccccatttctacagaaaaaaaaaaaaggccaagcatggtggtgcatgcctgtagtgccggctactcaggaggctgtagtgggaggatcatttgagtcacatttataccactgcagtctaacctgggcaacaaagcgagaccctgtctcaaaacaaaacaggctgggcgtggtggcacatgcctgtaatcctagcactttgggaggctgaggtgggtggatcatttgaggtcaggagttcaagaccagcctggccaacatggtgaaaccctgcctctactaaaaatacaaaaattagctgggtgtggtggtgggcgcctgtagtcccagctacttgggaggctgaggcagaattgcttgaacctgggaggtggaggttgtagtcagctgagattctgccactgcagtccagcctgggcaacagagtgagactctgtctcaaaaaacaaacaaacacacaaacaatgctgcagtaaacatgtcagtgtaaatgccagctatctttctgatagaacgatttattttcctttggttgtatacccagtaatgggattgctgggtcaaatggtactttgatttttagttcttcgagaaatttccaaaactgctttccacaggagctgaactaatttccattctcatcaacactgtttaagcattcccttttctccacaaccttgccaacatctgttcttttttgactttttttttttttttttttttttttttttttttttttgagacggagtctcattctgttgcccaggctggagtgcagtggcgcgatcttggctcactgcaactcccgcctcccaggttcacgccattctcctgcctcagcctcccgagtagctgggactacaggcgcccaccaccacgcccggctaattttttaaaatatttttagtggagacggggtttcaccgtgttagacaggatggtctcgatctcctgacctcatgatctgcctgcctcggcctcccaaagtgctgggattaaaggcatgagtcacagcgcccggccttgactttttattaatagtcattctgactcagttgtgagatggtatctcattgtggttttgatttgcatttctctgatgattagtgatgttcggcattttttcatgttcgttggctgcttcttcgtgtcctttgcctactttttaatggggctatttgcttttttcttgttgatttgtttaagttcttttctggatattagtcctttgtcagatgcataatttgcaaatgttttctcccattctgtagtttgtccatctgcttcgttgatagcttattttgctgtgctgaagctctttaattaggtcccaactgtcagtttttctttttgttgcatttgattttggggacttaatcataaattatttgcctaggcaatgtccagaagagtattttctagcttttcttctaggatttatatagtttcaggccttacatttaagcctttaatccatcttgagtttgtttttgtatatggtgagaggtagacgtctggtttcctatttggatgccttttatttctttctcttgcctgattgctcaggctaggacttgccgcatactgattgctgtggctcagtaccatgctgaataggagttgttaagagtggacaccctgtttttttccagttcttaggcggaatgcttccaacttttgcccgttcagtatgatattgacggctgggtgcagtggttcacacctgtaatcccaagactttggaaggccgaggcaggaggattgcatgagcctaggagttcaagaccagcctgggcagcatagtgaaaccttgtctctactaaaaataaaaaaaattagccacacatagtggcatgcacctgtagtcccagcttacttgggaggctgatgcaggaggatcacttgagcctgggtgatacaggcttcggtgagttatggttgcaccactgcactccagcctgggcaatggaataagaccttgtctcaaaaaaaaaaaaaaaaaaaaaaaaaaaaaagatattgtcataggtggctcttattattttgaagtatgttcctttgatgcttagtttattgagggttttttataatgaagggatgttggattttattgaatgctttatgctgattgattctgaacattgataaagaggtatatatatatatctttaaatgatttgttcagactttaatggaaagtactagtaagaatagcatgtagaatttccaaatcaccccatgtggagtggggaaatagaggaacaaggaaaacttcatcaattgagcaaaaattgttttaaaaaataagaaaacacgggccgggcacggtggctcacgcctgtaatcccagcactttgggaggccgaggcacgtggatcacgaggtcaggaatcgagaccatcctggctaacatggtgaaaccccatctctactaaaaatacaaaaaattagctgggcatggtggcgggcgcctgtagtcccagctacttgggaggcaggagaatggcgtgaacccgggaggtggaggttgtagtgagccgagatcacaccactgcactccagcctgggcaacagagcgagactccatctcaaaaaaaaaaagaaaacactgtgtagaaaaccaaagacaagaataaaaccactcatatcagtgattacaaaaaatatgaatgggataaagtcacctattaaaggcaaaaggtctcataaagtgagaacaacaacagtatctagctatgtgttctttataaatgaaacactaaaatcaaaaaggtaccaaaaattgaaaatagaggaaagattacgtctgcccatattgagatctgatggagctgtgagactttacatttttgtttttcatatgcttttgaagtatttatgaatgtcctgggatataagtctaggaataggagcaaattcttgaaaccattttattatatgttttcacaaaataatgtaatatggtacttggtctaaagtggccagtgtttattctttcaaatattttggatttatataatttctttcttccaaaaagttatcttcaagtcttcaggtagaataaaatcatagtagaaaataagtctttctggccagccatggtggctcacgcttgtaatcccaacacttcgggaagccaaggtgggagggttgcttgaggccaggagtacaagaccagcctggcaacatggtgagaccccattcttaacaacaacaacaacaaaatagccaggcgtggtggtgtgtgcctgtagtcccagctactagggaggctgaggaaggagagtagcttgagtccaggagtgtgaggctgcagtgagccatgatcacaccactgcactccaggctgggcaacaaagtgagacccccaactcaaaacaaaaacaataaagaggccgggcacggtggctcacacctgtaatcccagcactctgggaggccaaggctggaggatcacttgaggtcgggagttcaagaccagcctggccaacatggcgaaaccccatctctactaaaaacacaaaaattagctgggcatggtggtgcgggcctgtagtcccagctacttgggagtctgaggcacaagaagtccttgaactcgggaggcagatggttgcagtaagtgaaggttgtagtgaggcaagatcacgccactacactccagcctgggcaacagaacgagactctgtctcaaaaaaagaaagaaaacagtcttttgttgctgctgctgctgttgttgttgttacaaaaaaaaaaaaaattccagccaattggccatttattttagaatagtattaaaaaacaaagtttccatatcaatataaaatttgtatagcttcctagaatttattaaaataggaatactaatagattcaaaaaggaaaatttgtataaattagtgaaaattaccaccctgtccttaatgccctattttaagattagtcattaaataaatatttacttgctggccctgaactctgtgctgggtactgtgaggcacaaaagaagtacaagatactgcctttgcctactaagaattttattcatactttgacagctttctgtgttgaaccagtaaatgttttcttacacagagctctaaaacatgtttaatctggtataatttaccactaggcacaggaaaataattatagctaacattcctttagtttgtctctgtatatccacacttaacaacagcattttcacatgatagacaccctgacatatgaatgaatgaatgaatgaatatcaggtgctagattaaaagctctaattcagtatctaatttaatcctctcaacaattatcatttagctagtgtattatccacattctatcagtgaagaaactgagcttcagatcactttaattaccttgcccaaagtcataattgaagtggcagaatgggactggaatccaggtctaactcaagtgctatagtggtgtgaagggaagactggtaagggttggtgttcatggagaatttgttgctgggtgtatacttcttgtttagatttcctgttttgaaaacattcaaacttgatcaaccaaaagaaatcatttgcataaatgttattcagttccaggagccaggttccacgcctgttagcatctgtccgtcagttctgtaagcaatcttacagtggtgtgtgttcatcctaagtagtacaaaacagtgcagaggaggaaggcggacagcttaggggaaatctgaccaccatgcgtgttggaagtatttctcttgttctcctgcttttagaaagccatctctgcttgctttttcagggggttattaagatcctactctcttggatactgtgctctattaggcaggagacacaggcagaaagaagctcacttggcatgaattaggcaacagagaaaactcttgctcagtgggagtaacctgtcacaacctggttttctctggccagataaccagtcttgtcgagtagtaatgccattacaacattcccattcagatcctcatgacccagtaattgttttgagaatgagtgcaaagctatcagacaccaactactataattagaaaagggaaaaatagacacttaccagagctaatgtctttaggctggagcatttacagctttttgttttttgttttttaagttatggagcctctttctcagttttgcttcctaaaatacaaattgcatggtttaggggttcttgcatttcatttttgttactgctgtgcactctctttccttttttcccccctattttaatcggagtacaaattgctgtcagcacatcgagttcatgtgccagccacattcagaacagggtgttctgtgctcttcaaaacaaaattgctctagggcagtaagagaacaataagtcagagctccagtttaagtgatgttttgcagctcgcttgatgtggttacactccgattgcgcagctaagcttgggtaatttggtttggtttgactttgtggggatttggaggacctccctccccctttaagttacatagtctttaagtcaagaaaaaaatgttgtctctttttaacttgtttatttctttctctaccaaaaaagccctaagtagaagcatcctgtatgtacttttattctctttgggcatgtcatagatgatttacttcccgtaaatcatgctggttgggattagcaacagacctcctgagccctacaggctgcactcccagtgagtcacgatggttattattaaatatttattaagttagtatttgcactaaaagatgccaggtcaaaaagcaaccacagggcttccacagccagagctgccatggtttttgttctgttttgttttggtaggaatttttaagataacattaaaaagaataagtggagctataggagctaggctcatctgcatctgttaccgcaatcagggcccctactgtggcaatcagcagtctttccgtggctccaagtggtgtgtgagttcttgtcagcagtctcgtagaacttttcacatcagtgttccaagtttagaaaccagttaacccagcaatgccctttgctacttgtagatgtagagaatcaatgggctgtattcaccatgaggctgtgatacctccttttactctgacattccgaatgttgtcagtattacaaggcgatggttttggttttttatataaactggggtgtatatgtctggatgtatatccgtttaagattttatagtactgcagggtccaattgtgaagggttagatttaccaggaaaaaaaagattagtccacatgtaaagtagaaaatatttataagagctatcacaaatgtttactgtcctattacagcatcagacactagttctgtcatttattgtctctctgagaagactagctacaatgaatgttttgctttcttaattatgcctttgttacagtttgacttttttttggcatggttacttcatttatctttcccaacatgtttattagtagccaatctttttccctcactaatgatgggttatcacatctaaagagaacttctgaaattactcatttaattttaatatcaagtacatacatcaagctgaaaaacagcctaggaaactaacgcacaggcaggaatccttgcagagtctctggatttcctgttttgaaaacattcaaacttgatcaaccaaaagccacaacaaatgtactgataatttcctcccccactaaatgtactctccttaagggaggaagatgatacttccaacaataaacttcagacaaaaaaaatctgttaactaagttgtgagctactaggacaataaatctctatacttgagacattccacaatacatgagaaatttactttgctcagcaaatctttttttttttttatgaaaagtgttattagtctaaatttcttgggcagagttttaaatatttagaaatgcaaactttttagaactcttaacctccttagaaatatcaatttttactccagtaaaaatatctttttttttttgagacggtctcactctgtcacccaggctagattacagtgccgcaataacaactcactgcagcctggaactcctaggttcaagcaatcctcccacctcagcctctcgagtagctgggacttataggtgtgcgtcaccaccctcagcgaattcagtaaaaatatcttaagcctcagactccctgtagaacctctctagtatgcatgtacagtcatatgctgcataacattttgtttaacagcagattgcacataggacagtggtcccgtgagattataattccatatctttaccttctcaatgtttagatacacaagtacttaccattgtgttacagttgcctacaatattcagtacaataacatgctatacagatttatagcctaggagcaatatgctataccacttagccgaggttatagtaggctgttccatctagatttgtgtaagaacattctaagatgttcccacagtgatgagaatacctgatgacacatctctcagaatgtatccccatccttaagtgaagcatgactgtatttgaaaaagtttaaatttgaatttattttttaaatgttttccaattcagaatgaactttcaatttgctacaagttaattttatctagagcattctaaaagtaagtctaacagaaggaattatcagcatttatgagtgtgggacataaactaaaatgccatatgcgagctctaccaagccactccaactctagcccttgtttggaggagctgactcaagagttaggccctttctagtttggcccaagtttcttagaccccattctgtgtctgcaaggggaacacatcaagatggtattaatactggtgagttaaaaaagagtagtgagtactcacttcggcagcacatatactaaaattggaacaatacagagaagatttagcaaatcgaaaaaagagaagaaaagggtagaacgctttagagcataaatgtccaggggacatttcggcccctagtgtctacaccatttctgttcattcttcagtttttctcatttctcaggcctgggctaggggtaattcaattaaattattaactgcaggaattagatttgaagctggtttctggactatactgatattgagagtgatattaccaggtcatagaatcatagaattttagagcttcattgagatcatgtagttcaaaagtagaataagttagatttgaatttttatttggaaggtaatagttgttttattgggcatggaatgagtataacagaacgagtgatttttagtctctctacaagttgttgatctaaagtagatcagccagtgttagaaaagaagcattttaggaaatctctagatttgaatataggctattatgttacagaagtaggaataaaggattttctttcttttttatttttatttatttatttttttatttattttgagatggagtctccctctgttgcccaggctggaggctggagtgcagtagcgcaatctcagttcactgcaacctccgcctcccaggctcaagtgattcttgtgcctcagcccaagtagctgggattacaggcacgtgccaccacacctggctattttttgtatttttagtaaagatggggttttgccatgttggccaggctagtctcaaactcctgacctcaggtgatccacccgcctcggcctcccaaagtgtgggattacaggcgtgagcaccgcgcccagtcaggattttcttatgaaatccaaattatcatattgcttggtgactgttatgctgtcataccagccatccatttttcttattacatcaaaaacttaaaatagaatacccttaatattaaaagtagttgtaaagtttcagagaattgtttttcctagaaataaagagtctaggccagacctggtggcgcatacctgtaatcccagcgctttgggaggctgaggcgggtggatcacctgaggtcaggagttcgagaccagcctgggcaacatggtgaaaccctgtctctactaaaaataacaaaattagctgggtgtggtggcacacacctgtaatcccagctacttcggaggctgagacaggagaattgtttgaacccaggaagtggaggctgcagtgagcagatatcacgccactgcactccagcctgggtgagacagagcaagactgcgtctcaaaaaagtctaactcatcaagaaaaaatagatatctgtatgcattttttctattttgtcttaaaatatgagaaaaagcctcttattttaatatgaaattactctgggaaagagcttggtaaattggggtggaacggggaattaggcctcccaaaattgacctcctaatatttcaggggaggttattaagtaatttgatttgtgaagttatagtagactattgattctttcacactttacatttattatttccagtaagggatatagctaagatagttattgatgttgttgtctttggatttaccatttttattcagatatatttgtgaatgagattaggactcttaaagaagaaggagcatctgtattcatttaatctttgtatatcattggagaaatagccatttagttggctttttggcccaagcatctgaagccaagatgcagttacagatgtttatatatttgatattaaatttgtggcatttgataactttattaaataattcagcatctcttgactttgtattataggtgaggaaacttctgtcacatagtaggcttagaataaacctgtgtttctggtttgttacctactaaactgtcttattgatacaaatatcagtaattacaagtttaatttagaaatatggttgctcctaaactttcagactgggtagactaagcttcaccaagacacactgtgtgtgtctcttgatgaaatgagaaaggggaaatggtatttgctacattgtcgaccactcatttatcacttcactgaattagccagtcctaagaagcagctctgttgactctcctgtctccttgccctcagtccacctggaaggccgctgtggtggaaggatgtttgactgcagagatgtggcattcactgtgggcgaaggagaagaccacgacattccaattggaattgacaaagctctggagaaaatgcagcgggaagaacaatgtattttatatcttggaccaaggtaagcagcataccagtttggaacacagtgaagtcacctaaaggacagggatatgcttgctttttcattcagtgttttggcattttcagtgaagttaatccaacaacggaaacaattaaatcaggctgcagttagtcatcacgtaaattaatgggccttacaatatcatagaggtttgtgagcatgtttacttgattgatatatgttcagaacaggtcttacagccactttttgcttttgtgatgatttgttttgcctgcagtattgccaagacaggcagctatggacccctctcatatgtggttctcttaccccctcttcccttttctctaagttaggcaggaggcaggaaaacatgggggttgggagtcaaagaagcatttggatgatttactaccacttgaacttgtgccacttgttcttatacagagtccctgaaaaaaaaagcacattcttcctggatctaaaggcaacagagatgactcattttttgtctaagtttttcccatcataaggatatccattagcactttcaagcttagaaccatcagacactgacagtctctcttgtgaaaacatgtttagtagtatttttagatctaaaattataccatgaatccaactcttctgtcttgagaaacagacccctgagagaacccggggtgttttgattttgtctgcatgagagtgcatctgcttatctagtgtatcctccctccggctccatggatttcagacagtgggattctgagttactgagaatcttgatgacctgcacttgccagtaggtgatgttaagccttttgtggtgtcattttatagactctgtagtaatccaatggcagtttacctttgccccagcacttgatccataatcatatatatatatattttgagatggagtcttgctctgccacccaggctagagtgcagtggcatgatcttggctcactgcaacctctacctctgggttcaagcaattttcctgcctcagcctcccgagtagctggcattacaggcacccgccaccatgcctgtctaatttttgtatttctagtagagacgaggtttcaccattttggccaggctggtctcaaacgcctgacttcaagtgatcctcccgcctcagcctcccaaagtgctgggattacaggtgtgagccaccacgcccagcccataatcatatttttgaggtgatctagccatgcaactaccacttgaaaatccttccaaagtgctctaccttgaactcttcatagccgtcactgaggcaccctttgtataatggcttctttttctctacctggttcctctttccactaactatagcccccacttcaatgtgtcttatttatattaatatttactctatatttgtagtttattcttaggtgaaactaattctgtttctaggagatactccttaaaattcagatagagcatagaaaaagctatctcttccatatccaaataatctctaattacttttttttttttggtaacaggatctcactctgtcgcccaggctagagtgcagtggcacagtcacgctcactgtagcctcaacctccagggctcaggtgatcctcccacttcagtctctagagtagctgggactacaggtgtgtgccaccacacccggctactttttgtattttttgtggagacagggttttgccatgttgcccaggctggtctccaactcctggactcaagtgatccgcctgtctcaccctcccaaagtgctgggattgattacaggcatgagccactgcgccaggccatctctgattacttttaatcagcatttcaaaattacagtagttctaaactcagagaggtggatttatgtgtaatgtatattttcaaaatttaagctcccttaggataaattctgtatgtattatgacaacataatgttataggaaccagtttatatacattacattttagcctggctgacaaggcaattgtggggacagatgtctcaagtttagtgacaaagaaaaatagaaattgtctttaaattttttaacgcaaacagttcttttcagatttaaactgtttgttgtatcattagtggttacactttgctctgtgcgcttggccaaggcacttaaccctcctaagcttcagtttcccctctgtaaatggggatgacagtatccatctcataaagttatggagagctaaataaaatcctgcacatatagggcacacatgagcccgcagtgtgtgagcttttgttgctattgtgacggctcaccttctcttccattttaccctcggaccacaagaaaaaggaaatcctgtttaacatgagatcaatctttcagatcttttcaggcataaaagttgtcaataggttttcataaatttctaggtataaaagtttatgagttttatggaaataatttagcatatttagaaaggaacattatttttgttcaaggtgttggtatgttggagaattatgtgaagtgcattctctgtaatatgagactgctgcatatgcattgcgtagtactacatatatatgtagaaaacccctacgtgctatatatgtgtgtgcgtatgcatactgtgtgtatagaaaaccccctacatgctatatatgtgtgtgtgtatgcatgctgtgtgtgtgtatagaaaacccctacatgctaagcatgttttcagtgcaggcagtgaatttacttgttttattcagcttcccactttcataaaacattgcatctaaatgttgctataagtatggctgttgcagaaaatatctgcaaatagctcttagtgtcatctgtatttcattctccagaaaatttccaaggcagaccttctctgtgactctgatactctgatagactctcgggaagaatgttttctttctgtccctcccccaccccccgagacagggtctcactttcacctaggctggagtagggtggcataatctgtagcctcgaactcctgggctcaagggatcctcccacctcaagctcctgggtagctgggactacaggtgtgctccatcctgcctggctgatttttttcattttgtagaaacagggtcttactatgttgtccaggctggtctcaaactcttgggctcaagcagtcctccagcctcagcctcccaaagtgcttgggattacaggtgtgagccaccacacctggcctagaatgtcttcataataagaaagtcataaaacatttccagacaatccatttttctttctcctcattgggacaatatcttccctttgtattgttttaaatactgagactaataaatcttttttgttttaggtcaagtgtatatagtgttaacttttttttccgtcctttccttatgtttctgtcacgcatgaaccccaaacaaaaacacaggctattggtcaggcaaggtggctcacacctgtaatcccagcactttgggaggccgaggcgggaggatcacttgaggtcaggagttcgcgaccagcctggccaacatggtgaaaccccgtctctactaaaaatataaaaattagctgggcgtggtggtgcatgcctgtaattccggctactcgggaggctgaggcaggagaatcgcttgaacccaggaggcggaggttgcagtgagctgagatcatgccactgcacgatgcctggggtgacagagtgaaactcttgtctcaaaaataaaaataaaaaaacagactaccaagagccataatgtctagttatgaggcagtatgagtccaaaaaacctgattttctggggacacacagggtctgaatttaaacctggctctaccactgcctgtgtgtgacttctcaggaagcactctgtgtctttatctgcaaaaagggagcaattggtaagagcttgtagtccaagtgcttcttatatgcacattaaggcttaatggtcattcatagtcattatttgtatctctattctctggaggaaactcttaattcaagggcattaacgctgaattccttctgttaccatagtctagattatcttttggttaggtcttgggattcctcttgtggtgttttgtttttcagtcagatgagttgggtgccctggttccttcttcacccaggctgacaactttctgtgtaatatggaagtcagggtaggtgctgccagaatatcttggcgtgggcttccacctctgcaggatcatgtgcgccacacgtatcttgactgaatcgcttcattttaacctgggagagattgtagaaataatatttttctttagtcttctttaatcccatcaataataggacacttggtgcctcccttgatacagccccacattccccacaggcagattttctcatcctcagcactgttgacactttgggcttgctaatccttggtcatagggggctgtcacgtgcattgtagaatatccagcagtattcctggcctcttcccaccagataccagtagcacccccatagttgtgacaacccataatatttctagacattgccaaaggtttcctggagggaagaggagttaaaatcaacctggttgagatctgctggtctaaggcaaatgccagatcatttgttgcatttgcaactgcttagcacaggactccaaatataacatgctctcagaaaatatgtgcttagcaaggactcacctacctacctgggtagttaaggaatttttttaaaatttattagatggcagaaacaaggtagtaggtatatacatctaagagctcaaagtagaaaattaggcatcacttcttaaaattggtcactggtaattatgtctttgtggaagataccctttgccccgctcctcattcctaccagctctcgtatctctattcctctttttggctccagcttccattttctgtgtaacagtggaggtgagtgagtaagcatttttattcctggaaaatccaggcaaagggtaaagaaagtggtgcaagcaacaaaatttgagtgttcccactctagtccctttgccccagagaaaactggaggtattagattaagtcggttttgacatctttcaacctgtaccttgaaagcttgagtttactaagttttttgtaataccatttcatatattaaagaacagctttgcttgcaacaaatgggaacataatatatttcagtgaacacttgactaatatgctgggccttgttctaaacaaacactgggaaacaggtgaaccagacagagctctgctacagctcccattctagtaaatatctgcttcccgaatacatttaatttgctggagatcttacatgatcccaagaaaacaaatgtatatgtcctcagttatttttttcagtaagttttggctaaaaggtatagaatcctacactctgatagctataagccataagaatatttctctagaggaggtgtcagaacttgctagggcagctatttttgagtatatcattatgttatttgtgtttcttcatgtgcttttaaaaaaacttaaatagtgtgaaaacttttctctcctgatgtgtgagcctttccccttcacttatgtgactggaagtggtactactagaagtgacagcactttaaagttaaaagcttattaaaacatacctcccgtgagtaccactctaacaattacagtggctgtgtcttctctgtcctttttgctgataaaacttaggggaaaattcctggcagctaaatcatggccattttattaaaaaaaaaaaactagatatgaaatcaagtagagaaaaagacagtgacatttaaaatcccatgaatcaagctgccccaaggagtacaggtgttgcattacatgtgaatgtgaaggagaaaagaaaactaaacctagcctggtttctaagaaaactgtagcagtgaagatacttcacactgtatcttctggtcaacatctggtttgtcttcagggtctctgacacatgtagcttgcaaatgatagctctgttgatgcctcaaaatactgaaggaagtgcctggaaatacaccaatccttttaaagttttattttttactctccatttcagatatggttttggagaggcagggaagcctaaatttggcattgaacctaatgctgagcttatatatgaagttacacttaagagcttcgaaaaggtgagaaaataccaacttccttaaaattatggtaggtttcttctccatccacttcctataaatcagtatcttatcttagtaggtggtatagatagatggtgtttattcattatcaagtttgtctcttgcctccaacactgctgctgaagaatagaacaactgacatagcacagctgatatacaacgaaggagctccgtgttcttattttgttcctatgtgtcagcttttttttttttttttaacttttttgggtagaatccaagacttgttcccttatttgttcctagacttgttctttttgtactttttttttcctgggttgaggacagaaaggttcacgttctgccaagtggctccttgggggagtggggtgcagcttttcagagctgaacggattgtacccttcacaggagtcacgaagaggcctgcactgtggctccaagttgttatcccaactgcaagtcctcgagggccactaggctctgtgaccagagatacaagaaagaaagcagctaacccgaagccattttttttttatacttctccaagtagagaagagagagaatttgtcagttgccttggattccagaaacagcatgcctccttgaacatatttccatctcagtttcactctggaggctcccagcagcagccgacctggacacacacagcatatacctgagctaggtatgctgttgtcttcggccacgtgcccctggcatttccaaagccccaccctttgtggagctcaaggactgcatttgtgttccttttttattcctgcacagtgctacctccacgttctgtacattcaacttttttttttttgagatagggtctcactcttgtcacccaggctggaatacagtgagcgcgatcatagctcactccagcctcaacttcctgggctcaagcagtcctctcacctcagccttccaagtagctgggactacaggcacacgctaccacacccagctaattttgtttattttttgtagacatggggtctcactgtgttgccccagctggtctcaaactcctgggcttgagccatcctcctgccttggcctcccaaagtgctgggattgtaggggtgagccactgtgcctgaccacattaagcacattaatataaatggaaacatgaccatttatattttgttagattcagaaaagaaatcattgtcctgtgggcctgtacctttgggctaagaaagtgaggggaggcctgctttgggattcacccccagtagtgacattcctaatcatacctcttctacttcatgttcccccaaacaaacatatgtctggttatgaccactgattgttgtcatgtaacctcttctgaaggcctgctagctcagcactgatcccccaatgctgttgtcatagcatatggtgtttttttattgttaaagagagagaagataatctttagcatgtggttatttagacctatggctttactatttccatttttgtaaagcagcctcttgccccttccttctcgtggcccagtggacattgcttatttaggagcactctcccagtggtgtgccacagcaagcctgtgctctgtcatcactccaagagtatattcatgcactgctgcttggtatatttgaaatcacatgaaggtatatgatgttgtttggggcaatgtgatttaatcctctgccttgttaagaatagactaggccaggctgggcgctgtggctcacgcctgtaatcctagcactttgggatgccgaggtaggtggatcacctgaggtcaggagtttgagaccagcctggccaacatggtgaaaacccatctatgctaaaaatagaaaaattagctggacgtggtggcaggtgcctgtaatctcagctattcgggaagctgagacaggtgaatcgcttgaacccaggaggtggaggttgccgtgagccgagatcatgccactgcactccagcctgagagacagagcaagactccgtctcagaggaaaaaaaaaaaaatatatatatatatatataaaaatatatatatatataaaaatatatatataaatatatacacacacacacatacacacacatacttatattccaggcatggtggctcacacctataaatcccagcactttgggaggccaaggcaggattacttgagccgaggagttcaaaaccagcttgggcaacatagtgagacccccctctctgcaaaaaaatttaaaattttcctgggtgtggtagcacattcctatatttccagctactcaggaggccaagataggaggatggcttgagcccaagagtttgagaccagcctgagcaacatagtgagaccccgtctctaccaaaaaaaaaaaaaaaaaattagctggacatggtggcacatgcctgtggtcccaactactcgggaggctgaggcaggaggattgcttgagcctgggaaatcgaggctacagtgagccgcgatcgtgccactgcactccagcctggacgacagagcaagatcctgtctcaaaaaaagaaaaaataaaagagtatcctgtctcaaaaaaagaaaagacaacagagcaagatcctgtcttagaaaaagaaaaaataaaaaaaaattccataaagactgaagccaacctaagaaatacaaagagacttattaactaggtgttctttgtttttgttttttgggtgctaaaacctggaattgaaccataactaggtttttgagtaatttgagctacattattaggaagcagaattacatgagttgccagaaagatgagtaacccttttattattcacttttaaaaagtagaggatagtcactgggcgcggtagctcacgcctgtaatcccagctgaggtgggtggatcacctgaggttgggagtttgagaccagcctgaccaatatggagaaaccccgtctctactaaaaatacaaaaaattagccgggcatggtggtgcatgcctgtaatcccagctactccggaggctgaggcaggagaatcacttgaacccgggaggcagaggttgtggtgagccaagatcacaccattgcactccagcctggacaacaagagcgaaactccgtctcaaaaaaaaaataataataataataataataaaagtagaggatagcaggggctgtgacaccaggaacacacactcgttatcttttgaatagagagaattttagttacccatttaaacttcataatttatatgcagtaaatagcactgaccacacccactgtcacttttcctaaaggctcccagattgttctcttgactctggtccttctaaatccagcttgtaaatggcaagtgcagttatttctggatttgtatctgtaatggtggaagtaataatacacacaatacaagctagcagatgataatgaagtcatttatttatggctctaaagtgatatttttgcatgagctttactcccaattatgttttgcttgaagtcccccccagtatacatctgcaagttgatacaatttagcagtattattagtatatctggttgttttagagtggcaagacaacctgacccagaattttgaaaattctgtatgaatatacaaactacaacttgactacagtcatgttcccattttagagttgaaaaacaggcttgagagaaacagcctagtggagaggtttgcagagggagataaggcatggccttaactttgtgtgggttcaccttgtatttctaaagattcactttgtagcagtgcttaccagagtacgttccttactgtgtttttgcggctcctctctcttgagcaacattgttcaagctacagcttggtcatgatggaaagtgagttcttcaaacagtatgaagaagcactggcctagcagtaaattggcactgacacacaatttcaacagccagagtgttttcagtttggagtatcttctagaattagctgctctttgttccaataggcctcaactgatgcttttctctctgttcatctaaccattgtcacaaatttacacacaggccaaagaatcctgggagatggataccaaagaaaaattggagcaggctgccattgtcaaagagaagggaaccgtatacttcaaggtgtgtgagtccctatgcaatcctttccatctcaaagaatttattcaagtgttggtgaattgtgctgatattccctactctgaattttgtcaacactgcttggtaagaataagctgcaatttttataaatctgtcattttcaatatgaaaaatggtgagaaaacaatcatgtggaaaaaaaaaaaagtacagattcctcttttacacattctgctctagattgtaaccttccatacaggcagaccaggtctggcatccccacccaccacagtatcactcactcctaaagcatcttgcttggtacatagttggcactcaacaagtgtttttggaatgaaaaaagaatgaatagaataattgttagcaaagaatggaattcataagggtaagtttcacatcatttttctttcttcctttttttttttttgtatgagagacagggtctccctttctttcccaggctggtctcaaacttctagcctcaagcaatcctcccacctcagcttcccaaagtgctgagattacaggcgtgagccactgcaccgggcccatcttcctttagactgtcttgatgaagtcactagagcatatgataaaaggagagaggacatgcacaaatttcaaaacaaactgacaggagagtattgattgcttctaatggccaagatgattcctgcacacttgcttttatgaggaatctccggatattcctgaatgatattcatcataaattgcttctcagaaacccttcttggagcaactaggagtgtgatattttctcacttagatcttaaacctctagatgtaagaaaaaaagaaaccgcccttcattctgttttaatcagtgttctacccattgcttccccaccccaaatatatgccttctccatgtcaagcagaaagggcttagtgatgagaattagagggagaatgggagttctgtcaaggtttctttcgttttctgccactgcaatacagaaattagatgtttttcagcagtataaagcagtgaggcataagtgtactttaacaagtctttatggggcatctgctataagacatgctattattaagttacaaccttgtcaggagggaggagtggcaatgttaatccaaatgaaacaactagagaattatgtaagaatatataatcaacccaaaattaacacagccagagggcaccatgtgttttcagaatttgagctgagacaatattgggtcatgaaatcagttttgtggaagtgtattgcaatatgttataaggatcagttttgttgcataaaactttgcttgtgtatgagtaagtactggattgcatatttcttactgtgggtggtattcaaacaaattttaaatcatgggtttagataagtataaatatataaatatgttatttatcattatttactatgtatactaaactcttatggatcaccagaaagcatgggggtatgatagaataagctcagaattgggaaaaatgggctttattgctcttcaaatgatttagtcatttaaggtccaaagaggttatattttcaagtgaaaaataggggagttagatgttccccaagtttctttccagcctgaatttctgtgagtttctaaactctcaagaacaagtgttatttttttggttttgttttgtttttaattctaattgaggtatattggatacttctaaactattcaagtaagattccaagtgggttatttgtatatccaaatacataatacactagagggaaaaatgtttctacaaaatttcttaagatcgtgagtccttaacagtattttctatatttccgaagtccataaaaatccttaactatattttatatatttcctcaatacttccaaatagaatattaacagtttgggaagatttgaggcttttggcctttgactagaattatatcgattcagtgtagtaaaacagctcagctattcagaggctctaatcggtgctatgatacagaattttggagaacattattggtaatgaaataatgttatgaagccatctgtcatatagctgtgttctgaatatatacagagagatggccagaattagtgatcagtagcagaaagcaatgagtgtctgtacagttacttaactttgttgcttatcagcatcacaactgcaagagtgatactattatgaacctacttaaaattaccaatctttggataaaatctggatcagcagtcacacacatggaaaaaattatttttaacatggaatttgataggcaaaatttttcaaaacattagtccattggggaaaaattaatgaaaggttcaaaaccactgacctgagacttttctcccagaatgtctctgaacattttgtaccactaaaaacttccctggaggcacctttataattataggtaaaagatcccagcagtagtcctagcgttagctgtaaaacttcaaaatggttagtagatagtttcctgtacatattcccttcccaactcagggcaggtttcaatctgccatactgccctcccgggccttgtctttccagggtgtctgacttggcatgttatgcatttgcacagagtccagatgtgtaggtgagagcagagatgggctgaactaaagatctgtatttcatgccatctgcatattggaattctgtttccattgatctgttggtttggtttatacctaaatgggtaaagcctctctcctgagtaggattgaattgtactcagcttttaagtgggaatgattttgccattgaagatgtaaagtcctcatttcaacctctgaatactaaagagaagaaaaatagagaactctatttggctctgaaaataattattaagtacaggtaacagcataatattaagccaggcattgtgcaagcgagttaaacagacacgatttttgccctcatagctgacagtgttctgcaggacaggagcattaactcacacctggtcagtgtttttcttttttctgacttggcagcagagtggcaagaaggctaagaacactgaagtgatgtgggattcttgcgcccccttgtgcttctcctgggaagaaagcatttctaaaacaaactagttgaggagaattgttcaacctctaaactcttcagataaatcgggctttgctatattttcaccacccttgctgttccaagataccagtaatgtgatttagaaacaagccgtttatgactctaggatttgatgttttaaaaaaaattcctaagaagagtccaccctgtctttcatctctttcctttagtgcagaatttttcaacctcagtactatcaacatttggagtgggataattcttgattgtgtggggctgtcttgtgcattgtagaatatttagcagcattcctggcctctgcccattagatgccagtagcatcctacccagttatgacaactaaaaatgcctccagacctgccaggtgttccctggggggcaaaatcaccccccagttgagaactgctttagtacctcagaagcagggagtacaagacagacttttcgctaattggaagttgaagtctaaataaagttacatgatatatatgcaagagctttcaaaaaattaaaatgccctatgtgaaggaactattaagaagtctaatacctgttttttgtgttttgttttgttttaccatggccttctaccattctgattattcagaacttattgaaatgttaagatctaggtttttgtcctccctggctcttcttttctttccctatacaatatattaggagataatcagaaaagttaagttaatcaatgcattagagagggaggaggagagaggatgaagaaatgaggcatgacaggggaaatgcctgtccttcctatctcatctcagtgaaacaacacttttcatttccacccacacattttttgctcccaatgatagcaaaaggttttgttgttggtattgtttttagagagagagggtcttactctgtcacccaggctggagtgcagtggcacaagcatagctaactgcagcttcgaactcctggacttaagagatcctcctgcctcagcttcccaaagtgctgggactataggcgtgagccaccacaccactttagaaaaagtcttgattccatatttacattcctttgatttcaatatttactcaacaaacctttattaaagacctcttggtgctaaaccctgaatattccaaaagggagaggacaatgctgcctgtcctcaaagaccagcaagagaaaaggcagtgacagaaagaaaatgccgacctgaaactggtgaggactttattcttttttttttgtagcatccaaaaaaggagtggtaggcctaagactatgacaaaatttaagtattgtcttagcttgggctgccacagtaaaataccatacactgggtggcttcaacaacaggaatttacttctggagactgtaagtcccagatcaaggtgttagcaggatcagtgtctggggagggcctctcctctggttccttgtagctcccttcttgctgtgttctcacatggcctttccacatgcatgtgagtggagagagggcagagggcagcaagcacccgagtttcttcttataaaggctctaatcccatcatgaggccccaccctcatgaccacatctaacctaattccctccccaaatgctccatctgcaaatatcacattcggggtgagggcttcaacataggaatttaggatgggggacacaattcagtccatagcaaatctaatttcctcaagaatttcagcatttaaaataaaatgccctggtttcgtgttcttatgaatgacctgtatcacacacttctgaggcagagagggtgacagactttgattttagtgccagtcttccctctcctaagtgagtgacttgggaagaaggatgttcgagggatgtagcctggccctcattcacacccaggccctccagctggaacaggtctgccccatcttcatcaccagaaaatccacaccagggcttcctttctacaggcagagctcgtttcttacatcacccacttgaagtcctgtatcacaggcatgtcctcttagacctgctctatggtttttctcttactcagactccttgggtgagggttggagtatttgtggggagagacaactcggcagtgagatgtacgcgctgcttgggctgtggtaaatcctagtaacatggtcttaacactgttggtcaggcattgaatttaatgtcctaataggtctggctgctcctctgccatctggcaggatgtatcatctgtggttttgagcttatcacctcctcaaaggagaatccccacttgtactcctgtttctatttgcgtatttaccagcgattccccagtgctttcatttaccttaaaatcacagtggacacattgtctcagccctggaggggttttgttttgttttgttttgttttgtttttgaggagtctcgctctgtcacccaggctggagtgcagtggcatgatcttggctcactgcaacctctgcctcttaggttcaagcagttctcctgcctcagcctcctaagtagccgggattacaggcatatgccaccatgcctggctcatttttgtatttttagtagagacggccaggctggtctcgaactcctgacctcaggtgatccacctgtctcggcctccaaagtgctgggattacaggtatgagccactgtgctcagcccccagcgtttctcatatgagcatgtatatatatatatattatatatatattatatatgtttatatttatatatattatatataactgacagacctttctgatgtatattgttttatagttgttatttatgttgtatgctactatccaactattcatattcccattgcctatagatcaggggtcagcaaactacagtttgctggccaaatctggtccctgcctgtttttgtaagtacagtttaactgaaacacagctgcacccattgatttacatactgtctagagcagcttttgcactacaaatgataagaatttagtagttgcaacagagactggttcaaataggattggctgtgtttggaactagcacttgccagaatgtaatatttgctgtgaagtgctgaaaagaaaagtaacttccttttcatttttttagtggcatagtctaaaactgctcacaatccttttgaaagactaaagaataggccaggtgtggtggctcatgcctgtaatcccagcactttgggaggccaaggcaggcggatcacaaggtcaggagttcaagaccagcctggccaacatagtgaaacgctgtctctactaaaaatacaaaaaaaaatagctgggcttggtggcggccacctgtagtccccagctactcgggaggctgaggcaggagaatcgctggaacccgggaggcggaggttgcagtgagctgagatggcgccattgcactccagccctggagacagtgcgagactgtgtctcaaaaaaaaaaaaaaaaaaaaaaaaaaaaaagactaaagaatattagcaccaaagaacatagcccagaagccttgctgtactacacctgctgaagggatggatggaaatgctgcagagcagcactaggcagtgctcaggcactgccccaaaccagcccacaggccatcgaggcctccaagggagtgggaaaggtacctggagagccatctccagaaggaaagaaagaaaccagctgtaccagggtttgctggaggggttgcttcactttgaggatttgcttttcttttgtaccccctcaagagctgagtacaagtaatgacgcttttttatcctagggaggcaaatacatgcaggcggtgattcagtatgggaagatagtgtcctggttagagatggaatatggtttatcagaaaaggaatcgaaagcttctgaatcatttctccttgctgcctttctgaacctggccatgtgctacctgaagcttagagaatacaccaaagctgttgaatgctgtgacaaggtaacatcgtgtctcctgtgagatggactttagatactccagatcttttctccatctctgtcttttgcttcctctcagccaaaggttgcaggatttttcattttgcttttttttatttatttgaatgtttgggattatttgtttctcagtatgaattgggaaattcagcaagatttttattacagtcagacttttatgatacctagactgtttatcataatgcattctgaagaaaagttttgattaaaattaaataatttttatccacgaccttccttataactgtagtatttatatcagagtagacgtataactcctcaggttcagtttaataagagaagatttaacttaagcttttctggactttaacagactgcaactgttcatataaagcatatatataggtcaatttttattataatcatttattcactgatatgcataaataatatgaaaggtccacagagcatcagcagcctttttatttttacatttgtcttattaatactatctttggtcttttgagtgcttacacacagtactctataacagtggtttatcatctgtatcgttatgtatcgttctgatatatttatacaccagccgatactattttaggtatctggtctcagagtgaacagtatatattatactgtgggtaaaagtaaaaactaatcattggatgtatcttaaaggtagacataaaaggataagaaaagcaaggcaactattttgtacattctttgtgagattatttttgaattttgtggatcagtgtttcctatcgcatcctctctcccaagaccagttattaattttatatgtattttttcgtttttttcatacagagcggagagagagagagagagagtgtgtgcgcgcgcgcgtgtgtgtgttttgtttgttttagagacaagttgttgctattttgcccaggctggggtgcggtggctattaatacacatgaacataatgtactacagcctcaaactctggggcccaagctatcctcccacctcagcctcctgagtagctgggactacaagtgcatgccaccacacaccctgctaatttttaaatttacttttgtagagatgggggtcttccaaagagctgggattaaagttgtgaggtaccacacccagcacagccttgactacattatttttctgtcttctattgacagaagcagtcatatagcatcactattaaccctatctttggcaataggaagcctgttctccttattttcctctttttttttttttttggagatggagtctttctctgttacccagtctggagtgcaatggcacaatcttggctcactctaacctccacctcccgagttcaagcgattctcctgcctcagcctcccaagtagcttagaccacaggtgccgaccaccacaccaggctaatttttgtatttttagtagagacagggtttcaccatgttggcccggctggtttccaattcctgacctcaggtgatttgccacctcagcttcccaaagtgctgggattacaggtgtgagccaccacaacccagcaattttcttttagctttgttgattatatctttctctttaaagaaggttttaatgtttatgtagtcagatttgtcgtctcctttctagttagaaaagacttccccacaccaagattataaaaataactgaagccaggcacagtggtttacacctgtgacctgtaaccccaggactttcggaggctgaggcgagaggattgcctgagcccaggagatagaggctgcagtgagctgtgattgagccactgccctccagcctgggcgacagagtgagaccctgcctcaaaaaaataatgattatattttacatattttaaaataaaaaataattgaaacattttatggttttttttaatatgtaaatatggttgatctagaatttacttttgtgcttacaatatgaggtaagaacttttttttttttttttttttggagacaagagtctcactctgtcacccagcctggagtgcagtggcacgatctcagcccactccaacctccacctccctggttcaagcaattctcctgcctcagcctcccaagtagctgggattacaggcgcctgccaccatgcccagctaatttttgtattttcagtagagacaggatttcgccatgttggccaggctggtctcgaactcctcacctcaggtgatcacctgcctcagcctcccaaagtgctgggattagggtgtgaaccactgcacccggccttaactcttattttctatgtggatagctgccatcctggccccgtttattttaaagttaactctccactgattcacattaccacctttgtcattttcaaatgtttttatatgcagacacatgactgtttctgaatgattcgttctgttccactgagctgtttgtccacatgctagtaaccaaactgtcttaatttcagtagttttaaagtttgtctttttctctggtaagacaagtgcctcttatttttttcttttttcccaaattttttcagccattcttgggcacttatttgttccaatgaactttaaaatgaacttctcaagagccccctctcaaatctccttgggatctttctagaaattgcattaaatgcagaaaataatttgggtagtaaattttgatcagtagtatgtaattatcttgagccccatttttttaaatacactttttccatctcctttggcaagagaactttggtaagctgtttactgaatttattaaaattcgtcctttctaaaatatagaccatctattcctaggcccttggactggacagtgccaatgagaaaggcttgtataggaggggtgaagcccagctgctcatgaacgagtttgagtcagccaagggtgactttgagaaagtgctggaagtaaacccccagaataaggctgcaagactgcagatctccatgtgccagaaaaaggccaaggagcacaacgagcgggaccgcaggatatacgccaacatgttcaagaagtttgcagagcaggatgccaaggtgtgtgcagagcctgatgactgcaggtggatcaagagcctgaccatgcccctttgattttaggggacaggaacagctaaacaacccaagaggctcaagagcagggaaaacgatttccaatctaatctgaggctgctttggatccaaaggtcgagtagggcagttccagtcaccaaaggcacacgtcatgagagatgagaaaactaaattcccttcagatgtattagattggttcaaaagtaattgtggtttttaccattactttcaatggcaaaaacagcaattttgcaccaactccccccgcccgccccccgggcccctgcccgagtcagagtctcactctgtcacccagactgtaatgcagtcgtgctaacatggctcactgcagccttgacttctctggatcaagtgatcctcccacctcagcctcctgagtagctaggacaagcacactaccacactgggctaattttttaaaattttttgtaaagatagggtttcactttgttgtctaggctggtctcgaacccctggcttcaagggttcctcctgctttggtctcccaaagtgctgggattatagacatgagccaccatgcccagcccttttgtcatttttgaaaaattgtaaacccatcaggatttttttttcaagtaagacttacgattttcccaggaaatgggatgttataggagccccatcatcacacctgttatcttgagggtcggcagccagcctgaaaaatgtggcaggagaggtctgtctgcagagagggcggcctccctacagcatagttggcattctggtcctgtccccagtctccaggaatgcccagacttcattatcccacagctgtcccatgtgtcaaccaaagaaaggtgaagctcccactctaactattggtagcacagccctgacctacccagctagatatcctagagaaaatcattgcaatacctcgtgtttgggacctgatacacagtctggaggagccaggaattatttcacttctttattctctaaccttcttgattgcttatttcttccttaggaagaggccaataaagcaatgggcaagaagacttcagaaggggtcactaatgaaaaaggaacagacagtcaagcaatggaagaagagaaacctgagggccacgtatgacgccacgccaaggagggaagagtcccagtgaactcggcccctcctcaatgggctttcccccaactcaggacagaacagtgtttaatgtaaagtttgttatagtctatgtgattctggaagcaaatggcaaaaccagtagcttcccaaaaacagcccccctgctgctgcccggagggttcactgaggggtggcacgggaccactccaggtggaacaaacagaaatgactgtggtgtggagggagtgagccagcagcttaagtccagctcatttcagtttctatcaaccttcaagtatccaattcagggtccctggagatcatcctaacaatgtggggctgttaggttttacctttgaactttcatagcactgcagaaacctttaaaaaaaaaatgcttcatgaatttctcctttcctacagttgggtagggtaggggaaggaggataagcttttgttttttaaatgactgaagtgctataaatgtagtctgttgcatttttaaccaacagaacccacagtagaggggtctcatgtctccccagttccacagcagtgtcacagacgtgaaagccagaacctcagaggccacttgcttgctgacttagcctcctcccaaagtccccctcctcagccagcctccttgtgagagtggctttctaccacacacagcctgtccctgggggagtaattctgtcattcctaaaacacccttcagcaatgataatgagcagatgagagtttctggattagcttttcctattttcgatgaagttctgagatactgaaatgtgaaaagagcaatcagaattgtgctttttctcccctcctctattccttttagggaataatattcaatacacagtacttcctcccagcattgctactgctcagcttcttctttcattctaatccttgctattaagaatttaagacttgtgcttacaatatttttgacctggagtggatctatttacatagtcatttaggatccatgcagctttttttgtctttttaagattattggctcataagcatatgtatactggtttatggaactttatttacactcctctatcatgcaaaaaaattttgactttttagtactaagcttaatttttaaaaacaaaatctgtagggttgacaaataaatagttgctcttctacactaggggtttcacctgcaggtttgacacgcagttgctcgcttttcctgccctgtcaagcttctctgttctggcgtgagttgtgaaagagttgaagacagcttcccatgccggtacacagccagtagcctaaatctccagtacttgagctgaccattgaactagggcaagtcttaaatgtgtacatgtagttgaatttcagtccttacgggtaaacagattgagcatggctctctattccctcagcctaagaaacactcatgggaatgcatttggcaacccaaggaaccatttgcttaaacctggaacatctcacctttttaaatcctaaaaaacactggcagttatattttaaattagtttttatttttatgatggttttatcaaaagacttttattattagattgggacccccttcaaacctaaaaatcaagttatttccttttataatacttttcttccccatggaacaaatgggatcaatttgtgagttttttcctttaatgataactaaaatccctctaatttctcatttatgcttttgtcttttttatgaaatatttcttttaaaagccccagtctcacctacgaaatatgaagagcaaaagctgattttgcttacttgctaaactgttgggaaagctctgtagagcatggttccagtgaggccaagattgaaatttgatactaaaaaggccacctagctttttgcagataacaaacaagaaagctattccaagactcagatgatgccagctgtctcccacgtgtgtattatggttcaccagggggaactggcaaaagtgtgtgtggggaggggaagggtgtgtgagtggttctgagcaaataactacagggtgcccattaccactcaagaagacacttcacgtattcttgtatcaaattcaataatcttaaacaatttgtgtagaagtccacagacatctttcaaccaccttttaggctgcatatggattgccaagtcagcatatgaggaattaaagacattgttttttaaaaaaaaaaatcatttagatgcacttttttgtgtgttctttaaataaatccaaaaaaaatgtgacttcccattgtttttggttttgcttaagtgattttcagggaaagctatattggttaaaaaaccatggtgggggccaacttgaagaaattagacatcagagaggtcaggcgtagtggctcatgcctgtaatcccagcactttgggaggccaaggcaggtgcatcacctgaggtcaggagtttgagaccagcctggccaatgtggtaaaaccctgtctctactaaaaatacaaaaattagccaggtgtggtggtgcacacctgtaatcccagctactcaggaggctgaggcaggagaatcacttgaacctgggaagtggaagttgcagtgagccaagattgtgccactgcactctggcctgggtgacagtgagacttggtctcaaaaaaaaaaaaaaaaaaaaaaaatcagaaaatcggcaatggacagtatcatcctacactttgctctaaggtgaacctgaaaccaacattggggtgaaagtggcagaacaatgcatcattgctaaaaagaaccaagtaatgggaaaaataaaaaggttttgttttttcattagccagcggatatttcacctttttaagctgattttaaggtaggctcgacttgcaaaataaaatttaattgtgccctttaataaatatatgaaacataagtaaggctatctaaggtggtggtccatattgagcatgcattttctttcttaagtagcatatatcatcaatactcatcatcacagactctcaaggcctaaggagatgtcacatatactgcaaatcctcattttcacactgcaaaagaaggtggcacagtgctggaaggtacttagtaggacctctgaggtctacagacaggttgatgcaggttctaggcaccctttattccctctgaattcttggcttcatctctggatttgaattatatttctccctcctccctgttaaattatttggtaatgaaataaattcctagctaggtgcggttgcttatgcttataaccccagcactttgggaggccgaggtgggcaggttgcttgagcccaggagttcgagaccagcctgggcaacatggcaagaccctgtctctacaaaaagtacaaaaattagacagacatgatggtatgcacctttaggcccagttacaggctgaggtgggaggatcacttgagccctgggaggttgaggctgcagtgagccatgatcatgccactgcactccagcctgggtgacagagcaagaccctatctcaaccataataaattccctttatttgcgtgctttttttttgtaagaaaataatgatcaccctagggatcttgaggatgagccagagaagattcctggctgtaaatgtgtgatctcagaaattcagaggcagcttgcacaacctccaaaacgaggactgccagtgaagggctttgtctatacttacttggccttagcagcacactgaactccacttttagtatggtacatgtgaagcctgtattctctggggctggagactatctccagtattggtgacaaaacgcattgaatttgagccagttagtcaaaatcctgaaactcagaattccccaacccagctgtgtattttttccatcagctggctacttatgcatctgaatgacagtgactgacgaaagtacataaaaggacattctctgatggcttgaaaagttttggtagaccttcagtacttcccttcagatttttctctactacatgtctgacatggagatttctgtgggaggagaaggcactatctgtaattgcccagaatctccacgtgtgaccttaataatacacggcaagaaagagacagcgttaaatacaactcttaagatttttgacagcatcttgtttgggtaactgcagcctatagttagaaaaattaaagcacagtttataaggcagggattctttgtcttctaaagatgagggaaccttggagaatcaagaatatggggaggacccagaatggtgatgcagcctgcccatggccgtcaggtcacctgatgcccttgcaccattttaaaataggtctttttctagtatgatgagtgatgctcttggtgtatggaaggagatgttggtacttccttagaattcccacattcggtggaactgaaatggcagcagagccatgggcctcatagtctactttggaataaatctatggtgggaagcttgccaacgtgttaagcagaggcatctttttaaaatacactttaggggccagggatggtggctcacacctgtaatcccagcactttgagaggctgaggcaggaggattgcttgaggccaggagttcaagaccagcctgggcaacatagtgagaccccatcactaccacacacacacacacaaattaattagctacacatggtggtgcatgcctatagtcccagctacttgagaggctgaggtgagaggatacttgaagccatgagtcgtaggcttcagtgagctatgatcacgccactgcactccagcctgggcaacagagtgagaccttgtctctaaaattagaaaaaaaaatgtggctgctacattgtttccacctctcaaatctccacaaggtcattggtccttgctaacccagaactaagcagggaaggaattctgggacatgtgtttccaacttggcttagttgacacattgcaaatacaacatgtggctaaggctttcttttttgtttttgtttttgagagggagttttgttcttgttgcccaggctggagtgcagtggcacaatctcggctcactgcaacctctgcctccagtattcaagtgattctcctgcctcagcctcctgagtagctgggattacagggtccgccaccacacccagctaattttttgtatttttagtagagatggggtttcaccatgttggccaggctggtctcgagctcctgacctcaggtgatcaacttgcgtcagcctcccaaaatgctgggattacaggcgtgagccaccgggtccggtctgtatctaagcctttcttgaggtattaaatatttccagcctgggtctgctctgggataatgtgttttcataagataactccttattgtaggcattgttcttggcttaaagttatctccttaaagcttctgactagggaaataagtggtaagaataaacagttgatgagtatttggggatgcaatgactaattctagttactctagttctagtgaatgacttgatgagtttgtattgtatctgctcacaaccgtgtttccacactaaggactcctgaatttttttgtcttaaaaacttaaacccgctgggtgtcctggctcacacctgtaatcccagcactttgggaggccgaggagggcggatcacgaggtcaggagatcaagaccatcctgactaacatggtgaaaccccatctctactgaaaatatgaaaaattcgccaggcttggtggtgggcgcccataatcccagctactcaggaggctgaggcaagagaatgacgcgaacccaggaggcggagcttgcagtgagctgagatcgcgccagtgcactccagcctgggcgacagagcgagactctgtctcaaaaaataaaaataaaaaacttaaacccatgtgtatcctattgccctctgtggctaccagagtcttcctaacatgacaccagcctttacctgtagttaacaaaatgtgattccccttctcccactgagggatcaggaacactgccttactcatcaccatcctcagcacccagtccatcatccccaaactagaacatagtagatactcggtaagctggctttgtccctcctctgaaggcagcctcttgtctgtatcccagtggcccttcactcctgttacctgagatgtggaggccaaagccccatgatactgtggttgtccctgcagcctgattttgtgtcttgaattcttttccaagtggtgaaccagcagcaacttgaattttgggagcccataactgtaaaatgggtccatcgtcttcaggctacattgatcttatatctatttttagtcacaattgataactcagagttcaccaaatacgaagatcaaatataaaatattttccttaaaagtattctaagaccaccccgcccagtctggtgccctggtcagccagcccccaaacatttacggcccatctgttgtgaactgggtactgttccactgaggtgaaggatggggccccctgggctgagcgactcgcagacaagtgaaaaatgaggcatgcagatggctgcatcatcacagagcatctgccatctgctactgacatctacaaaatagggaacagcaggaaactcaagcctgcctctccagctctccccactcattcagagccacactggagaccgagtcaagccagggcccaccccactgctgacatccagcccagtgctactgggcaagcccttcctcagcactgcccccagctggccactgttccacccctgtgcttctctccaagcatccgggctgcaaaaagtgcccagccctaccctgagctataccagccctcttgccctgggcccagccaggatggtttctcctggtggcaggatgttaatctctttggcacaccaggcagaagtctaggagcagagagctatgtccttaggtctgtttttcagttacctgcctactggaatacagctgcaagaaaactgtgtcctttatttacgagacaactgtacagatacaccatgcctaactttgcttactgcatggtcactaggatgtactgagtttcaaggaaatatgtttttgctacattttaattagcactaccccccttaggtgaaatttgggccaggtgcagtggctcacacctgtcatcgtagcactttgggaggccaaggcaggaggatcacttgaagccaggagtttgagaccagcctaggaaacaaagcaagaccctgtctctacgaaaaaattttaaaatcagccgggcgtgatggcgcatgcctgtagtccctgctactcagatggatgaggtgggacgactgcttgagctcaggaggtcgaagctgcagtgagctgtgatcatgccactgcactccagcctgggtgacagagtgagaccctgtctcaaaataaataaataaataggctgggctcggtggctctcacctgtaatcccaacactttgggaggccgatgggggcggatcatgaggtcaggagattgagaccatcctggctaacacggtgaaaccccgtctctactaaaaatacaaaaaattagccgggcgtggtggtggctgcctgtagtcccagacactcgggaggctgaggcaggagaatggcatgaacctgggaggcagaacttgcagtgagctgagattgtgccattgcactccagcctgggcgatagagtgagactccgtctcaaaaaataataataactaagtaaataaacttcctgactgttctgggaaccctcacccctttgtcaccaacacactttccctgcagagaaagctacactgcttgagtgagttggtaaatgctcctctctctctccactctgtctctcgcaagggcacgcaaggctttctatatgggcttctaagctttctctgaacccagctgtctggttgacaaggagcagattgtaataagacaatacagtgaggtttgcacccttctacccttcagccgttaccaaatgtgacagtaggtaagtaaaccaagccaccttcaggctgcaagtcggggcctcagaaccaagttataacctgagataaccccagttggctggatgattgccgagaccagacttcctacagagagtgctgcccacttctgcggtgataactgcaaaacagggcccctcataatgtcctcatcaggacctcctcaatctgaggaacacagaggcctccaatgtttggcaagagcactggtttgggtccagctctgtgttgggatctcttgtttcctcacctgtgaaataacaatggctaatatttatacaactgttttaattatagtagaaaacacataccatgaaatttatcatcttaacaatttttcaggttttttttttcttttttgagacagagtctctcgttctgttgcccaggctggagtgcagtggcacaatcttggctcactgcaacctccacctcccgggttcaagtaattcttgttcctcagcctcccaagtaactgggcatgggccatcatgcccggcttttttgtatttttagtagagacggggtttcaccatgttggccaggctagtgttaaatacagtaagaagttcttcttcaaaggtttagcttgtttaagtttccttgtcctctgttccctcctttcaaggccagacttccttactctctgtgtccccctgccctggtaaacaaccttcccaccagtccttatctatacagcccacattccacatctgctacccactctgtgaattacccctcccgtcacaacgaccctccccgcagaaactgttcctcccaccccccaccagtgtaaccgcattcttgcacttttcaagttagccaaccgggttcagcttggattggtccagctccagccaatggagacaggacacagtagcgggcacaagctgtgttaggaataaaaaccccttccctcctttgtttggggtgctctcgtggcgaccagacctacaagaagcacccttctgcagaagcaaatttgccttgctgagagatcctttgtctcagtgctggttcttctttgcagcactgagcatttgtttccaacaaatttggtggcccatatggggacctcattctcctccgggaaagggtctctgatcacttctcatgaggagacgcatcccgctaactcattgcagtggcctcaagggtaaagaatcgggacccacccagtgcaaccaataaacccagactcttagcaacacaggaagaaaaggcctacagttactgtggtgagcaggtaacgctatgcacagaccaaggtaagaaaaactgtgggggcggtgaagtacttccttggtggtagggacagtttggaggttaaaagtgtgtaaataagatgcacaattaagtgcaaagcgagtgtggagtaaagtaaaggagtgcaagaaatctccagtgggggagctgagcctccagggaaagggagcaaaaaaaaaacaatctctagtaaaagaggttgagccaggaggccgaggcgggtgaatcacgaggtcaggagatcgagaccgtcctggctaacacagcgaaaccccatctctactaaaaatacaaaaaaaaaaaaaaaattagccgggcgtgatggcgggcgcctgtagtcccagctactcgggaggctgacgccagggaatggcgtgaacctgggaggtggagcttgcagtgagccaagatcgtgccactgcactccagcctgggtgacaaagcgagactctgtgtcaaaaaaaaaaaaaaaaaaagaggttgagccccacacacactcaggttgagccttcagggaaaagggtgcaagaaatctctaataggagagactgagcccccattaacttccaggatgggaaatacccctagtaaaacaagaactacaaaggaccaaacataagaaaaagcaacagatgataaaatattgttgttttttttgaaccaaagaaactattcttaaacctttagttttctggccaagttttgggtcaaataaggattagatttgtcaacttttaataaagtatgtaaataacaaaagtcctgtctcccaggaagaaatagactatgccctgcactggcggcaggggcctgtcctctaccccctaaaaactgcaggaaaaaaagccagaaaatacctcccctaaagaaagtaaaatccctaaccccaaacagtccactagcacatgggattcaaaatttccctttcccctcctcctcaaaaaagtctaccccaaccctttttcccttaagggaagtgcctctaggaggaggggaaattggctttgtaaatgccccttaactagttcagaggtcagaaacctaaggaagaaacttaaaccactattagatgatctttttagggttgtggatcaaattaaccgatttttaggaccacaagtatacacttgggctgagctaatgtccatcttaagtattctcttttcgggagaggaaagaaccatgatccgcagggctgctatgatagtctgagagcgcaaacaccttcccagtcaaaatatccctgcagcagaacaaaaatcgccggcccaaaacccccaatgggataataacaatgcagcccaccaagaaaacatgaaaggccttaggaaaatgatagttaaagggattcgggaatcagtgcctcaaacccaaaatatttcccgagcatttaatatgcagcaaggaaaaaacaaagggcccacggagtttttaaacagactcaaggaacaggtaagaaaatatacaggcttaaacataaaggatccccttggacaggggatgttaaagctccattttgttactagtagccaaatatcacaaagaaattacaaaaacagagaactggaaagatcagcctatagagggaatggagggagtcagggagagagagaaagagaggcaaagagagaagatggagaggcaaggagagacaga

SEQ ID NO: 83 - DNA, 1694 bp, Homo sapiens
gggccggctcgcgggcgctgccagtctcgggcggcggtgtccggcgcgcgggcggcctgctgggcgggctgaagggttagcggagcacgggcaaggcggagagtgacggagtcggcgagcccccgcggcgacaggttctctacttaaaagacaatgactactgatgaaggtgccaagaacaatgaagaaagccccacagccactgttgctgagcagggagaggatattacctccaaaaaagacaggggagtattaaagattgtcaaaagagtggggaatggtgaggaaacgccgatgattggagacaaagtttatgtccattacaaaggaaaattgtcaaatggaaagaagtttgattccagtcatgatagaaatgaaccatttgtctttagtcttggcaaaggccaagtcatcaaggcatgggacattggggtggctaccatgaagaaaggagagatatgccatttactgtgcaaaccagaatatgcatatggctcggctggcagtctccctaaaattccctcgaatgcaactctcttttttgagattgagctccttgatttcaaaggagaggatttatttgaagatggaggcattatccggagaaccaaacggaaaggagagggatattcaaatccaaacgaaggagcaacagtagaaatccacctggaaggccgctgtggtggaaggatgtttgactgcagagatgtggcattcactgtgggcgaaggagaagaccacgacattccaattggaattgacaaagctctggagaaaatgcagcgggaagaacaatgtattttatatcttggaccaagatatggttttggagaggcagggaagcctaaatttggcattgaacctaatgctgagcttatatatgaagttacacttaagagcttcgaaaaggccaaagaatcctgggagatggataccaaagaaaaattggagcaggctgccattgtcaaagagaagggaaccgtatacttcaagggaggcaaatacatgcaggcggtgattcagtatgggaagatagtgtcctggttagagatggaatatggtttatcagaaaaggaatcgaaagcttctgaatcatttctccttgctgcctttctgaacctggccatgtgctacctgaagcttagagaatacaccaaagctgttgaatgctgtgacaaggcccttggactggacagtgccaatgagaaaggcttgtataggaggggtgaagcccagctgctcatgaacgagtttgagtcagccaagggtgactttgagaaagtgctggaagtaaacccccagaataaggctgcaagactgcagatctccatgtgccagaaaaaggccaaggagcacaacgagcgggaccgcaggatatacgccaacatgttcaagaagtttgcagagcaggatgccaaggaagaggccaataaagcaatgggcaagaagacttcagaaggggtcactaatgaaaaaggaacagacagtcaagcaatggaagaagagaaacctgagggccacgtatgacgccacgccaaggagggaagagtcccagtgaactcggcccctcctcaatgggctttcccccaactcaggacagaacagtgtttaatgtaaagtttgttatagtctatgtgattctggaagcaaatggcaaaaccagtagcttcccaaaaacagcccccctgctgctg

SEQ ID NO: 84 - DNA, 1374 bp, Homo sapiens
atgactactgatgaaggtgccaagaacaatgaagaaagccccacagccactgttgctgagcagggagaggatattacctccaaaaaagacaggggagtattaaagattgtcaaaagagtggggaatggtgaggaaacgccgatgattggagacaaagtttatgtccattacaaaggaaaattgtcaaatggaaagaagtttgattccagtcatgatagaaatgaaccatttgtctttagtcttggcaaaggccaagtcatcaaggcatgggacattggggtggctaccatgaagaaaggagagatatgccatttactgtgcaaaccagaatatgcatatggctcggctggcagtctccctaaaattccctcgaatgcaactctcttttttgagattgagctccttgatttcaaaggagaggatttatttgaagatggaggcattatccggagaaccaaacggaaaggagagggatattcaaatccaaacgaaggagcaacagtagaaatccacctggaaggccgctgtggtggaaggatgtttgactgcagagatgtggcattcactgtgggcgaaggagaagaccacgacattccaattggaattgacaaagctctggagaaaatgcagcgggaagaacaatgtattttatatcttggaccaagatatggttttggagaggcagggaagcctaaatttggcattgaacctaatgctgagcttatatatgaagttacacttaagagcttcgaaaaggccaaagaatcctgggagatggataccaaagaaaaattggagcaggctgccattgtcaaagagaagggaaccgtatacttcaagggaggcaaatacatgcaggcggtgattcagtatgggaagatagtgtcctggttagagatggaatatggtttatcagaaaaggaatcgaaagcttctgaatcatttctccttgctgcctttctgaacctggccatgtgctacctgaagcttagagaatacaccaaagctgttgaatgctgtgacaaggcccttggactggacagtgccaatgagaaaggcttgtataggaggggtgaagcccagctgctcatgaacgagtttgagtcagccaagggtgactttgagaaagtgctggaagtaaacccccagaataaggctgcaagactgcagatctccatgtgccagaaaaaggccaaggagcacaacgagcgggaccgcaggatatacgccaacatgttcaagaagtttgcagagcaggatgccaaggaagaggccaataaagcaatgggcaagaagacttcagaaggggtcactaatgaaaaaggaacagacagtcaagcaatggaagaagagaaacctgagggccacgtatga

SEQ ID NO: 85 - DNA, 48995 bp, Mus musculus
  misc_feature (12543)..(12562): "n" at positions 12543 to 12562 can be any base
  misc_feature (40585)..(40631): "n" at positions 40585 to 40631 can be any base
gtccaaaaaaagactcctttttcatattaataaaccatagacaataacaacagttattaaactatcaggtaagaattgtattcataattgttctggtttaagcattcaagagatagatggaaaggtggaagcactagaagactcgatggtcatgcattacaagcagcagcccaatgggctggagcgccagaagaagacatttgagccacagtctctagaaactgttctcaggatgaacttagaaaagctttgagcacaagcagtgctgactgaggtgtatataccaaagtgtcatacgctatttgacagaaggaaggtcttctgtactaaataaaacaggagagaagagaccatgctccactgccttatgcccattcaggtctaaccactttaactggaatggcatatccatgatcccgctagaaagcagacactaatgctgggacataatctctctccatacttagaacaatgtttagcatgaagtgtgtactgaatcatgaattgattcaacaaacatttatagcttgacttttatttatatattcataatcccatgacaacttacagaattaatatgactatgacaaacatgtattcattttattcagtaaatctagagatataaaagtacacttttatcaattgtactattagttcaagcaagcaccaaataacactgaaggtgtacctaaacacaacatgggtattccccatacctaagaggaggcaggaggattgagactttgaggtcagcctgagatatacaatgagacattggctcaaataaataaataaatacataaataaatatatttactatgaaaatgaaaatactacctggaatatgaaaaaataaaattcagtgttagataaaagttatacttgtcttcaagttacattagatatctaaatataggtctttcttttttagtcaataatttacaaagcccagattccagttcatatttttccattctcccaatcttctaactccatggtcattcagaatctttaacctgagaggatatggcagtctcagaatgttcccagtttcctagaacagctgctttccacccagtcctatttctgagctcagtataaaatccctgtagcacaatggcaaaatgcaaaacaaaaaaatatgtgcatcctacatccgccatttagcgagacacccccttgcttgatgcttcctcactactgaggttgtcaggaagtgtaaacatttccctagaaactggagggaaaaagaaaaagtccacttgtgttaaagattctatgtccagttagagtgttacagaagagacagattatcttgggctatttttattcttcttaaatatatataaaattagccgggcagtggtggagcacaaagttaattccagcactcaggaggcagaggcaggcagatcagagttcaaggccagcctggtctacagaatgcgttctgggacagccaaggttacacagagaaaccctgactggataaacaaatgtatatataattcattttccacgcctgtgtccaacctaatatcctcataactgtctaaaactttaaaatgcagttttaacagacttctaatctaagaagaccctcagatagcacctgaggcttgcacctcccactctgtaaccaacagaccagatacagatgaagtacctaagggtgttccgtgtcctcacttgtgagatatgagctggaatgagtggagtcaggagttcaggtatggcggcacatcctgccccacaagttcaacattggtttgggccataatgagttcaaaggttagttacagcaagtctctgtccagggaggtctgacagatggatcccacgtgacctcagatgtcattcctgttacagaaatgaagtcaccctgtgtcacacttacaagcgctgctatatgcacaaaactggcttcgtcctctaggccttacctaggataagcgtacagaccgaaagccagaagtttctggatggtttacgacctgcctttaggagttctcatgtactcaaatttagtttctctgggacttcactaacccaatgtttcagttccttttagcctagctgagtggggccgctttctcaaagctgtttctcaccttggggactgtccctctttcctgcagctgactttacaaagggtgtgcacgccctccttgttggacaggagaggttacagacaaagctgatggcagggttcaggtgatgccactgtctgaattatcactaatttttgaagtagtcatacatatttcttgctgtacccagagcatctcagacttgcacttgtatccagttcctacccccagttctctaaatccattcagtcaggaaggtggacagcttctcctcgatcctttcctgaatattttcattccgtttaagtttgacttcatatgctggctggccgaggcttatttgcttcaccacagtgacttctacatcaagtgtttctgcttcccacctggttttcctcagacgcagcctctgttacagcgctccctggtttaagagcttgtcacatttctctctggatacaacctgtacagtggatctcagtcccatataaccgaaggtatgggttgggccaacataaatttggcaacagtcaaaagtttctgaacttttagaatcttctgaactacatgaaattaattcaaattaaacctcataaagactctgctatgtttccgaggaactcaccagctttggatcacaggaactccctgcagccttgtgtctggaacacacatgtgctagccacaaacacatgccatcacacaacgccaggccagtatctgcagccgaaacggttcgtactttacctgtgctttgattgtgtggatgagttttctgtccttatagaacattatagcacctaatagcattcctcagcatttatgcatatagttagtctgtctgtctttctttctttctttctttctttctttctttctttctttctttcttcttccttccttccttccttccttccttccttccttccttccctcctcctcctcctcctcctcctcctcctcctccttcttcttcatcttcttcttcttcttttttaatatttgagctgctaatttgagtttcatttaaagatcattaaagtaattttgatcttgtttaggatcagaatttctaacaatttctaaaacagacccacacacgcttctggtattttgcatcacatatttataaggcagcattttcagcattcagtgttctgcctgcatgcatgccttcaggccagaagagggcatcaaatcccattgcagagggttgcgagccaccatgtggttgctgggaattgaactcaggacctctggaagagcagtcagtactcttaaccactgagccatctctccagcccaagaattattctaaaataatttctaaaatagtttctctgagatttgctattaataaatggtttgtaaacctctttgtgtgtgtgtacacacatacatatatatacatatgtatatatataataaaaatataataaatacattactcaaaaaaagagcacctccctcgtgaaacaaaatactccattgtcaatagattttttccctatttcctttttttcctaatctaatatatacccatattagtcaatattagctactttaccaaacatagtagttcaataaaggggagttttaaaaaatctctaccttttttttttaactgtctgctctacacaatcactcgggctccttctgtctcttttctcagccatctctagaagcctgctcagcaaaggggatggaattacaatataggatcaacagcttgtagtaggatcgacaggttagcttaacataaaacaaaagtgctttctacaagcctctggctgagggcaggtgaaacatatctctgatgaagaaacgctgaatgcttacgtggccatgcagagaccatgatggtgaaggcagctctcccagagggaggcttagttgttgaccctgtgacctctccagatatgggaaactcaactgcatagctgttacagtgaggaactgtattcaaactctcctctgttaaataaaattaaaagaaaaggaaaaggtgagagaccaagtgcagcagagcaactaagttacaagtagacattttggtgagaagaggtattaagatgaggtctcactatatagcccaggctggcctcaaattcactgtggaaccccatctgacttcaccttatggcagtcctgccttagcctctcaagcaacaacatctctggctagctgccatcaaaccgaagaggtggaattataaccaagtttcagaataaactccagtatagaccttcataggctcagaactgtagtgttaactcctgaaaacaaatgagtgtgtgtgtgtgggggggggggtcacagctaggacaaggtgattatttacaatactgacatttccaatccatagacatggcatgtctctagaaaggagtattctgggcagagggagaagaacgaaagcagataaataagaaaccatcttgtttatacatctcagggtctatagagcagttcaaaatgtataaaatataagatatagattgtaagaaatgaggcatggcctcctggaagcagccagactatggaagagtttggaagccatgtatttgaacccaaggacggttttaaattgcaaatttggtgtggcttgatgtgtatccccacaggtaactggggcagcaatatattcgaatatatttttaaaggggacagaattaaaaaacacttagaacactccagtagtttagaagaaacctaacaaagatgtcccaatgatgatggcagtcaaaataaagaagaggcatagctgttggcataactcagtggcagccttagcatgcttatggtccatatgtgccctaggatagctatggggcaacccaacacaaaaccatgaacacttaaaacagcatgagcagattgtttttgcaagtttttttttttcaatctacctatgcttttcccaaatgtgaactttataggtgacagtgtatcataacaatgtcaaaagactgtacatttctccaagccttaaatttaacccctagcaacagaagaagaagaaggattcatcacaatagactatatggtgaatggatactgtaaggtaggctgaggtgataggagggccagtcatggctctcagtctgcagagatatctcagcaagtaaagtgcttgctgaacaagcatgaggagcagagtttggaccctcaagagaagccagatgcaagtctgtaattccagagtgccttacttcagctagagtaaagggtacagagccaaaacaaagaggccatcttccatcccacacttacacaggtggttctcaacatgtagattgtaactcctgagggtgggggtgggaggtcgggggtcaaatgctccttttacagaggtcacatatcagatatactgtacatcagatatactgtaccatgattcataactagcaaattacaattatgaagtagtaatgaaaataattttatagttggggtcaccacaacctgagaaactgtattaagtgtcacagcattaggaaggttgagaaccactgctttaataaagtcttttagaaacaagtgagtagtcaatgctctttagcaaaggcaacgcctacattccttccttggtacagcagaggtatcctgttctagcaccatctgcacactaaagctccaccctggtaccattcacttcctttactacctagtcctgactttaccctgcacgatgaatggcctgggaacccaactgccatgccagagactgaagtgctcactgatagttgtgtttgtttgctccttctgcattttcagtcttactctgtagcccacattggcctgaaacttgtaacaatcctgttccagtctcctaagtgctaggattatagctatgagccaataagcttgcttctcattttcctttagcaatttctgtttcccaatctctttggaggctaaggcagtatatgctgtcctggtgtgcagtaatagtaaggcagactgtgcctggcgcacattcatctttcacttgtcctccttttccctcccttggtaaggcagccttaaaggtgttagacatttgttataggcacgtgtggcagaaacatggacagacatatttgtctttctataatctcagaatgtactgagtaaaaataaatccacaacctacatcagttttgttggctagagtttcccaaatctccagcagacagttgggaatcagttcttttaactgtaattattagcattaattctcagacccacagtatatacatgttgtgtgtatatatgcacatatgtaacaggataaatgatgtctaagagaggctacagaattctgaggctttcctgaagtcaaagaaagaaagcagatacaagcaacaggaagagtctgcatgcattggactagaagtcttacaaactgcaggcatggaccggttcacatcaaataccagtccaagtgacaggacatttccagggtcagtttgatgtgagccaagtgtcacctgccggagtctctttgcttatgctggagactgaggcaagggcaaaaggagtgcttgatataacaattatcctatatgaggcttatgataggtagcggggacaattgtcatacctgtcatgttttggtcttggggcactacttcttttctagtcccaggtcaggggatggattacatgtaacatgtcagttcatgtgtgctgtgcttctgattaccatttgatatatttagctcttggtttatgtttcacactgtgctggcagataatgattgtttgcttgtgcaagcaagatatagactcattctttcttggcactcatactcaaaacagagtaactctggtcatggttgttgctttgtaaaatggaataactcaaggcaagtatggtggtttgaatgagaacactcccatgggctcatatagtttaacttggtctaaagtaggtggaactatttgggaaggattaggaggtgtgtcactgtgggtaggctctgatgtttcaaaagccattccctgtcagctttctgacttgtggttgttgtctcaagatgtaagctcccagctagtgctccagtgctctggctttcatgctccccaccaagatggccatgaactaaccctctgaaaccatgagccctcaaattaaatgcgttcttttacaaattgccttggtcattcctttgttttatgactgtaatagaaaagttactgaggtcactaggcatagcctaaaaggtgatattccacatcatagacctggtcagagcagtcccagcccattctctcagcattagtatgcagtatgcaaggtgcctggatcacccctgaaagggagccagaggttgttactgatagcccgcgcacactataagtccacaccctgcatcagctaatactccatttctgttttctttgacactcttctaaaagtttatacctaccacatccatcattctctcctcaacctgcttcaatttggcttttataatgatccttttaaaggcacacttctcaagtcacaaatgtcctccattctttatctatttcatagacagggtctcccaaaatagcctaggctattcttgaacttcagaatgtctggcatgagcctgcctagtcctgggattactggaaagagctatgccacccaatttaatgacctccattttgccatactcatttagagttcattcagaaaagaatcctcaactgtttcacttctagcagctggccctgccatcaaacatgcctgtcaccatgtcttctgtacaaacacttgtctaaatcacctttctaaaatttccatcatggcaacagtgccccaccctcacccctaggtagcatatactaacagtgtaccataccagccagggtaagtcttcaaatgtactgcatcaactgcatgactaaagtttccagtagcaaccactgactcagctcaaacatggcctctacagaatgtccttctagagagcccagttggtttctactacccccactaccttattttctttatagaaatgcagtgacatcaagacttatgcatgcttgtgttttgagacagactccctcatagctcaggctggctttataaactcattatatagtggaggatgacctagaacccctgctggtcctacctccacctcccaaatgctgggattacagacatgccacccagtactaaaattaccacgtgttagtctctgtaaaccccaatgacaagcagccttatcaggtgtacagtgacaccttcccctagcacaaggtctaaaaatatccatgagaatttcaacctcctatttactttttctttgaataaagacagtaagtagaaactatgtcattcagatatggttgagttaaaagctgaagtatgcctgcattcatgtgtgtgtgtgtattggtgtgttcagtgttttgtggctcatcctatcttcaaagttatgattctgtggtcttgacctctggagcgctgaacatagttcaccctgctaattgttttattttattttatatctttgtgacttgtttatgattgtgtttaactaaaaacacaactgctatttatactctttgagaagacaatttggaactagcagattttaattatttccttcactttgggggagttgtataacaggatgaattttttatgacaggatagtatatattttaattatccaaccccccccccccacacacacacacacactttggcgttctttgaagcgcatgtagaggtaagaggacaacttttggaagttgattctgtccttccatggatcaaactcaatttgtcaggcttggtagcaagcgcaattattctctaagctatcttgttggccatgcaagatgatattctctatttcccctccattacttgttttagtcagtaaatgactggagaacgtaagaggtggagccagataaccctgagttatttctgttgttgagacagtccacctacctcagcctcccgcgtgctgggagtgcagtgcgctaaacggggctggataatcttaagcttaaatcgtgcaattcctttctagaactctaaagtatggacaagctactcagcttctccaaaccccaatcaaccctaatactcgtgtatacaatgacatgctaatacatcatagactaagagaacaggtgcgtattagcaactgaaggcaaacaagattccgcctgacctgtcaaagcaccaaagttcggtccaggcctcaggccgtgggtatctcggccaatctctggacgtcgtgtacatttatacagaatggggttagcggcctcgcagtgcagctgaaaaactttggtaggtaaaagacgtaatgtagatatagagggaaaataaggctgcgggggtccccgtatgcaaatctgcgccttactgccgaacgcgggcgctggcgcttccgcacttcccctccagagcacccggacaactctctggcgcgggggcggagatttgcatgtgcgaaatcgggaagagggggaaccaccggtcgaaaaccccgggcgggcctcgggcggccaaggagcgcgcccggtgcaccgcccggcccgcctccggccgctcggccagcatgacgtcacgaacacgcccctcggctttaagcggcgctctcaaggactctggaggagggggatttctcagggaccgacggcttctcacgcgcggagtcgtcgctgcgcgccctcacggagctcccggcgcgagcgtgcaggctgtggtggctctggaggaagtaagcgcactggcccgcgcggggtcgcgcgcccgccgcgaggctccgccccccgccccgggtaggcggtggcgcgagtgacgtaagcagcgggaaatccccccccctccccccacgttccgccgggcggtccgccccgccccctgcccctgccgcggcatcctggcaaggcgacgccaggacactagtgaccggagcgcgaagattcgggggtgggaaggtgtgagccgcaaacccagaggagccgggaaagaagaggaggcccgggggtggtccgaggacaggcgtcccggctgcggaggctgctcagcctcctcactggttggctgactgacgggctagctggctgactgcctgcctgaccgactgcctggctgactgactcactgactgactgactggctgccttgcagcctcgggccggacgctggaagctgcagcgagcggcgcgcggagccgagccatggcctcgagtgagtaccggggcgagcactcgcgggtcacggggaggagctgtcgggggctccgtttggggttaggacggtctgcctttcaagtcttctcatctggcaaattgtcagccgtttgaaaagttgcccgctccggggtttgcgtgtgaaatcaaagcggcgcactgtaatctgatcttctcctaatagccagaaccttcgaaattcccaacggtgtgcttttaggatcacagggggtaatctcagtaaaggagagcagagaagcctcgcgtttaaagactcagtggtatggagacccagttttacatttttgaacaaaaaagaggaacctccggacctcagacgagctttctttttttaagtccaatcgtgctagcggctgacactggtacagaatgtggcgtggctgtgaaagtcctcagtggcgttttaattcgttccaagcgaaaacactacccccgcccccacgagctaaagatgttgcttgtctaatttaccgtgtagagacctcgatcccttcaacccccaaccccaaacctgcacgcgcgttttgttagcagcaagaggacgagatttgattatactttaaagtaactggtagggttgaaaatgtcatcgtttaatgtcagtgttttatctgccactagtaagttttggatcatctgctttgagggggacatttataagaaacagtttacaggacaggggagtttagtatgacagtcgtactatatgtaaagcaagcacttgaagcagctgagatggtggtgggagctaaaaatgacaccttctgtctgtagcaggacgctgacccttatcttcccagtgaccctcagtagaaggcagccgacgtctggcagagaagaggaagtagaaagcttagtgaactctttaagagttgagcagaacaatatcataactcctgctgtaaaggaaactggggtgtttcacatgacacttgatttcagtttgtctgtggttttcatgagaaaacaagtgtagtttaaaatatttcaactttctctttacccatttaaatgaagccaggctttcagatgctctagtaaatttgtaaatttaactcatgttctgattagaagcacaaaaaggctttaagtatttaattcattggtaatcagaaagagatttttgtatgacatttgtaaagagtggcaagctttgttaaaacagttctgtccttgtctacctaatagaatcttattatatagtgtatgaatgcaatacttgaatttttttcaacagaaaagtcatttattaaagaactgtaagacagatatgattttaaaatgtaatacaattgcaatttgcctaaggacatatattttgtgctgttatagaaatgattccaaaagttaaagtggggaactttttaaaagaaatggcaagttttaaggatttagaagttgggttgggcttgcccagcttctgtgaagccctgggttcagttctcagtactgtcagagaaaaaaaaaaaatcccaacaaacatagaaaacaaatctgcaagttgtagtatcattatcttcttgctttttgatcttttatcaagggttgcactaaatgagactacttaaaatacaccatgtcatttaaattgtaattctgctatttgaagtttctaggcaaaaatatagtttaaaggagtctgggtaccttatatcagttataaagaccaaatagagaaaaattatgaaataaatttaaaattcccattccctttgaaatactaatttaaaagcaacaaaactgtttaacttatgattatgtaatttagatccttttttttgcaatatagtactgaaacctaggaaagtattcatattgattaccaagcattgagatcatttgttcattcctctccgatgtcatatgtaaataggtatgtgtaattgaataggtggtgcttataaatgtaaagtgtcgtagataataatctcctgggcagaattatataaatgttgtgaaaagacaggattttatatgatgatactaattattgttcaggtaaattagcaagttaagacttcctagctagccattaagctgtttttcattgccttttaaacaatactgtgctttgttctagctttttgataagattaattatagcaggcaacatgggaaaaaaatgttcctgatcaaagatctgcatatttaagcagtcattattcaaacaattgtattctatttaagttagctgtcttgtgtccatatctaaaaattttcactatttcnnnnnnnnnnnnnnnnnnnntggagggaggtgcacagttgccttgtaagatacatactattttactaatgattaagattgtctttggtgaaatgtactttaaaatttagaaagtttgtatttagtcacattttttttctttaacatgattctgctgtgtcacataacaggaagtataggaaggaattatttttgtggaccttactactcaccaactttttgtatgaatttcaagataaccttttccccccccccaataaaagtgaacatagctgtgtgacaacttacactttaataatagagctggaagttaggagtggccagctaaaacaaatgacttccttttttaagaaggaagactgttcacaaatacagatgtttcagaaacgcagcacatgaaaaagagataaaggtgttgtaatagtaggtgatgtaacaacaagaatgaatggagaaaatggtggatacagggtatatgtggtctctttctcaatttttttgtttcaattttctcccatatgggttctctgcatgattgtgtttatgggcacatgagctgaatattgcagaggaagatatattttcaaaaaaagtgttcctttgaaatttgtacttaattggatctcttgtatttttaagtctgaaatctttttttttttaaagatttatttatttattatatgtaagtacactgtagctgtcttcagacactccagaagagggagtcagatctcattacggatgattgtgagccaccatgtggttgctgggatttgaacttgggacctttggaagagcagtcgggtgctcttacccactgagccatctcaccagcccatctgaaatcttaatagagatgatttggccctgccatgaattttttatttgaggaaagacttttaaacattacttttgtattctagtaggtaaaaacctctcaggactggtttttagtttgttgtttgttttgtttttcccgtatccacagcagtgatatcttactgcaaaccgtttacacggctttggttggccttgtgatgaatactcagcagaaagttctggatggagatgatatttggaagtgtatgattattagctgcttgctcctttgcgttccaggcaaaagctgtttccctaggatttcatgagaaagaagcacactagtcagctcttctcaaccatgcttactatgactgccatttctgtgctgccttgtaaataacaaggctcagatatgttttatataaagggaaatcaaaggccatcttttgaatgttttctttgtttcagttgaatgaggttggttggttggttggttggttggttgggtgactgggagagtgacaacttgccagacattttttgcctgtcttatccataattatgtctatgcttggatccgagcattgggttacttccctgaacactttgcattgttgtttttacttcttcatgtcttaggcagttggtcttcagagtattcagattaatttgggatgtttctgcagaaatctgtctgcactttattcttgaagtgtttcatttctcctcagatctctgtgaggttagatagtggtttggcttctgatatacagccccagaacaaactctgttctagggactttgaatctaaatattcaccttatattcttaagatagttgtatttgttttaggttataggttatggccatatctgttattgaggttttatgcttaacaacttttttcttgttacataaatttaaaagttgattttattttgaaacttggttgtaattacacctctgcagtttaaagacacctatgacttttattctttaaaaaaataatctcatggaagagtttcacgctatcattctttccctagctcttctgtggctatggacccagaagacatacatccatttggtagtcagatttgttagttccttggattatgactgcctcactgctatattattaaaaattgttactgtactgtgtatatatgtgtttatgacaggcatagtggtccattccttcaatcccagcacttggaggcagaggcaggcagagctctgaattcaaggccattctgctttataaagcaagttacaggccatccagaccatacaatgaggctgtctcaaaaaaaaaaaacaataataataatccttttcctcaaaattttatattattttgaagttttagcatctctaaaatgaacagcagttctctttatgaagagtaaagttaagagaatctgtgagaaatacctatgtgtgtgttttaattggtattataattaattatatgtaacatattctcattgtgtacttaattatggcttctcattctagcaatagtatttttgttgatatacctattttatatataattgtggcaattgatctatttttaatgtttctaatgtgaaagaaatttctaattcctttttaatcttaaaatctaatttttaatttttttaatcttaaaactcatacttgagattttaaataggctcagtgttttcaaatagcattctcttgcacctaaatgcaaatgaaatcataactatagtgcaagcattttagttataattcaaaacttattctagtagatattagcaattcaaaatttataaaaatatatttaaaaaatatggagaccaatccagactttacacttgtcctggttaaagaaaaataccttaattaaattgtttagaaacaactttgaaaacatttctgtgcttttaaaactcatagtgactttctgtaaccttaggtaagagtatttgttttccctaaggttccttggtttataatttttccttcgtactctccatagaggactacagtttttaatttttcatcttcaagaggaatggcattgtaaaacagtaccaaggaagaacatgattggatcattctactgacacatgataccaatgatttcctagctaggagggctacagttaaatcagaatatgaacacatatgaggaagcatgaaggtgtagttgttctggtacctacaaagtactgggtttttttttccagttattgaggaatataataaggagggactgataatcattaatatagtcctttaatttttgaatcactgacacaaaagagctttggaattttaattttcacacagatattaatttaggacattaataagtaatacaatttctgccattcagtaacttgaagaagtaaaacatgtagtttcatttcaataacaaagctgggtatggtggtagaaatctgtagtcgtggtatttggaagatcggaagttcaaggaaagcctcaagctacacattgagtgaggcctgcgtagattacttgagagcctgtctcaaaaaaggatgtagctcaattgatagagtagctgcccagccttgaggagccctgattggacccagcattgtacaaagtctgtggtagtggagcctataatttcaacactaggaaagtggaggccagaggcttagaagttcaagatcagcctaggctacaaaacaagttagaggttagccctagatagataagacactgtctcaaaacataaagaacacaatagttaattttccctaaactaatggtttttttggggggggggttggttttgttttgttttgttttgctttgtttggaataattgctcttaaaaattaccttgattgtttgtttacaggacggaaaagttattcccaatagggaatgtagactataaattctgaaatttgtttttgagtgagacttgttatcaatgaagagttcctttttattgttggtatatttttgattttttgttttttgagacagggtttctctgtgtatccctggctgtcctggaactctctgtagtccaggctggcctcaaaaatcagagatccacctgcctctgccttcccagtgccaggactaaagttgtgcccaactatttcctggctcaatggagaatttctacaagaagaaaaataaatataaatgcatgaaattacatgacaatatttaggtaattcttattactttaagaaattttaaaaatacttagtcttaggtcctttgtatttcatagttttataaatacactcactggtttaaagaaatgtgtaacttgctttgaataaccctgcaatgttttttatatttctcctttaaaaaaaatccagctatcattaatgatatcattaattatcaatttctcaccagaacaccttttaagtagtgggctgggatttatttgaccatttagttcaaccatataagttctttaagatgccactgaaaaaaatcatgttgaatttaacacatttgaagagaaaggtacattctcttaagtagtcctacaagaatgcataggcatataagatatttaaaattacgatgtaatttttacatatacagtgatacacacattgtaaaatattcatttgccttatatttccagtaattactatggactttgttggattaaagtagttttctcttttgtgtgtgtgtgtgtgtgtgtgtgtgtgtgtgtgtgtgtgtttgttgtttatttgtgttcttttgttttgtttctggtggtactgagtttgtacccagatccttcagcctgctttctgtcatttgaataagcaaatgagtgatagattcaaatgcaagaggtctaaatcagaatgaataaaattaaaggtagcagcaataatttattgaaaaaccacatggccacaattgattctcccctttgcccccaccccctgtgtgtctctctcacagggacctagtactcactcattaggctagtctggcaagccagtgactgccaaggttcctcctatctcctctccagcactggcttacagggatatgctaccatgcctggctgtttttatggatgctggggcttgaactcaggatcttgtacttgaatgtcacgcatttttctgactgggctgttttcccagactcttaccactagtggtttatttctctttgatgtttagataccaaaatatgtcagttttgttttttgaaataatcttttttctttataacagctatatttcagacatatccacatttttgctcatatgacaatactctccacttacctatagtctgatttttttcagttcatttatttgtaatcaactgtagtccaaaatgttaaaagaaaaatttcataaagttttaaataacttgttttagtcatttgttgtaattctattatattgttgttaacctcttatatgtgtgtatgtatgtatgtgtgtgtatgtatgtatgtgtgtgtgtgtttataggataaaatgtatgtgcatgtatgtaagtcgtcttaaactgattcttttcttttctttttttttttttagtctaaccactaccatcagaattctttctctagaaagctaatctgagcctttgatttcctgaataaaagcattgattgcttttcacatatacaacaaaatccatattactggatgtgcttggacttttggttctctttctaagagtggtagtgcactctacttccattggtggttgatgtcatggacaattacttccctttttctaaaatgtctttccactcttgttttgttacattttccctctcttaaactgttagattcctcttttgttcttattataactttctgcagaattttgttagtatttcccccttctgtacactaacatcattgcgatgactagtatagtcattgcttgctgttgggtatagggtccttccgagtagcagctgtgatagtgagggtgtcactttcttcaagagagcaacatctgaagtaatagtagtaccatttactgattaccacttgtatgtgtgatacttggaagaatttaacacatattttacagagcatattaataataagatattattaaacacagggtcttgctagactcttgctggatcttattttgttttgatagtagaactcaggaggcaaaaaaatcactgcaagttcatggtcaattgggtctacatatacatagtaaattctacaaggaaaagaaaagtgcccagtttggaatagaccatgtcccatgctatactaaaaaactcattgtttcaccatttctgaagcttgtttacattctacaggataagccttagtgaaatgggtttatggtttggggaatttatactcctgaagtaaaatcacatggttacctgccttaacatgaaaacacagttattttatggaccttctatttccatgacttggctaaagggtgaagatgcatatatttttaaagttttattgacatatacttaaaactcattataatataataattatatataaactttttttttagtttttttttttttttgatatgagatctcattatgtagccctgctggcctggaacttgctatatagttaagactggtcttgaactcacagagatcagcctacctctattaaggcctggccctccatacttggaaataccatccttcaaactttctcatctaccaagtttagacaaatagtgatcaccttttttttcattatagattagcttacatttctggagtttcatgtaaatggatcatatagtatgtgcttcttttactcaacacacttactttggtagttatatttatagtgttttatcctaagggtacgtatgttgaattacatttgttatggaaggtaaatgactttgttatctccacattatgtgttacattttggagaagatttagatgggaccgatttgaaagttcagttgagcttaaagtcagtatactgttttagtatattgtgtacagatcctttgataatccagactcgcctatgcaaggacgtaagtccactttaatttttaatgagtgttctttcatgcagtgattgtctaatttaaaataaagcagttaagtacattttactcagttttggaatataatgtacttctgaatactattttcttcacctttcttgggaaatgttggaagaaaaactttataattgccctcatgtggacaggtaactctaagagttgttatctcacaacttaatacactcattaggtatagatattaagcaataaagaactcaccagttatgtgttaatactacataggaatttagtttgtataaggaaatgttatcttcatcatttaatctttgaagattacattttaactttgttatttaatgttgggaaggaaaaagatctttgttttttttaaaaaaaaatatatccattaatgtctattatattactattctaatctcattgcactgttctttttaaaattttcaggtggatataatccatacgtagaaataattgaacagccaaggcagaggggaatgcggtttagatacaagtgtgaagggcgatcagcaggtagcatcccaggggagcgcagcacagacaacaaccggacatacccgtctgtccaggtaatggcctttcttcagtatctcacttttaagggttcagtttgttttactgttttctagacagggtttctctgtgtggtcctggctgtcctggaactcattctgtatagacaagactggtcagagatctccctgcctctgcctcccaagttaagggtgtgcattaccaccacctggcagaagactcagtttaacagtcttttgcaaccccctttcttctttgcatttgctctccaatagctagatgtgtagggttatctcttaaaggaatctttcctgcttttaaagttcatgtagtaatataactgcagtgattcacagtgcttactgtacactgacagctttggatcggatccctcttgtaacacaaagcatttaatgaggaaaaagcattctgtacgtatactggtcaagggaattattgtataagttaaagatggatttggaacattttttgaccttttagtatagagggtattaataactttccccttctttttttcatacctttatgcttacctcccaaactctgagttattaacatcatttaaagtatcgttccttttctgtgtgtgtaaagtgctcttttgtgtgtgtgaatgtggacactcgggtaccttagtgtccatgtgggagtcaggacagcattcggcaggttggcgtcttattcttgtgttttgagacagggtgtctttgctgtttttccactctatctatacacctggtccactagtttccagggttcttctctttctgacgctcatctcctgataggagtgctgctactacaggctcaagctactggtctctttatctttattgacagtactagggattgaacctagaatattaggaatgataaacaagtgttctaccactgttatatatccctagcctgtgaaaacagtgtttttggttgaaagtgaatttagcaaatataccatttttataatgtatgtttatatttgatatttataaattacatttccttttaatttttataatctatttattcatttattcatgtttagtgttttcaaacaaaattgttagccccaaacttgtagtgatcttgcctcttgcctctgtttcttcatactggaattacagacatgtgcaatcatgcctagctaatttttatcgtttaagtgccaattaaaatccttaatagcgagttggtctggtagtacatgacaagcattgggaagcataaacaggtagatattgagttgtggactacttacctatataagaagttccaggccagactgggctatttaaacaagaccttgtctctacaaacaaatgaaaacaaagttaatagaagtcaggggcagtgtcacccatcaaaatctcatctacttgggaggctgtggtgggtagatgccttgggcctagaaacttgtatggataaaaggaagactatctcaaaatggagtttgaaatgtccttaatttttcaccaatagatctgaaattactgttttgtaactagcttattatttacagtttattttattgagcctaagaagaattacaaaattgccaagttatatatagattcccaaatttctgtttttatatttttaactgatacagatgcttaaattgtacattttaatgggatgtcatgtaatatataatacatgtatacatcatgtaatgcttcaatcaagttaaacatacttagctcctcaaacatttatcattccttgtggaaacattcaaagtcctcctagttttttgaaatatatagtgtatttgtacaataatatgcctaaaggcttttgtcctatctactgtacgaacttaattttaagaaaatattttatatatgcacacacatacatatatatatatgtatatgaatgtgtgagtatgtgtgtacatgtgtgtgcacgcataggcccatggaggccagaagagagtatcagatcccttgaagctggagttacaggcaattgtgaactgtgtaccatgaattctgcggtctgaactctggtcctctggaagatcagcaagtgcttttagctgctgagctatcactccaggcccataacttcatgtttttaaatcacactatttgcaataatattgctttgaattatctaaattctttctaagtgttcaaagacatacaatgaaaagttaatttaaaattctttttttccaacattgtgagtcatttttggcttctcttaaaaaaattgtgttcctaaagcattccagagcagtgtgtcttaactccttactcccctactccagttcatcctggtagacctggaagtaacacatgcagctcagagcacagtttgctgctgtctacagggtgcagccagacacacaaccagttctggagatggttcttcagataaattttgaggagatgtttcagatacttttgaaagaaggtgcctctgaagaggcaggtcttgctctcactcctttgatggtcacaccctccaccaagatcccagctttcccttcacctgtggcgtgggtacagtcagggatgaatttcaaaacctgcttctatttttacttcctttaccacaaagttttttgttggctatgtggtcttagaggactcaggctttttttttttttttttttttgacacttctctctctctctctctgtctctctgtctctctctctgtctctctctctctctctctctgtgtgtgtgtgtgtgtgtgtgtgtgtgtgtgtgtgtgtgtgtgtgttctctccttatgctactgtgagatacagagattgaagttgttagtggcaaatgcctttacctgccgcaccatcttaccagcccttagttcttcttaaatcatcttactttattcatcaaaattatatgtacagtttgtattttttctgtcccaacaagtctttgctgtagtaatatataatcaggggtttctactctgccttggatcatttagttcccaaattaaaaacttaaaacctttatatttatgttaagcctttaaagcactagagctgggcagatatctaccctctaagttattagtatctactttctgagttacaacttgacatgctatgcctgggccactcttactgcaattggccagcccttatggccatgctttcatgattcacctaccccatggtatcttttcctctctccaccttctccttcttccctcatggtctcctgcctcagtccccacgcccaggaaccaaaactttacccatctctcttctgcccagctctaggctatctgcatctttattgaccaatcagggataagttgggggtcaaggttatatttggtgtacatgaggatcttccatctcctgaagcaaccagggccagtttttagcattacaatacatagcaacagaccaaacctcaacagttttaagttaaggagcaagttttgtacaaaaaaggctggtaaatataagaactatttattttggatttttgaggcagggtctctttgtgttgccctggctgtcctggaactcactctgtagaccaggctggccttgaactcacagagatctgtctgcctctgcctcccaaactctgggattaaaagtgcaccataatgcctggcctgcttacctgctttaaaaggaaaataaacagatgataaagctagataaaataagggcagaaagaaacattttaggaattgaaagataagttttcccagctgatatattctctgaaaactttaatctcaagtaaactgctgactatttgaattttattgcatgctgactacattatataaattgaacttaaattaatggatcaattctttttatttgtttgctttttaaaaggggcattattgtaggtagccctggctggccttgaacttgtgctgatcctgctcagccttccaaatgctggggctataggcatatgctacaatacctacctattgttaacaagatatacatacagactgtatatttaatttcccttttcagattatgaactactatggaaaaggaaaaataagaattacattagtaacaaagaatgatccatataagcctcatcctcatgatttagttggaaaagattgcagagatggatactatgaagcagaatttggaccagaacgcagacctttgttgtaagtatacagtgacagaaaccttcagcaataggacaaagatataattttagtttatagcaaaataattctgtatttaacttactgtaacatgtacattacattttaattacactttgttacctgtggggaggacacacgtgcttggggtgcatgtggaggtcagagttggctcagctggtggagtcggttctcttctccaccacgtggaccctgaggattaaactcaggttgccagacacctttacccactgagccatctcaccaacctgatattaaaatttttgttcttaccacttgcattcatcctttattaataggtacgcacatgatagttagtagaaattcttcctaatggcacctagactgggctcaaacttactatgtagaatgtctttgtacttaccttcctgcctccaactcccaagtcctgacattagaggtaacaccaccctgtctggctcagtaggagtattttttatgttattattttgttttcctttgttgttcttttgtttttttcaaaacaatttctctgtgtagccctcactgtcttggaacttgctctgtacaccaggctggcctcaaactcaacctgcctctgcctccccagtgctgggactaaaggcgtgccctacctctgcctggcttccccccccccccttaagacagagtttcctgtaggctagggttgccttccagaggattcagatactgagaattagaggtgtgagatcatagccttaagaccctgcctccagtttatgaggattgaacgtaagactttatacatgttaggctagaaatctgccaacatatccaccacttcttattttttaacttttgactgttttgagacagaatctcactgtgtagctcagcttagcttccaacgtgtagtgatcctccttcctcagcctccagagcaccggggttataagtaagcatgcattaccatgtctggataggtatacctctttatattgttgaaagtaagaaaacatatgttgtgattaatctcttcgttctgtatgttctacaaaataattgtgactatcctgtaatacacagacataatctccaaaaagttcttcttattaatagtaatgacacaaaacacaaaaagccctagaagtacacacttgacaagaaatcttaacgcctgcatgtcttgatcttccagcagtgtttcaaactttcagtcagtcatttgtgtcttgaatactctttcttgatttctgtgaagacaaacttgttgtaacctgtagttttctggctgttgttcgatggcccctggtttttatcttttgtcccactctagtgatatatatatatatattagttgttggggtttttgtttgtttgttcgtttttgaaacagggtttcctctgtatagccctagatgtcctggaacttactctttagaccaagttggtcttgaactcagagatctacctgcctttgcctcccaagtactaggtctaaaggtgtatgcctccactgtccagcttagtgcctctgatcttatactgcagtcaggagagtgttccttcagtctctgttcacagtgttctttcagagagatgtgatttacttagttcacaagacttgagctagcagggttgttgtttgtttgtttgtttttaaattctagtagtatcataggccttgtaagccctttggactcttatgtcctactcagtggcaggaaaacatccacaaaagatatgtgagtgaatgaacatgcatgtgttccaatacaaactttatttgcaaaatgagcagtatgctgaatttggcccatgatttagagtttgccaaccgtccattccagacactaagttccatgaagagaggaaaatgtatctccattccctttgggagttttagtgcacaattggaactccagaacgtgttgaatgactatgaaaaagtacattgagtgaatgatcagacgccccatgattcttagcttccttaagtcagtgctttcgcctctttcccttctttcctttctttagtactgggctgattccagggtatgatgtgctagacaggtaccacactactgagctaaccctctgtgcatacccgatgaggttattcagatgaaagaaaaccaagtcgtgtatgttagggtgaagaattattttgttgcaggatttcaagaaaggattaagaattgacaatttattttttgttattggaggaggaggaggaaggaagtggcaaagttattttaggtgctaatgaagtcacaggtgtgagtgccaagcatgaagcatgaacatacagtaataggaacatggagtaaggcaaaccaggcagcctctggctgcaagtgccaagtgaagtttgaagaaacagtgatgttcttatcatttgagttttgcttccttattcacacccacccatctcagatgatgtcatggtttttccatgtgggaacaagtatgactggatggtggtaggggagttcccccatcatcatttgtattacacatatgcaaatgagtaatatttgtagctattgagaagttttccataaatgaccctttgaaactgttgctaaatattgttagtattaaccctctctaataaaaatacttcatttcctatattgtaatcatataacatggcataaagtgtattctgttgtcaatgaaaaaaattgaggccaggctaaagtacacagcaagaccttgtacagctgtgttttcatatatttcatggtacattttttagtgatgagctaggcaggcatcataactgagcagagggaatcaaatataagaaggctagcccggttcctcatcagagtggataactgtgtgtaagtggggttacaggtgctcagctctaacagattgtctctgtgcccaaggagtgctagcaaacctctgaaatgttcatgaaaccagaagagctgatgctcagctctgatcacctcactcttaagtttggtaatgtatatatataatttttaaaatgcactagccacttctatacattttttaaaaatacataggttaacactgctataagtttagcaaaacatacctgcatatttcagggtccagctgtctttgtaccttttgatacaccaattttagtaaattgatcatgagtttgtttggaaggtgaaactttgcttcttgatggttttgtttgttttacttgtaatgtttatctaccttggtatatttgactaagcctattggcaaaatgtaattataaaatagtatatttgacagttatataatactctatatacttttttagtttgggacaggttttcccataatccagggtagcctaaaagttgctaggtaaccaaggtaccacttgcctccatctcctagtgctagaattaaaggcatgtcaccatgtgctctatttttctattaacaattctcttaggcaggcctatgtttgtttctcttgtatcttctttattatcacagtcagaaacaggatctgtgacctagaggttggtgtggcagagagctgactttctgagtatgtttgatttttgtcatacttttgtttaactatgatgtgattttgaaagtttcattttttgcttttagttttcaaaatttgggtattcggtgtgtaaagaaaaaggaagtgaaagaagctattattttaaggattagtgcaggaatcaatcctttcaatggtaagtgctttgttataatttctactatttgtattatcagtggactgtgatttctatttatagtataattctacttgttgacttgtatttaagtggaagcctcccctcccttgttgtttattttgacgtgaggtctttatatgtagctctggctgctctgttactcactacgtactccagattggccatgaactcctagcaatccatcctcattggcccccaggttctgggattgtagatgtgagccaccatgctcagctaaaacagaaaaccccaaaactgaaaccttctccaagtgtttttgattctttcaatatgcttcttctttatgccagtctaccaaccatcaggatcacccttctttctgagtgttggatggacactatgttataaagtattttcctcctttaccaccactgttatttaatagtgatctcatacagcccagccagcttgaattgctgctttgctgaggccggccttgggctcttgatcttcaccttctaagttgtcattacaggcaagagctccatacctggccactcaaaatattttttagacttctcttgattttttgtatgaatgttttgcttgcatgtatgtatgtgtaccacaaatatagctggaggtcagatctctcagaacttgagttgcaaatgtatgtcacatctgcaagatgtgacttggaattaaacccaggtcctctgcaagaacaacaagtactcttaggtactaaggcatctcttcagcccttcaaaatatttttgtagtctgtttttgtattggtaaaataaatcttactgtttagtacattttattgtgaatagcacttactaagtggtttgtttttattttattgttttggggacaaagccttaccacattaaaaaaggctaatttcagatgccttgtcctcctatctcaagtctccctcctgctggggttatagacacataccaccatttatagtttaagcatttgatgtttgttgttgtttttgtttctgtttctgcttttgagacagggtctcatgtattctgcactggtctcaaactcactatgtagccaagaatgaccttgaattttctgatcccctgctccacctcccagtactgggatccttcacattcatcataacacttggcttatgaatcattggagattaaactcaaggttttgtgtgtgctaaagaagcactctgccaaatgagctgcttccttggcctttatgacactcttggctatggcatctggtacctttagcattctatattgttaagtaggtaaatgattcctaagtgtatgcagttattctatgtacctattttagtagttttgtttgcctaggcatggtagaacacacgtgtaattcaagctacttgagattgcatccttaaacttactgtgtagctacgggtaaccttgaattctgtttgagcctttagtcatttgaaggaaggtaataaccaattgtatgtatcctatcttcagtgtttagtgaaaatacaaagatgtagcagatacacccattctgagtgcataagactttgcctgataggatagaagtggcacttgtaggtgacagtcatgtaagattaaaacctaagtacagggggctggtgagatggctcagcggttaagagcactgactgatcttcccggggtcctgagttcaaatcccagcaaccacatggtggctcacaaccatctgtaatgagatctgaagacagctaaagtgtacttacatataataaataaataaaatcttaaaaaaaaaaaaaccctaagtacagatctggtgctgcgctgactgagagagaagggatattttttgtattccaggataaagtttaggctttatagaaaattagttccgggtagggaatatgaccaagtaagtgaagtaagcatgaagatctgagttcaatctcagcatccctttgacaagagctaggtattctcaacaccagggaggtagctccaggtggagttctggagctggcaaggctcagtgggagaccctgtctcaaaaatacttagtgctgatacttagtgctgatctctacgtcctcacgtatgcttatctgtacatactgtatacacacacaaagcagttattaattgaattttcagcttttactctgatccagatatcccttgtgattcctggttgtcagtagtttttaaccatgtcgtacagagatgggaataatattgataaaataaaaactggttttctacatactgaaaaaattcaaagcaaaatatcccaaattataatcttttgtgaaaatagaatttcttgtctttgatagaatcatgggatgctaaatacatttatattttagtttattagccattttatttttctttaataaatcattttactactttaaactcttatacttgaataaatccacccagatacagtctttcatgtaacctcaaggcaaagaaacatttcccccactcccaaattgtctttgatctttctcaatcatttctttccttccagctcttgccccagtcaacagctcatctcctttttgtcagcacacctaatttttctagggttttatagaaatggaagtattcttttatattctatattctttcctgcctggctccacttggtcttactggttttgcagtgtatattgttggaaaatataaccatagtttgttctttattgctgagtatttgttcattgtatgactatactacaacttgtttctattaacagaaatttatttgtaaactgtcaggagcacctagccattcattgtttttgtctgtctgtctttctgtctgtctgttttgttttaatattgattactcactttgaaatgaagacactgaaaccttgagctcttaaatttatattgctattaaatgagactttcagtagtcctgcactcttactgcctgtcctggtcccagcaactgtgctactgtgatacaggtgctgccctcttagcattttgaacctcatattttccccttgaacatggtatgagggtgcgtacctaggtatggaggcaaaaggactgcctcagatgtttgcctccaacattttctgcctcccttttttgaactggggttctcatctgcgggcttagatggcgaccagtaccctgcttctgccttcctggcactgagaatattatcaggagcctgactactactgcacctggcttcattgcatgggttggagggttgagctcatacttgcaaggaaagtactttaccgactgaatcatctctctcagccccattttgacctttctagttgtacaagtatgttttcatagactcaaatgttaggcttaagaatgctgatactggaataaatttcagtgttagcataactcctgagactatttgactggctttgtgtgagatatgtttttttaaataagttatcacctgtaagactggggaatttagctaattatttttcatatttaatcttttaattttaatactagtgtcctttccaagtaaatttttcatgtaatttaatgaattttatgtttttaaaatatggcatatattagtaacaatttattgctataggcttaaaatatttcaaaacgcagcaatattttgttttagaaatgggcttcttttcaaatatcaatgcaaagagactattgtactatattctgtggcaagtttttgtatttttttttcagaactgtaaaaatgccctggtgtgcagtttgtttttaagctgacttgacttacacataaagttatatcatctgatatctttttcacattgcatctctaaaatgctggtgcaatatgttaataagttaatatgaccctctgcttcaaatttccatgctattatttagctgtaaaatttattatttagacaaataatgtcatctccttaaaatcaatgtcttacctataagaacagggatgatggtgatttttgctagatttagaacgtaattacagactgggccaagtgttatgttaaatgaagtatgcatgtttcccattgtctataacttgtatccatatttaagatttttgattttggtggtcagtttatgattctgcccttaagttcctagtccctggtatagtctctctctgagcatggctacagtctgttatatactgttaaatagtaactgtacaataatgaaaactgttcttgagattgaaccccatcttagttttctgcagacgtaggtgcgggttaaggttattggatgttgtgggcagagagaaagacagcaggattttggtaataataaagtattagtattatgtgttctacattctaaatctgagattgtactgttcagtccctgaacagcagctgctggacattgaagactgcgacctcaatgtggtgaggctgtgttttcaagttttccttcctgatgaacatggtaacttcacaactgctctgcctcccattgtttctaacccaatttatgacaaccgtaagtgctttaattttcttatgtctgtacttttagcttgtttcatttccttaactgctgaaaagtttaaaggatttttgcaatttgaaaaggagtatgttaggtgggattggtggtttgtgcatataattctagcaaccagaaggctgaggcaggaggataaagtttgaaggcataatggactacacattgagaccttgtctcaagaaacaagaagaagccaggggtggcggtgcatgtctttaatcccagtactcagagatagagataggcagatccctgtgggttcaaggccatccttgtctaccctgtgatttccaggattacataaaaagatcctgtctcagacaaaaaacaaacaaataaacaaagcactgttcattatagaaaaaaaaaccctcaagcatatatacatatataagaaagaagagcaaatcaccattagtctcctcctaaatggccactgtcctcaagcatacactgtagtccctttgaataagcacagacaccaccatcttcctcatcaaccccattcacccactaagtttggcaacttaaaaaaaaagatcaatgatattttaaaaaaaaacaactttttttcaagccagtagtggtagtgcatgcctataataatagcacttgggaagtccaagcaggcagatcaggagttaagttttcctttaccatgtttaaaaatgggaattcaagaccctactgtgtcacatgggatccttcctcaatagatagagacagaaaatcccagaacttttctctttgcaatgtatcttgaacctttttcaatcactttttcttttcttttttctttttaaacactgctggcatttaaccaggacattgtacagagctataccccaaaccccacttaggtttccagtagctgaatatttatctccttccttccttccttccttccttccttccttccttccttccttccttccttcttccttccttcttcttcctttctttgtgttgctttatacttttttctttttcttttttctcaagaaagggtttctctgtgtatcagtcctggttgtcctaaactcactgtagatcaggctggccttgaaccacagagatccacctgcctctacttttgcctctgcctcccaagtgctggtattaaaggccagtgtcaccttgttcagaagcatatttttttatatgtctatatattaattttaagaaatcattaatatggagtataaaaaataaaaaagatgacttttaagaatcatatttaagaatatatttggtttgtttccttttgtaagcaaattataccaaagtagatatatttatgtgtgcatttaaagacaactctctatggatcatgtatctgcctgtttatatgtgtgtggtcagaagacaacttacaggacttggctgtgctctttcatcatgtgtttccctgagatcaaactcaagttgtcaggctttgctgccttaactatgtcactggctcctgaatgtttatctcttatgcaaatatttctgacatttatttttaaaagaataacttttgacagatacctacatcaaaggatatagaagtttatttgaaaagattttaaaactttcctccaaaatattttgtgtatatacacacacattcaccagtagtatatgccacacctgatttgcatgtagaatactggaccataggagtatagaggtagattattcttaacagagagccttgggtacctttaagaactatcataataatattcggaagataaatgagaactgcattgccctagggatatagccagtgatataaaatgactcatttattcacagtgtgcctttaccaagaaacaggaggaagaggcaagaactgctcaagttaaaaggccaactagcctggtgtacatagccataagtaacaaagagactgtctcaaaagaggtaggagttgagggctagcaagcacctgaagttgtcctctgacctcttccacacatatgctgtgacatatgctcacctgggcctacatataaccacactcagacatactatagttataatacatacataaccacactcagacatacctcagcatagctataatacacacataactacactcagacatacctcagcatagctataatacacacataactacactcagacataccacaacatagctataatacacacaaaaaacatttagtttcctttatctatacattaaaattttatctattctctaaattattttcctgaaattcttccccttgtacttgtactggctagttttatgtcaactgacacaaactagagtcatcagagagggaacctcaattgagaaattctccttggaagatctggatataggaaaacctgtggggcatgttcttaattagtgactcacaggggagggccaagtccatggtgggtagggccgcccctgggctggtagttctgggttctgtaagaaagcaggctgagcaagccatgaagagcactccactaaacagcacccatccagggcctctggatcggttccggcctccagattcctgccctcactgctcgttttctcttttgatttatttgttttatttatatcagtacacagttgctcttttcagacatgccaaaaaaaaaaaaaaatcatcccgttacagatgattgtaaaccatcatgtggtcactgggaattgaactcaggacctatggaagagcatctgaaccctctctcccatccaccctcactgcttctgatgatgcactgttacatggaactatgagggaaataacccttttctcctcaggcgacttttggtcatggtgtttcatcacaacaactaacattaactaagacaatgccgagacccaatgtttttttttttaatcctttgcatttaggtgccccaaatactgcagaattaaggatctgccgtgtgaacaagaactgtggaagtgtcaggggaggagatgaaatatttctgctttgtgacaaagttcagaaaggtatttatcagctttgtttaattgaattagtagtacatatttgattaatatatgtattgtaccgtttccccattgttattattctttggcatcttattcactagatgatatagaagttcgttttgtgttgaatgactgggaagccagaggtgttttttcacaagctgatgtacaccgccaagtagccattgttttcaagactcctccgtattgcaaagctatactggagcctgtgacagtgaaaatgcagctgcggaggccttctgaccaggaagttagtgagtctatggatttcagatacctgccagatgaaaaaggtatggcaagttgggagtaatgtgtatacgtgtgtgtgtgtgtgtgtgtgtgtgtgtgtgtgctcactagaaacagctatgtagctacagatggatcttagctgagtgtggggattacagcagtgtgccttgtgctgtccctgctgcctttttaaatgtgctgctaggaattggacttagacttttatgtacactagcaagtgatgagctgaccaagtgacagtctctgctgaaggacagatcgtctaaagctgatcatgcttgtaatattgtaaaataaacattcgagtgcagttttatatcttcagaatctgtattttttttcccctagaagttttcacttgtgtgttttggtttggtttgggttttttttttttctcctactctttgcatttcttaagagtttgaataattttagagttctttttttttttttttttttttttttggttttccgagacagggtttctctgtgtagccctggctgtcctggaactcactctgtagaccaggctggcctcgaactcagaaatccacctgcctcccgagtgctgttctcaaactgttagattatattttccatctatatatgtatttttgaatttattttctgtactttttatacccttttataggtgggaaatttggtaatcataaagttgtatctattttggtccaatgtgttagttcatgttgacttacagttatttttaggatgaaaaattattattttaagctttttaaaattaagagtaaagtgtcctttataactggtactggatgtattgtacagtagcatacttccagcctgtactgttcgcatgtattttaagcattgccacactctgataaggcgcttgttcctggtgcaggaaggaagaatcccatgacttaccgctttcccacttttctttcttaatcagatgcatatggcaataaatcaaagaaacaaaaaacaactctgatttttcagaaactgctgcaagattgtggtaagaatattttggattgagttatagttaagtaaatgtgtcttatttgctttattctgtttttaaattttttaagtgataagctgtttttcaaattacacttaataatagaaaaacttatcataccaggtcactttactgagaaaccaagaactgcccctctgggatcaactggagaaggaagattcatcaaaaaaggtattttatccactttttaggaataactgctttttaagtctctttctttcctacaatcccgcacactctcactattgagtgcagctaggctgtacctctgcaggttgtgttggaactaattatatttgagggattttattgttcaagaaattacattttgtccacacactggtgcttttgcttttttttttttttttttttttttttttttttggtttttcgagacagggtttctttgtgtagccctggctgtcctagaactcactctgtagaccaggctggcctcaaactcagaaatccgcctgtctctgcctcccgagtgctgggattaaaggcgtgtgcaaccactgcctggctcattggtgcttttactaatttgactgttaccatgtaagaaatggcatggatgtggtaggcacctgtttatagctgcttacactttgaacaaggctgtggcccttggggtcatgtactgtctctcagggccactttaaaaggggtaggaccacaggcatgctgaccacctgctgtcatgcccagacctagagtcccctctctcttctgctacagcaacagagctggacagttcccacagagattgcttcccacataaaccttaaaactgtctggccttttagagaggatattttgcaatcccctaacaaactctctgtcttgtacccttacattggtgctttatcctggtttctgtagggcttgtgtaatatgtacataaatgcgggcactgtccctcagttgtctgtggtggggaattttgtgagaccttaggtcatgtcttaagtgataaaagctatgtgcagttgtcagtcctctccttcttcccattctccctaaaagcagagactagaagatcattttggccactaggtacctgtttgttgaaattctaatatttaaaaatgtgcctatatggcacaagaagctggattttcatatttaactggaagaaaattacacatgccaaaataactttgaaaaacattttcatatatttatatggaaatttgcatgttacagactttagttttgaattcaagtaataattttatgctttaatttatttgatatgtgtcagtgccctagaaagtttttagtatgtttttataatttcaattcagaaataatgctttatatcaatttattcatcttactctataaaatatattttttcctctacagaatcaaacttattttctcatggtacagttttaccagaaatgcccaggtcttcaggagttccagggcaagctgaaccttactattcttcatgcgggtccatctcgagtggattgccacatcacccaccagccataccctcagtggcccatcagcctacaagctggccaccagtgactcaccccacctcacacccagtcagtacaaataccctgagtactttctcagcgggaacactttcctctaattcacaaggtatccttccattcctagaagggcctggtgtcagcgacttgagtgcatctaattcgtgcctttataatcctgatgacctagctagaatggaaacgccatccatgtcaccaactgacttatacagtatctctgatgtcaacatgctatctactcggcctctgagtgtgatggcacccagcactgatggcatgggggacactgacaacccaagacttgtgagcatcaatcttgaaaacccctcatgtaatgccaggctaggcccaagagacctgagacaactacatcagatgtctcctgccagtctgtccgcgggcaccagctccagttctgtttttgtttcacagtcagatgcatttgatagatcaaacttcagttgtgtagataatggcctgatgaatgagcctggactatcagatgacgcaaataatcctacctttgttcagagcagtcactattcaagtgttaacactctgcaaagtgagcaactgagtgatcccttcacatatggtttttttaaaatataagttgtaggacttaaataagtatatagaatattaagagaaagttcagaagtcaaaactttaaaagccgctactgtttcttactttgaaagatatgcctaaagtccacgtgcttgctgtgagttgttttctgtatttccccaagacaaactatgtatctttgctaatgtattagttaaatgagatgatatttgctttcaagcagatttaaggtgaaaaacgtgtaatggctatgccattgggaaataaactcattattattgttgaggcccataggccaaagtgacccctaaggggttttctgaggtttcttggtatttttagggtgtgtgtgtgttaaagtaagctttcaaggcatggaagtttttttttttttctattttctattatttaggcttttatctttaaagttacatgtgaaattagcttgatatctgtattttcaagaaaagttttcttgagccttttctttttagatgttctcattccgtttgatctcctaaagcctgtctgcttcactataaagaatctaaccaggtattttgggctcatgtcagtaatttccctacttgagatcgtaagttcaaaacctgcctgaactacatagtaagttaaataccagcttgaacagcttatggaaatcttgtctcagaaatagaaaagaccaagggtgtgactcagtggaggagcttgcgtaacatttgctaggccctgtgttcagccctatgaagaagaaaacaaaataacaagttcgttttagctcagtatatccatacagagttttgaacttctctcccagccttgtgtctccttcagccttccctgctctgtatattgtcacgccatgcttcccgttgctaagcaccttggtgcgcctttattcttcctttacctcccacatctgtctattccatcgtcaaacccagaaggccatttcctcagtatgcatccgaagcccaccgtctcctttgaacttttgtgtgagacaggctggcctcaacctgctatgtagccaacgatgaactcagccttcagttctcctgctctgcctcgggagtgctgggattactagtgtgcacccccccccccacacacacacagaggtttgtgtggtgctagagacaaaaacaggtctttcctgggagaagtattctcacagttgagctatctgctcagctcagaccaaccacaagcattttgtattagtaaaactgataaacccagacgcagctattagagagctcaacagatggtactcacacagtgacttatttcacagtttttcctctaagttgaactaaggtctgtctacatctgcatttagagtattttcaattgacgttttattttccagtgcctcttactgatcacatcattcagtttataccttacaatgcatttagcaacatgtttttcctttctctatggctgcgtttgtatttcacatggttttgaaagaattggccttcttttccagattctgcttgtgcacagcgtctctcctcctgtccccatgtcaccagttagttcttgcttcctttgcataaacagagtaagtatcttcttgagcttaaaaggaaaggttaaaaaatttcccctctaaataccaagagcccttcccccacagtgccctgtcctccacattttgcctcttccatcttctcacctctcgctcgctccttcaccttccatctctgtctttagttttcccagttccttgtcttcctgtcagcctttaccctccttgtctgtgctgtccatagcctggcacctcctgaaggacaggatcctgtgggacggggctgtgttgtctgcactctcctcagcaccgcagcttctcctgctgtgggatgctcttggtaagcagctgcnnnnnnnnnnnnnnnnnnnnnnnnnnnnnnnnnnnnnnnnnnnnnnnctggaaatctttattctttttcttcagtgaatatcttttccatatgtttaaggtttttttttttttgataccttattcctcttagacgttgtagttggaacatgttgaatttattcccacaggtgtctatagatgtaacctattctgcctgtgctcccaacacttagcttttaacagcaggcttctctgcaaggcttggtcctgctgctacagctgagaggtgcagctctgcctctctctgctcctatattacagaccttcagcggatggtagtcagttaagtgcttctcacttatctctgggactctagcatttgacgtacactctggcctaactggtgctgtataaatagtagctatttattagaaaagggggataattataaaatcatatttgaggatatagtttttaatgggaaaggtgcttcaccctgcaggaaaagtaatgatgccaagataacctgtcctgtgagacatacttctcttctggtcgactgctgctcttcctcctcctcttcttccccctcctccttcttcttcctctttcctcctccttcaaaaaactatacagacactggcacatgcttcatggtagagcatggccctgtgtttgatacccagaattgcaacaacaacaacaaaattataaaacaaaagtataaaaactaccctgaggctctttgatacccaaagctgttctcttggaaatcgtagtaccaccagtatagtatcaggtagaaatcctgcctctgtatggaaggttatatcctacataccccagcggtaccccttgacagtttaccatgcatagacatgtaagtagcctgtattcataacatttttgtaactgtatattgtacaatgtaccctgttccatgtagaaaataagaggggaatggtattcaacttttgttctcaaagatatgtttcttttcttatgaagaatcacatatatagtcaaccacagaaacatggacaaactttaaggtataatttgaagaatttttgattatattaaaacaatgcaaccactatgcttgggaccccagaagttctccgcacctccaaaccactgttctgatttttgagagcctgctgacttcctatccttttcttttgctaattagttctccatttggaaaaccttagtgtagagtaagtcagtttgttttactatgctgtgtcgtgtttccacagtctcagaaaaactatatttttgtggagagacttaaaattggtgatccaggttgtctaattgtaccatatcaagttttaatcataagttggaatattgaaagtttaccataagctgtcagacagcatgcaacaagataaagaagagagactgattttagtcagttagcctaaatggacctgctggtcttcagaaactcaggcagaaaatcacaagtttaaggcctgcacagtctgcagagtgacttcaagggaacaactttgtgagctcctatctcaaaatataaagtggaaaaaagggcgtcctgagctatagttcagtgatagagcacctagcatgtacagctaaagactcggtgcctaactccaaagaactaaaaacctggccttcctacttcctagggtgtggtttgtgctaagaaatgtctgaatagaaacaccgagttaaagattgtgtttctcatgggccctgattagtctattatccaaacattcttaaccacttgatacccagagagaaaaatcacagggtggataaacactttgggagacctatgagaaaagcaggtttctctttagacaaacgtctttaagttgccccatatggacctggctctctccgaggacactttcttatcaagggaagtcagttactggctttacttttggtattttgtgacttgatttctttgtgtaagttgagagtctttgggagtactttaactcctgtgacgttgccactgcagggtttcaggtctgttcagaggttggatgtgcacggaagaggatagaatgcttttgtgtctaggaatggaaagcccacgctattcttggaagcccagcagtgggccataggcatgaaggtgccacccaagtctatccagtttcatcccttgaatatttaagccgaacatcatggcagaatttaaacctcaaggtcaacagtggatgagatcaaatctcaaaagtgatcaggtctgattgttttcatgtctgtagaaaggccgaaacccacgcatgtcctcatcatcttttgtctttttggttggctttggggaggttgggtttggtttggtttggtttggtttggtttggtttggtttggtttggtttggtttggtttggtttttttcccaaacagggtttctccgtgttgccctggctgtcctggaactcatggaagtctgcttctgcctcccagactttatttattttttttagctttcagaactttaaagaatcacaaacaagccaggtggcactaacacactcctttaaaaccagcacccagggggcagaggcaggcagatttctgttagtttgggctggacacttactctgtagtaagtgtcaggccagatggggatacacagagaaaacttgtctcaaaaaacaacaaacccaaaaacaaaccaatacaacaacaaaagaatcacaaacaaaataaaaagaaatgttgactcctcaacaaattgagtttttagcagctttataatttttggtaaaataccaaatttacctatggtaatttttttctaagcttctttagccaaaatgtaacttctcatgagctggagtaaagtaaggctgaggcatcttgggataactatgacttcactgctcttagtgaagcagccatagtgatatatcctgtagctccaatacttggaaggatgaggcaggagggatgcttgagggagacctcagctagtcagtcaccagagaactttaaaacactattggctatggttaatagacccctacaaaacaggggaatctttgctgttgttttgaccttaaattgaatattgacctgcctctcccttctgagtactaggattgtaggcatatgtcaccacacctcacctaatgtaaaatatttagatttcagagaggaggggagcatcatgctgggattgaacccagggtctcatacaagttatggttggtgttagctctctaccactaagttgtctgcatttcaaactgattttatatgcttgatgatgaatgaatttcaaggctctgatgaaattatttttttttaagttctcaagatactggtacttaagaagttaagctttgtatcaagatgaaatatttttttaatgtcaagatgccttttattatatagcatattgtgttacttttgtaatatctttgtatactgtgatttttgttgatgtaataaatagaccattttctaaaaatgcttgttacagttttgctgtttgcttacgaaatatcagatttctttttttttttgttttttgttttttactttttcattataaggggtagctatttgggattgtttaggaatagtaggcatttttataaaatgttctcaggatacagtctatctgtaactaccctttgaaatagtagtctcaagaagtacttgaaatgccctttcaaggagtcttgggttggttagatggttagttggttggtttttgagataggatttcactggggttttgggcatgaaccaccatgctgttttaacaaggcactgagcatggaatctagggactcatgcatgctaagcaagcattctgctgcctgagctacatcttcagtccttgcaggctttggtctttattattttggaacagggtcaagctggcctagatcttgctgcatacttcaaattcatggtcttcccacctctgccatctgagtcctaggatttcaggttgagtcaccattcctgcctctccaacttcattctggtttaagctcacttcaattgcttggtttttcttctgattccatacatatctttgatgggtctgctaaaaatatcattggaattatgattgcttttgtcatattaacccatccttgaagtaatcccacatggtcacagtgagctaccttttgagtatgctgttcagtttgccttgatagcatcttaaattttttcatgtatgttcatcaggggtactggcctgagttttgtcttaatgatgtctttgttggattctgccatcagaatttggcagcaattcctctctgcttgctttagaagtcttgctgccaagcctgatgacccaatttacatccccagaaaccacatggtattcaagaactaaacttactcccacaaattatcctgacttccttacaaatgctgtatcacatatggacatgcacatgataaatataagaaatttattctagaaaaaataccattttccacaaatggaacctgatctttttagagaaactgcctattttgtggctagtgtagaggaaatacaaagcctgggatatttttattttacaagaatatgctcaaagaacgatggagataatgttagaagggcataggaatgagcttgagaattctcactgctcagagtaatatatagaaataatatcagtggcaaattaccaagtcattgaataaaatgagaatctattggtgacagtgctgctttgtcttggttcagtccctaacaccacaaaacaacaaaaaacaaaacaaaaaaaacacaacccaggcttcagtccacatccataaagtaaggaaatgagagaaggccctctctctcagtgggatgccattcaatacatgtgaaaagaatgacacacattagcagttatacttagaatcagtagtaactgagtcaggtagagatctttggtggattccaatcaaatgagtgaaaatctggtctatctgcaaggcactgagtagagagggaaaggacagtaagactggaagagtttgatagacaacacccacccctcagggactagaaagtttggcaagatgcaaggaggaagcatctcctccgtggtgtcctcacatcttaaatctagtaccaggcaaactggagctgagcatagcccactaaataactgggctgaagctgtgcaaccgcttcatgaagcttagcatacaccgactacaaagcaggagggctcggtcatgaagccagtgacagacaaactgatggacaacctcagcgatgtcttccgactagataatggtggtctgtcagagctcacttcctggtatggtgggtggcctgtgatttacaagatgtcttctaggaattatgcactatgtatgtatttgaaatggtgaggtggtgctgactcagcacctctgtgggaaagttcctttgtactttttagttaagttttgaatcattttgaaaggaaaaaaaaattaagatatgaaagtaattcttttttcataataataaaacacagattctgccagctagtttttatgttaactttatacaggctaggctatctgggaagagggaatcttgcttactgattgatgtgggagggcccggcccactgtggttagagccacatggtcagggctcatggccctggatgctatgcaagagcagactgagcaagccatatagagcaagccagtgagtagcactgctccgtgccttctgcttgagttcctgccctgacttctgtcagtgatggaagtgtaagagaaataaaccctttcttcctcatgtccattttaaaaccagtcagaaaagcttacatctggactgggggttgtggctcctgagtataatccagacactttgagaggcagaggaaggagaatcataaattcaagtctagtccaagctacaaagtgaaaccctctctcttgtggcctccctcacaaagctacttcactcagttccttctcaagtggagatttaaaaataagactcaggagtagaaatagtagatgagctggctgatgaggactgctgagacataaccttctcaacaacatcacttgactgtagcaatcatgacctcatggtaactgaagatgcttgagtgggtagggagagatcacggggctctgtgtctccccaagaactactagctgttgatagatgcttgaagaggcatcatcttaaatgttgcttctgtttgcgagttcactaatgttttacatccctgcccacaaaggtagttaatactgtaagacccccgaagctgggcctctgctcaagtcccgggatgagctggccagcaccccagtgtcctgagagaaaaccacacctgatgcaaactgcaagagccatgcagggcaggggagttcaacccagagcggtgacagtagggggcttttaacagctagctgaggaattgggaggagttggggagagagttctcttcagcatgtccttggtgaaatttacaaggcgggagtggggagtgagttctttctgaatttttatctccgtgtcctcggcactggaacgcaggcatctctggttgtaaagtatagaaacaaaaaggctttttgctggctatagagaacaacgagcttctttctggctgtatttttagagatcagggaaaacaagcttgggggacgtccaggggctttaccttccagggagaaacgctctaagttgggggtctcacaataccagtgggtcacaaaacaaaggcattacagtacgaagaggtcttgtagggaggccttttgttgggggtgttgggggataaagtaggggtcaatgtgctagtacaggccatgaatcccaagtgccttggaggaaggcagaaacttgtgagctctaggacaaccaggactacagagagaaaccctgtcttggaaacaatacagaaaaaggactgggtaagtgtgaccactgtgttatattcatgtatgagactggcaaaaataaatttaaaaacaaagaatacagccccaagtgaaagagaatgcttgttgtcttttaggaaatagaaatttaacttgttaagttacttcatctaacttgcaaaggtaaccagttatcttactaggaagattctcctttatcaagtctttttttccttgctttctctcgctctccagagttgggtggttttttcccttctgaaaataagctacagcttatatctgcaacacagataagaagagagagctcattctgcagatgacataaacattgcttctaagttaaacaaagcatagagaagaggatacactgtaagccaagtgacacaaacccacaagacttcctagccctgtgtcctcactcccaaagacattgtctatagctactgtttacctttcaacaggaaataattcaaggaatgctttgttggaagttcctgaccttcatgttttgggtccagtacattcaaaactgagctaaaaaaaaaacaatgctcaaagacttttcccaaattatttaatcttttagcaaaatttcatcagaagctgagaaacattacatagaagtctttaacttttcacttttcatcagttagtttctgttatctccttttcaattttctgacaatgaaaaaccctttgctattattcacacatgatgaaacaaggtttcaaaggagcaggctgccctttcatcgcaatcaaaaacatcttcctgatataatacatctttcagagtcagtatgaattgtgtgcaaagatgagaaacgtgaataatcaaatgctattcaaatcaatgcatcaaaaaaagtcaagaagttgcactagctgatgaaaattttacttaagtcaaaattttattgagcttcccttctggtatttttgatgattaattcttctggttcaatatgtttaagatttctcttcaccatgccattacaattgacaattatgagatcatataagacataccattagccatttcttgggggcgtcacttgatatccaagttccagaagccaacctcctggctttgtaagcctaactgtccttcttaggacactgtcacccacaggagatgcaggtgctcctgacaagggtttttagaaaggctcctggagacacaacatcagctccagacctgttataagagtaactaggtgtgtcatttaacttttgtttccttgtttatgtaatcagatgttagatagaccacttgaaattagaaaacatttgaaattggaaaataattgaaacaccaaaatatgtttgtatttgtttagcattatcgaattttcaaatttgtaactctgggacaaaagttactgaaggcacttgtttctctttacataaaagacaaaagaggtaggcagtgtctagagtacgcctccaggggtaaggtgtcacttgctttgcaggagacacatactgacaattttcgattgtcaaaatagtcacttgaggtcataaggactatgacaaattgttcct

SEQ ID NO: 86 - DNA, 2361 bp, Mus musculus
cactagtgaccggagcgcgaagattcgggggtgggaaggtgtgagccgcaaacccagaggagccgggaaagaagaggaggcccgggggtggtccgaggacaggcgtcccggctgcggaggctgctcagcctcctcactggttggctgactgacgggctagctggctgactgcctgcctgaccgactgcctggctgactgactcactgactgactgactcgtgccttgcagcctcgggccggacgctggaagctgcagcgagcggcgcgcggagccgagccatggcctcgagtggatataatccatacgtagaaataattgaacagccaaggcagaggggaatgcggtttagatacaagtgtgaagggcgatcagcaggtagcatcccaggggagcgcagcacagacaacaaccggacatacccgtctgtccagattatgaactactatggaaaaggaaaaataagaattacattagtaacaaagaatgatccatataagcctcatcctcatgatttagttggaaaagattgcagagatggatactatgaagcagaatttggaccagaacgcagacctttgttttttcaaaatttgggtattcggtgtgtaaagaaaaaggaagtgaaaggagctattattttaaggattagtgcaggaatcaatcctttcaatgtgggtgaacagcagctgctggacattgaagactgcgacctcaatgtggtgaggtgtgttttcatgtttttccttcctgatgaagatggtaacttcacaactgctctgcctcccattgtttctaacccaatttatgataaccgtgccccaaatactgcagaattaaggatatgccgtgtgaacaagaactgtggaagtgtcaggggaggagatgaaatatttctgctttgtgacaaagttcagaaagatgatatagaagttcgttttgtgttgaatgactgggaagccagaggtgttttttcacaagctgatgtacaccgccaagtagccattgttttcaagactcctccgtattgcaaagctatactggagcctgtgacagtgaaaatgcagctgcggaggccttctgaccaggaagttagtgagtctatggatttcagatacctgccagatgaaaaagatgcatatggcaataaatcaaagaaacaaaaaacaactctgatttttcagaaactgctgcaagattgtggtcactttactgagaaaccaagaactgcccctctgggatcaactggagaaggaagattcatcaaaaaagaatcaaacttattttctcatggtacagttttaccagaaatgcccaggtcttcaggagttccagggcaagctgaaccttactattcttcatgcgggtccatctcgagtggattgccacatcacccaccagccattccctcagtggcccatcagcctacaagctggccaccagtgactcaccccacctcacacccagtcagtacaaataccctgagtactttctcagcgggaacactctcctctaattcacaaggtatccttccattcctagaagggcctggtgtcagcgacttgagtgcatctaattcgtgcctttataatcctgatgacctagctagaatggaaacgccatccatgtcaccaactgacttatacagtatctctgatgtcaacatgctatctactcggcctctgagtgtgatggcacccagcactgatggcatgggggacactgacaacccaagacttgtgagcatcaatcttgaaaacccctcatgtaatgccaggctaggcccaagagacctgagacaactacatcagatgtctcctgccagtctgtccgcgggcaccagctccagttctgtttttgtttcacagtcagatgcatttgatagatcaaacttcagttgtgtagataatggcctgatgaatgagcctggactatcagatgacgcaaataatcctacctttgttcagagcagtcactattcagttaacactctgcaaagtgagcaactgagtgatcccttcacatatggtttttttaaaatataagttgtaggacttaaataagtatatagaatattaagagaaagttcagaagtcaaaactttaaaagccgctactgtttcttactttgaaagatatgcctaaagtccacgtgcttgctgtgagttgttttctgtatttccccaagacaaactatgtatctttgctaatgtattagttaaatgagatgatatttgctttcaagcagatttaaggtgaaaaacgtgtaatggctatgcattgggtaaataaactcatattattgttgaggcccataggcaaaaaaaaaaaaaaaaaaaaaaaaaaaaaaaaaaaaaaaaaaa

SEQ ID NO: 87 - DNA, 1764 bp, Mus musculus
atggcctcgagtggatataatccatacgtagaaataattgaacagccaaggcagaggggaatgcggtttagatacaagtgtgaagggcgatcagcaggtagcatcccaggggagcgcagcacagacaacaaccggacatacccgtctgtccagattatgaactactatggaaaaggaaaaataagaattacattagtaacaaagaatgatccatataagcctcatcctcatgatttagttggaaaagattgcagagatggatactatgaagcagaatttggaccagaacgcagacctttgttttttcaaaatttgggtattcggtgtgtaaagaaaaaggaagtgaaaggagctattattttaaggattagtgcaggaatcaatcctttcaatgtgggtgaacagcagctgctggacattgaagactgcgacctcaatgtggtgaggtgtgttttcatgtttttccttcctgatgaagatggtaacttcacaactgctctgcctcccattgtttctaacccaatttatgataaccgtgccccaaatactgcagaattaaggatatgccgtgtgaacaagaactgtggaagtgtcaggggaggagatgaaatatttctgctttgtgacaaagttcagaaagatgatatagaagttcgttttgtgttgaatgactgggaagccagaggtgttttttcacaagctgatgtacaccgccaagtagccattgttttcaagactcctccgtattgcaaagctatactggagcctgtgacagtgaaaatgcagctgcggaggccttctgaccaggaagttagtgagtctatggatttcagatacctgccagatgaaaaagatgcatatggcaataaatcaaagaaacaaaaaacaactctgatttttcagaaactgctgcaagattgtggtcactttactgagaaaccaagaactgcccctctgggatcaactggagaaggaagattcatcaaaaaagaatcaaacttattttctcatggtacagttttaccagaaatgcccaggtcttcaggagttccagggcaagctgaaccttactattcttcatgcgggtccatctcgagtggattgccacatcacccaccagccattccctcagtggcccatcagcctacaagctggccaccagtgactcaccccacctcacacccagtcagtacaaataccctgagtactttctcagcgggaacactctcctctaattcacaaggtatccttccattcctagaagggcctggtgtcagcgacttgagtgcatctaattcgtgcctttataatcctgatgacctagctagaatggaaacgccatccatgtcaccaactgacttatacagtatctctgatgtcaacatgctatctactcggcctctgagtgtgatggcacccagcactgatggcatgggggacactgacaacccaagacttgtgagcatcaatcttgaaaacccctcatgtaatgccaggctaggcccaagagacctgagacaactacatcagatgtctcctgccagtctgtccgcgggcaccagctccagttctgtttttgtttcacagtcagatgcatttgatagatcaaacttcagttgtgtagataatggcctgatgaatgagcctggactatcagatgacgcaaataatcctacctttgttcagagcagtcactattcagttaacactctgcaaagtgagcaactgagtgatcccttcacatatggtttttttaaaatataa

SEQ ID NO: 88 - DNA, 60940 bp, Homo sapiens
  misc_feature (5047)..(7943): "n" at positions 5047 to 7943 can be any base
  misc_feature (35382)..(35843): "n" at positions 35382 to 35843 can be any base
aaaccaaagcctgcatatgaaaaagctctagaagacaacacatacacacatactcacacatgcacgtaggtgatgtctgtattagtgaggcagaattataagtgagttttcttcttttctccaatctttatttaattttgtttatttgttttgttttatagagacagggtctcaccatgttgcccaggctggtcttgaactcctagcctcaactgatcctgccaccatggtctcccaaactgctgggattacaggtgtgagccaccatgcccagcctttctttaatgttttatatgtgtctttttttaggttgtaatttaaaaataaacatattttagcaaaaaattaaagactttgaatgttattaaagaatttaggtccgggagtagtggttcacgcctataatcccagcactttggcaggctgaggtgggagggctgcttgagcccaggagtttgagaccagctctgggcaacaatagtgagattccatctcaatctaaaaataaataagtaaaatatacatatgaacttagtaactggttggcccagcttgcttgctttcatgacagtaatccatgattttgatacccgtcttaatataatcactatcatacctctctgcaggcatagttatcactttgggtaggagttgagccttgtgcctctttttgtttttcttgatggtatctaacgcccagtggtgatacattgtcactcatatcaatactggtgtgattcaatgtgtaataatttatattttattcgacatttaatgagcatctacaatgctaaaggcactgtactagccactctagggaataaaagatgaacaagacacagtcaatgcctttaattaaagaagtaaatgcactgatttttacttttcctacacaggtattgaattgagaattttggggaaaagaacatgaagagtcttaaaagatatggaacctgtgaacgctaaaccttcatatatttgcatttttattagtaagattatggctgccagttatattgttttatatcttaggtcatattttgaaatgtgatgtgacatagtgaaaaagaaacaaagagtctggaggtctggtttcaagtttcaactcagcaattaactacctaatgaacacgggcaaggtacttaaacttcctgtgcctcattttcctcatgtgtaaaacgagggagatgaactaaatgatctacagggttccttccaaccttaaaattgaactaactctctcctgttgagacataaaagaggcaccatatgacttgaaggtgatgatgacttcattacttgttctgaaaaatgttaattctaaattggaacaagtaatcactggatctcatggttgtgacacatcagacattactacagttagagaaacccaagttagcacactgtgtcatacttctaggcagtgctatatacgcaaaactagcataccacagtatagggcctacacaatataaacaaaaagattaaaaagagattttttttttttttgagatgtagtcttgctttgtcgcccaggctggagtgcggtggcacgagatcggctcactgcaacctctacctcccaggttcaagcgattctcctgcctcagcctcctgagtagctgggattacaggcgtgcaccaccatgcccagctaattttttgtatttttagtagagatgggttttcaccatgatggccaagctggtttcaaactcctgacctcaagtgatatgcccgcctcggcctcccaaagtgctaggattacaggcgtgagccactgcgccctgccgatttttttttttttttttaaatagagacagggtctcgctatgttgcccaggctggttttgaaatcctgggctcaagcaatcctcctgcctcagcctcccaaaatgttgagattacaggtgtgagccgctgtgcccagccaagaaaatttttaacaatggatattttacgaatgctttttggagtttttatgtactaagatttcatttctctgggtgttcattaatcttatgtttcagttccttaaatgaaaataggtgagtggggcaggtttcctcagaggtatagtttttactttagggactatccctttctcctaaagtgtgctttaaagacggcagcacatgaacttgtcttagataggagggacagcaggcaaaagtgatgacaggatctgggtctgctgccacacaccaaactatttatgaattttttttaagagacagggtcttgctctgtcacccagactggagtgcagtggtgtgttcatagctcactgcagcctcaaactcctgggttcaagtgatcctcccacctcagtctctcaagtagctaatattacaggtgcatgcccccaaacctggctaatttttttttgtttttttttgtacagatgggggtctcactatgctgcccaggttggtctccaactcctggtctccaaagtgctggaattacatgggtgagccaccacacctggctctcattctttatgggttttttgttttttttttttttgcccttaagttttgttttttacaaccttataaatcacataattgagtttcagagatctcaaacaatactaatgcagtaagtaaacaggagagcaggagtggggtttggccaacagtactggtaaaattcactcatagtggttgaacccagctgttgcagctatttgtccttaataggaaggacacctcctcactacagagagttgggcagtgatttgcagtatgctaactgggactagggcatactctcgataaggtttaattttttgtaagagaaccatgtggcttaaattgatgtaaagcatctacataaactacataacggaagacaggtaactcagataatgggggtatcaaagacgaaatttggccatttatctagaattatctgagggagaaccccaatgaatccaacagatacaatcactctggttattagagtagtgtaagaatcacagtcatacgtgctgacttattcagagggcaaagtaccagtgtctgcaacttattttgaaatacatttttaaaaaccagatagatgaatggatagacagagggatggaaaaataaacagacaggtgataaggcaagtgcagcaaaatgttaatggtggaatctagttagtgggtatacatatgttcccggaaaaaaaatctttcagtttggctgtatatttgaattttttttttttttttttttgagacgggtctttctctgttgcccaggctggaatgcagtgccaggatcatggctcactatagccttgaccttctgggcttagctggaaccacaggtatgtgtcaccacacctggctaattaaaaaaaaaaaaatcttttgtagagatggtgtctcattttgttgtccaggctggtcttgaactcctggatcaagcgatcctcccaccttggcatcccaaagtgctaggattacaggcatgagccaccatgcctggccccaaacatttttatgataaaacaggaaaaaaacctgccaacatttctgagggctttccctgtgtcaggcactttgtattagtgatctcaattagccctcacaagaagcctgtgaggtaggtaccatattactacccctattttacagataagcaaacaggcacagagaggctaagggacttgcccagagtctcacagctaacaatctaggacaagctaagattcaaatccaggcctgtgtgtttgcaaagccagggcctttagctgtgaaacacagagaattccgcagatgtttttcagagcctccattaaatattactgagtattataaaacttctagaacataggaaaatattttcataacctcagtccaagaagagttctctaacattcacaaaaaacactatcaaagaaaataaatcagacttaattaacactaagttaaaaagcttcactaagataatgaaaaggcaagccacagactaggagaggatacttgcaatgcatatattttataacaattctgtggcatccatagaggtgctctgctcagatctccattctagagaggatctgcctcagctttcaagccaaagccacatatttccttggagccacctacccaattattaagtacagaggtagtataagggctaactatctctgtgcacagtgtttgtgttagagctccccattggatttactgagacttcctcaaagatgcactcccatctcattttctttctaccaaatttaccttccttccccctttcttttcaccagtgtcagacctgcatcttaagattttccctgcctataacttttttctttcccctttatctttcatagatgttacccccaataaatctcttgcactgttaatttcatattggtacttgcttcccaaaggacccaactggtatactcatatccagaatacataaagaatgtctacaaatcaataagaaaaagatagataatccaatttttttttttttttgagatgttttctcgctctgtcccccggctggagtctagtagtggtgacatggctcactgcaaatctctcgtccccaggttcaagcaattctcctgcctgagcctcccccgtagctgggattacaggcacctgccactgcacccagctaattttttatagtttttaatagagacggggtttcaccatcttggccaggctggtcttgaactcctgacctcatgatccacccataattttgttatgtaagccctatcattattattattattatcattattattattattattaagacagagtcttgctctgttgcccaggctggagtgcagtggtacaatctcggctcactacaacccctgtcacccaggttcgagtgattcttgtgcttcagccacctgagtagctgggattacaggcattcgccaccacacctggctaatttttgtatttttagtagagacagggtttcgccatgctggacaggctggtctcaaactcttggattcaagtgacccacctgcctcagcctcccaaagtgctgggattataggagtgagccaccnnnnnnnnnnnnnnnnnnnnnnnnnnnnnnnnnnnnnnnnnnnnnnnnnnnnnnnnnnnnnnnnnnnnnnnnnnnnnnnnnnnnnnnnnnnnnnnnnnnnnnnnnnnnnnnnnnnnnnnnnnnnnnnnnnnnnnnnnnnnnnnnnnnnnnnnnnnnnnnnnnnnnnnnnnnnnnnnnnnnnnnnnnnnnnnnnnnnnnnnnnnnnnnnnnnnnnnnnnnnnnnnnnnnnnnnnnnnnnnnnnnnnnnnnnnnnnnnnnnnnnnnnnnnnnnnnnnnnnnnnnnnnnnnnnnnnnnnnnnnnnnnnnnnnnnnnnnnnnnnnnnnnnnnnnnnnnnnnnnnnnnnnnnnnnnnnnnnnnnnnnnnnnnnnnnnnnnnnnnnnnnnnnnnnnnnnnnnnnnnnnnnnnnnnnnnnnnnnnnnnnnnnnnnnnnnnnnnnnnnnnnnnnnnnnnnnnnnnnnnnnnnnnnnnnnnnnnnnnnnnnnnnnnnnnnnnnnnnnnnnnnnnnnnnnnnnnnnnnnnnnnnnnnnnnnnnnnnnnnnnnnnnnnnnnnnnnnnnnnnnnnnnnnnnnnnnnnnnnnnnnnnnnnnnnnnnnnnnnnnnnnnnnnnnnnnnnnnnnnnnnnnnnnnnnnnnnnnnnnnnnnnnnnnnnnnnnnnnnnnnnnnnnnnnnnnnnnnnnnnnnnnnnnnnnnnnnnnnnnnnnnnnnnnnnnnnnnnnnnnnnnnnnnnnnnnnnnnnnnnnnnnnnnnnnnnnnnnnnnnnnnnnnnnnnnnnnnnnnnnnnnnnnnnnnnnnnnnnnnnnnnnnnnnnnnnnnnnnnnnnnnnnnnnnnnnnnnnnnnnnnnnnnnnnnnnnnnnnnnnnnnnnnnnnnnnnnnnnnnnnnnnnnnnnnnnnnnnnnnnnnnnnnnnnnnnnnnnnnnnnnnnnnnnnnnnnnnnnnnnnnnnnnnnnnnnnnnnnnnnnnnnnnnnnnnnnnnnnnnnnnnnnnnnnnnnnnnnnnnnnnnnnnnnnnnnnnnnnnnnnnnnnnnnnnnnnnnnnnnnnnnnnnnnnnnnnnnnnnnnnnnnnnnnnnnnnnnnnnnnnnnnnnnnnnnnnnnnnnnnnnnnnnnnnnnnnnnnnnnnnnnnnnnnnnnnnnnnnnnnnnnnnnnnnnnnnnnnnnnnnnnnnnnnnnnnnnnnnnnnnnnnnnnnnnnnnnnnnnnnnnnnnnnnnnnnnnnnnnnnnnnnnnnnnnnnnnnnnnnnnnnnnnnnnnnnnnnnnnnnnnnnnnnnnnnnnnnnnnnnnnnnnnnnnnnnnnnnnnnnnnnnnnnnnnnnnnnnnnnnnnnnnnnnnnnnnnnnnnnnnnnnnnnnnnnnnnnnnnnnnnnnnnnnnnnnnnnnnnnnnnnnnnnnnnnnnnnnnnnnnnnnnnnnnnnnnnnnnnnnnnnnnnnnnnnnnnnnnnnnnnnnnnnnnnnnnnnnnnnnnnnnnnnnnnnnnnnnnnnnnnnnnnnnnnnnnnnnnnnnnnnnnnnnnnnnnnnnnnnnnnnnnnnnnnnnnnnnnnnnnnnnnnnnnnnnnnnnnnnnnnnnnnnnnnnnnnnnnnnnnnnnnnnnnnnnnnnnnnnnnnnnnnnnnnnnnnnnnnnnnnnnnnnnnnnnnnnnnnnnnnnnnnnnnnnnnnnnnnnnnnnnnnnnnnnnnnnnnnnnnnnnnnnnnnnnnnnnnnnnnnnnnnnnnnnnnnnnnnnnnnnnnnnnnnnnnnnnnnnnnnnnnnnnnnnnnnnnnnnnnnnnnnnnnnnnnnnnnnnnnnnnnnnnnnnnnnnnnnnnnnnnnnnnnnnnnnnnnnnnnnnnnnnnnnnnnnnnnnnnnnnnnnnnnnnnnnnnnnnnnnnnnnnnnnnnnnnnnnnnnnnnnnnnnnnnnnnnnnnnnnnnnnnnnnnnnnnnnnnnnnnnnnnnnnnnnnnnnnnnnnnnnnnnnnnnnnnnnnnnnnnnnnnnnnnnnnnnnnnnnnnnnnnnnnnnnnnnnnnnnnnnnnnnnnnnnnnnnnnnnnnnnnnnnnnnnnnnnnnnnnnnnnnnnnnnnnnnnnnnnnnnnnnnnnnnnnnnnnnnnnnnnnnnnnnnnnnnnnnnnnnnnnnnnnnnnnnnnnnnnnnnnnnnnnnnnnnnnnnnnnnnnnnnnnnnnnnnnnnnnnnnnnnnnnnnnnnnnnnnnnnnnnnnnnnnnnnnnnnnnnnnnnnnnnnnnnnnnnnnnnnnnnnnnnnnnnnnnnnnnnnnnnnnnnnnnnnnnnnnnnnnnnnnnnnnnnnnnnnnnnnnnnnnnnnnnnnnnnnnnnnnnnnnnnnnnnnnnnnnnnnnnnnnnnnnnnnnnnnnnnnnnnnnnnnnnnnnnnnnnnnnnnnnnnnnnnnnnnnnnnnnnnnnnnnnnnnnnnnnnnnnnnnnnnnnnnnnnnnnnnnnnnnnnnnnnnnnnnnnnnnnnnnnnnnnnnnnnnnnnnnnnnnnnnnnnnnnnnnnnnnnnnnnnnnnnnnnnnnnnnnnnnnnnnnnnnnnnnnnnnnnnnnnnnnnnnnnnnnnnnnnnnnnnnnnnnnnnnnnnnnnnnnnnnnnnnnnnnnnnnnnnnnnnnnnnnnnnnnnnnnnnnnnnnnnnnnnnnnnnnnnnnnnnnnnnnnnnnnnnnnnnnnnnnnnnnnnnnnnnnnnnnnnnnnnnnnnnnnnnnnnnnnnnnnnnnnnnnnnnnnnnnnnnnnnnnnnnnnnnnnnnnnnnnnnnnnnnnnnnnnnnnnnnnnnnnnnnnnnnnnnnnnnnnnnnnnnnnnnnnnnnnnnnnnnnnnnnnnnnnnnnnnnnnnnnnnnnnnnnnnnnnnnnnnnnnnnnnnnnnnnnnnnnnnnnnnnnnnnnnnnnnnnnnnnnnnnnnnnnnnnnnnnnnnnnnnnngagtctcgctctgtcgcccaggctggagtgcaagtggcatgatctcggctcactgcaacctccgcctcccaggttcaagcaattctctacctcagcctcctgagtagctggggttacaggcgcccgccaccacgcctggctaatttttgtatttttagtagagacggggtttcaccatcttggccagactggtcttgaactcccaacctcgtgatccacttgcctcagcctcccaaagtgctgggattacaggcatgagccactgcgcctggccggctctttcttaaactgaggactcagctcaaatgtcacctcctcagaactttcctctcccccagtcacttttcattttgaaattccttcagagaactgaaaatgttttccgtctctttgaaatgtatgtacatattttaaaaagctaaataagcctcttgctagttttgcgtcctcagaaggtctttcttgcgggcctcggagccatctcttggaaatgtgaacatcaaggatggtgctccatgtttctgtctctaggagggtttaagccttggctcttggttccaagataacttcccattattttcctttggataaagacaattaataggtatgtaatggattgtacgtgcctgaccatatgaaaaggtgagatttccttttttttggtctttgcactctcttcagtggattgcctgtgatgtgcatcatggtacgttttagtacatatccaataataaaactgtttcattcttttgttgtacattgcgcatttcgtggaaagaacagtttggggttggcaggatattttaaattatttgcccatatgggtcccccagttttgggcacttgtatggcaggctgatattccccattacctctccgtactaattttaactagtaagggacaggggcaagggcatggagctttggagtcagacaaccctggctttaaactgtgccttttatcagcattctgaagtactgtatgttgaagtaacttctctgaaccccgaatacttcatctataaagttaggaataataaatacgtcatagattaagtatggacattatctgatgcatagcaggtactattcaaatgaaggaaacgaagttatcctaggtcctttaatgcactaaatgtgtgctccatttccgcctttcttggcatctgtgtgaaatctcaggatatagtgtccactaaacttcagtgcactgcctaatgagacaacgaactccaagtgcggaccttttgagtttaaacgggtttcagtaggtaaaatacgtaaagttcacagtaccctcgcaatttagatggaggaaaaaaaatcagtcggggggggggtccccgtatgcaaatacaggaattacagaagaagacaggacccccgccgcagcaccacttccccctacagggcgcaacgtcccgccgctggcgcgggggtggagatttgcatgtgcgaagtcgggaagagggggaaccacctctcgaaaaccccggccgtcgccctcccaggccgggagagtcggccccgcgcgcccccaaaagctccccagcggccggccctctctacgtcatccgcaccctcccgcccgctcctgaactttaaaccacactcggaagaacaacctggaggagggggatttctcaggagccagcggccttctcacgctgctagccgtcacctcccggctcccgccgttccctgcgctcccgaagcccaccccaagctcccgctccctcgaccccctcccaagccagccgccgcagcagcgccgggggcgtatgcgtgggggccggcggggagcgtgcgcggggacaggcaggggcggggcgctgggggcggtcgcgcgcgcggcggccgcgaggtcgccccgcccacgcctccgggtgagggttgctgcgtcgggcctacgtcagccgcgggaaattcccctcccgccaggctgctcgcctctcggctgggccagcactcggctctccccgctccgccccctgcccctggctcccgtacggtggacggcgacgctgggtgacccggggtgcaagaattcaggggttgggaaggtgtgagccgcaaacccagcggagggcgggaagaaggaggaggcctctagggtggtcgggggactgggggccccgccggcagaggtccctcggcctcctgactgactgactgcggccgcctccggccaggacgctgggagctgcctgcgggaaggtgcggggagcggagccatggcctccggtgagtgttcatggggcgcgggcctgggccgggggaaaggagctcttctgaagggggtcctgccgcagtgagtttagggagctcagtttttgctggggcgcgttctgtctttaaaatctcatatggtaaaattgtcagcttttaaaaaagttacctgcttcagggtttgcgtgcagaatccaagccacgctctgtaattcgatcctgttgtcatagcaggaaccttagaaattcccaacgacttgattttaggattagggaagtcataagcgaaccaaaggaggacgaagagttctcattaaaaatgtatatgtattgaagatggtggttttatgttttagaacaggaatgaggaaccttcagacctcgggcaagctctctccccctttttagtttaatttcatcaaatgcaaagaggtgatcccccttgtactgacagttgtacaaaatgtgtcacggctttaaaaatcatccgtggtattttaacacgaattagaaaatccgtggtattttaagtgttaatgttgcttcgaccaagtgtaggccgggcgcggtggctcatgcctgtattcccagcactttgggaggccgaggcgggtggataaccagaggtcaggagtttgagaccagcctggcaaacatggtgaaaccccgtctctactaaaaatacaaaaatcagcggggcgtggtggcgcgcgcctgtaatcccagctactcgggaagctgaggcaggagaatcgcttgaacctgggaggtggaggttgcagtgagccgagatcgcgcccctgcactccagcctgggcgacagagggagaccctgtctctatttaaaaaaaaaaaaaatgtagtttttactgtgagataaagctcaaggttcctaatctgacgaatagagacgttgaatcccccttcctcctcgctggaaataaggggaaagaggagttttagaatatccgagctttaaaataatgagtaggaatgaatacaactttatcacttatgtgactatatattttcccttaataaatgctcgatctctccctttgggggggaataagtttgtaagaaacattgcagagcaagaaagtctcctatatacacagatgtggttggggctgcctggagcttaaggttgagggggacgggagagccggggcggggggataaatcaagtagcctggggtcgagttggtcttttaccaggattttggcaaggtgagtgggggacactttccagacagaggaagcagcgtgagcaaaggcagggagggctaaatgcatgttaaatgctgtactaagagaatgaagagggggccccgtttatgaacttgactcttatccccaaactgcctggtccagtgaccctcagaagtaggctgatgtctagtagagatgaggaagtaggaagcttaaagaacctttttaaaaggttgagcagaacaatgccatagctattgctgtaggcagaaaaggaaattggggtgtttcacatgacatttgatttcagtttgtttgtggttgtgagaatactaagtgtagtttaaaatatttcaactttcccttttcccacttaagtgacaccagactttcagataatcgtgtaaatttatgaattcaaagcatgtgtagattagaagtgctaagatgacttcaaatattttgttaatgtattggttatcagaaagattttgtttggaagtaatggagaatgcctagcattataagtaagttcaggctcttggcgatttaatcaaactttattgatatattgcatgaatttaatacttctaattttttcagttgagagaggaaacaaccatttctatatagagtattgtaagacccacaggattttaaaatttgatacaatttaaatttgttcattgacactgtattttgtgctgttgtgaggaggaaggattccctaaaagtaaggaggaaatgtttaaagaaatggaaagttttaaaggtttagaagttgaagggtgattaacttttttttttttttttttggtcttttctaagagttgcattaaaatgggactatttaaaatgtaacaagttatttaaattgtaattcagttgttagaaaactgccaggcctggaataaaaaaaaaaaaatgtttacaggaatctgtgtacttttccttaatctgttataaagaccttagagaaagaaaaagattcactaataaaattctaaattcctattctgttttgaaacagtaatttaaccggaagagtgaccaaaaaaaaaaaaaaaaagaaattgcttagtttttcattgtctagtttagattctgtttgtagtaaggtagtattaaaacctcagaaagtaacttttattcattacgaagtatttaagagcatttcttcatttcttaccagatgtcatatgtaaataggtatatgtagttgaatatgtgatagctataatgtaaaagtaacataaatcataatcttataagcaaaattatgtaagttagaatgtagtttaaaatcatgtatataatatgattctaaattttgtttagataagttagcagattaattaggatttcacagcttgtattaagctgcctttcgttgctttttaaaaaaattacaccttgatcacagtcttttgacataattaataatagatatagtgaagaaaaatgttcccaaacccatctaaggtatgcatagtaggcagttgttgcttttgtatatttattctatttaatataagtaaaattagatattttatgtctgaatttaaaccttctcattgttccagtaaaaagagcaaaatgtctttgtgtggcatatagctctgttaactaataattagtgctgtctttggtaaaatgttttaaaatttagataatttatttttcttcacatttttcttagtatggttcttctgtgtcacacaataggaaggaagtacagaaatgaattgtttttgtaaacctcacttcttaccaactatttgtagtgtgaatttcaagagaattgttgtttttctcgattaaaggggagaaatggaagtaagtgtgaggcaacttaatctttaataacagagctggaagttaggaatggatagctacagtaaatgacttctttttttaagtaaaatgccacacatgagcatgaatgtttcagaaatgcaacacatgaaaaaatagaaataacaatggagttaaataattaaggtgacgtatgataggcacagataaagggaatgagttaatgtaatgactagggaggagccagacaatgaatcataattaggaacatctaggttatgcatagtatctttctcaaatacaatttaagggactcagaatttcattttgttccaactttctctcatatgggttctctgaaaatgattttgtttgtaggcacatgacccaaatattgcatgggataaaattgtttttctgaaattcatatttatctgggcctcctctgtttttatttttaaaacagaggtgatttggtcttgccatttgtttttaactttaatacctgtataatctaggacagcttttaaaatttatttattttaccctggcacgtgcaagagttttttcaagacttaccttttttcccccttggtaacagaatccctattgccagaatcttttacagtttttaccttgtagtgcataaatcagttgaatactcatctgaaaatttcctttctttgattcttaaggcccagttgaaagtcagcctgatgtattggagtaataaagtcagcctgatatattggcatagcctttggctgatgagagacctagtttgaggaaaaaaataatagatcttattttctttttctccaaattgagtagaggtgatatttggaaaaatatatattgttagctccattggctcctttaggtctcaggcaaagtctgtcaccgaggacctttatgagagacatgcagtctagtcagctattctcaactgtggtgttgacacactggtgtgacaatcatttgtgtgatgtgttgcaagagttaaaatatttgtgttgtaaattatttactttttaaataaatgaaagcatttgaaggttatctctatattgtcattttttcttgcttgcatttgaataaggttcttttttaagtgggagataaacacaagttcaagttacaagtagccagaattgctttgcctaatttactcacgtcccagtccatatttgtacctgaatttttagattacttctctcaatatgtgcattgttgcttccacttcatgttttaagacaattattcttaatcaggagtgtgttagaatttcttggaaggctttttcagcaacgtgtatctgggctttaaaaactatgaagatttctttatcttctaaacatctcaagtggggtaaggacatgtatgttttgaaaaaactacctaggtgattctgatgtacatccccagtatgaactctgttctagggatttctttggatctaaatactcatttggctataccaggatgcattatcttcttaaattaagttgcatttattttagattgcagattatgtgctgtatcagttattacctccagttgcttttatgcttgttttttaaatttggcactgccatattagcataccattcataattcatttttattataacttcatataattttcaactttagttttatcatgtgtaagatgggataataatttctattatttttcaaatggagattaaagttaagaggatcaaatgagaaatgtatataaaggggtcttaaaataatgttataattacaataattagcttttttttctgtatacttgatgctggttgctaattctagcaataaagtgtttgttaataatgtgtctatttccgataatttatgatccatttaaacatttcaatgtaatttttttattttaaaagctcatgctttattagataggcactatgttttaaaatagcactctttcttgcctaagcgcaaataaaaacatagatatatcttacaaacattttggctgtattttagaagttattctgatgtatattagccttttaaaatactattcagaatataggggtcagtcccagctttgcatagtgttgcttaaagaaaaatacagtaatcaatttgtttagagtcaattttggagacgttttggtgcttttcaaaactgtggcgatttgaggttatcttagttaagagtacttattttccctacaatttcctgatttatgttttaccctcttgcactccatagatgactacatttcaacacattttatattcaggaagaatggcattgtgcaaagcacagtactgaggaaggagataactggtgcattgtactgatgcattatataaatgatttatagctgggaagttttttaaaaatcataaacacagataaatcaaaataggaatgagtatgaggaaatactgaggtgtagcaatcctggtacctataaagcactatttttttttccttagtagtggaatctaattaaaaaatctgactaatcacttatatgattatttaacgtttgaataacttgtataaacaaaagaccttaagattttttagtcattcattcaatagatgtttaatgaatatctctgtacaaggcactgatgagttaaacacaatttctgccttcaagtagcttgaagaaataaaacaagtagctttatctcaagaagaaataagacggtaagttttccctaaattacagttatttggaataattgctatacacagaatactatggtagtttaaaggaggggagattatttccagctgggggaatgtagagtattacagtatactgtgttacttggttgtaatactctacattcccccagcttgttaatttttaccaattaagagcttctgcagtaggaaaaataaattccaaggactttaaatactcaatattatatgataactgatatttatgtagtttttactatttaaaaatatttaatcttttcaacaactacttttctgttctttttgtaaacaatctaaagaagtgtcatgtaaccaatgaagttttgggtttttttgttgttgtttttgtgttttgtttgtttttttttttgagacggagtctcactctgtcacccaggctagagtgcagtggtacaatcttggctcactgcagcctccacctcctgggttcaagcaattctcttgcctcagtctcccaagtagctgggattacaggtgcctgccaccacatcccgctaattttttgtatttttagtagagatggggtttcaccatgttttccaggctggtctggaactcctgacctcaagtgatccacccactttggcctcccaaagtgctgggattacaggtatgagccaccatgcccagcctcagtgaaatatttgaatgctcactatgaacctagcagttttattcacactctctcttcccaaagttaaacacttatcattaacgatgtcattttatatcagtttcccaccaagacacctttaaataagtagtgggcagggatttatttggcctttacttcagccacataaattatttaaaatgtgacttaaaaagtaatgttgattttaacagtttttaagaggaaaatatactttcttaaatactcctacaaggatatataagggtatgaaatatttgaaattgcaatgtgaatttgaaatctttaaaatatgcaaggataaaatcgtgaaatactcatctgcatatcttatgtttttgagtaaaactgaaataaggattatgaacttgtttaggttaaagtcagttttctctggctcttcatcttctgaataaacaaataggtagtagattcaaacacagggagtttacaccatacagaataaaattgaaagttacagtaatactttattcagtaacccaaagtagaagccatggaatcatcaatgattctttaatttctgagctatcagtgattctttaatttctcttaaccctactgttcaggcaccaggtgctgtcaattttatcttttaaataatccttcattcatcttatcactgccatatatcagagataccctcatcattgcccacattattatagtggtctctaaactgatgacattgctttcttttttctatctgttcactgtgactaaaacttttactctaaaatgcaaatctgatcatgtgatttgcctgcatcaaaatattcattgatttcatcacacataaaatgaaatccacattgccaagtgtgctctgacttttagttctctttttaagagagaaagtgtgttccatttacattggtgattcttaaataaaccctcctctgtggacacactgttcccttttccctagaatacctacctttttcctcttcatttcctccgctcttttgcttcattaaccgctctttttccactgacacagttgggcattcctgactctttcgctcttatttccgcagaattttgttagtgctttccttccttctgtagtctaataatatatgttgtttgccttgctcttctataaggtcctttagagtgacagttgggataccaccatagtatcactaaatcattgttttcaagaaagcatctgaaataatagacaccatttttttttattttttatttttttacactttaagttttagggtacatgtacacatcgtgcggctttgttacatatgtatacatgtgccatgttggtgtgctgcacccattaacttgtcatttaacattaggtatatctcctaatgctttccctccccccttcccccaccccacaacaggccctggtgtgtgatgttccccttcctgtgtccatgtgttctcattgatcaattcccacccatgagtgagaacatgcggtgtttggtttttttgtcctcacgatagtttccagcttcatctatgtccctacaaaggacatgagcttatccttttttatggctgcatagtattccatggtgtatatgtgccacattttcttaatccagtctatcattgttggacatttgggttggttccaagtctttgctattgtgaagagtgccgcaataaacatacttgtgcatgtgtctttatagcagcatgatttataatcttttgggtatatacccagtaatgggatggctgggtaaaatggtatttctagttctagatccctgaggaatcgccacactgacttccacaatggttgaactagcttacagtcccaccaactgtgtaaaagtgttcctatttcttcacatcctctccagcacctgttgtttcctgactttttaatgatcgccattctaactggtgtaagatggtatctcattgtggttttgatttgcatttctctgatggccagtgatgatgagcattttttcacgtagacaacatttattgaatgtgtatgtatatatgacacttcgtaagaatttagcacatataatctgtcatcttcacaacaacccaatgaggtaggtgctattatgattattcctattttacagaggaggaaactaagagatttttaattttaatcacatttccttggtcttactgttaagaagtagctggggtaggattctaaaggcctcttctccatactgttctgataaggcccactgtgttaccatttctcaggattgcttgcgttctaacaggataagccttagtcagcactaaagtgattaagggacacattattattattttttaatggaaaacatcttcacacccctattaactcccctacttgcaagtacagttgagtgtctatttaccttttcccccacaatttggataataaaagtaaagttgcatacattttaaatagctttattgacatataatttatgtacaacaaactgtacttttaaagtatgcaatttgacaagttttgacatatgtatacaaccctggaatcatcatcacaagataatgtcccccctgcctttcctatccaccatatatccctgttcttaggcaaccagtgatctgctatcgttcattgtatattactttacatatcctagggtttcatataaatggaatcatacagtatgtgctcttctggtctaacttctttcactcagcataatcattttgagagtcgtccatgttattatatgtagcagcagttcattctgcagatgcatattttgaattttagttattatagaaagtgaatacttttttttctctattatgtctttagaaaaggtttgcatgggactgattgcacattctttgagcctaaagtccctcctggggcttgttttgatatactgtgtgtaagtcctttaatatttgaatggagatataaaaaacttacatatgcttctgcaaggatttaaatgcattttcattttcagtgaatggtcttttcattcagtattatgaatatgatgtaaaatcaagcagttaaatatatttaactcactttaggagtgtgatattttacttctgaatactgccttctttacccttcttggggaatcttgggggaaacccttctgctaggtctcacgtgggaggcagatatctctgaagtggttatctcagaacttcatattgacgttagctatagatattaagctataaagtgctaaccagtcaatatggtttgaatgacttgttttgacactacatagggactcaatttgaatgggaaaaaaaggtgcctctcccagccaatctccaagataacatttcggtcttgttatttaatgttaggaggaaaaaaatctttgttttagtctgctgttataaaaaaaacagaatgttaaaatccattattaattgctatattaatctcactgacctcctcctttttaaaaacttttcaggtgcgtataacccgtatatagagataattgaacaacccaggcagaggggaatgcgttttagatacaaatgtgaagggcgatcagcaggcagcattccaggggagcacagcacagacaacaaccgaacatacccttctatccaggtaatagacccttcttctgtgtctatctcactattagttgcttcatatactagctatagcaattattttaaagggccagtttcttcacagtcatctccacaggtttatctttttcttttttcctttttttttttaaacggatctgtcaaaaagacatctattagatagatgtctaaggacatttcttaaatataaaatggagtcttccccactgcagatagttctatggtgcttgtgtattaacctaagtagagcgactcaatgttgagagtacactggcaacttttggatcatgttctttttcatggaacacagagataataaggaaaacccattctctgcagaggtgagtgatattattctgtagattaaacatggatttgagaactcaatcataattcttcttggctagtcttagggctagaacatttttttctcctttttcttaactttattgcttgtctctgattctctgggtcattgactgatttgaaataccactttataaatacagttttttcacattagcataaattttaaaaagcttttgaccaaaaatgactttggtaaacatactaatagttataagatgtactaaatttatttatttatttatttttgagacggagtttcacacttgtcgcccaggctggagtgcaatgtcgtgatctcagctcactgcaacctccgcctcctgggttcaagtgattctcctgcctcagcctaccgagtagctgggattacagacgcccaccaccacgcccagctgatttttgtattttttagtagagacggggtttcaccatgttggccaggctggtctccaactcttgacatcaggtgatccacccatctcggcctcccaaagcgctgggattataggcgtgagccactgcgtccagccaagatgtactaaatttatttatttttttattttttatttttttgagacggagtctcactctgttgcccaggctggagggcagtggcgtgatctcagctcactgcaagctccacctcccaggttcaagcagttctcccgtctcagcctcccgagtagctgggactacaggcgccccctaccacgcccagctaatttttgtatttttagtagagacagggtttcaccatgttagccaggatggtctcaatctcctgacctcgtgatccgcctgccttggtctcccaaagtgctgagattataggtgtgagccaacatgcccagcccaatgtactaaatttctattttctatttgtaaactatttttctttgactttcaatgaagggtttatcctttaaatgccaattaaaaactttaatggcaaagtagattttgaaaagtgttgctttttgtttttgtttttgaaaagtgttacttttatcaacagatcttaattcactgttttataactagattatttacaaaatctattctgttgatgaacttaaagggaattgctgaattatagaataaaccaatggcaaaattatatatattgaattccagatttctatttttatcacatttttggcagtaatatggatttgggttatctaagtcttttaaatgttaaaatggatgagatgctaataaaaaggaaataaggaaatactatttgtccagttttttgagtcatttttaaacttttcttcataattcatcttatcctatgcatctctatttctaagatatgtatttttaccattccagtaggtcctaaacactttacagcttgagttttgtatttgcctacttatagtcttgagcaattaccttctctttcatacagaaagaaatgtaatacttcttggttactttcaaattctatttaaattcaaaattatggattttagtgccctctaccttgtaagctacccattcttactttaccttgctcctttgtggtatgctggtttttatagtccctgctttgttcttgcaactttactagctttcaaactaagcattaattcctgtcctccttcctcttccatgttaaactctcctttttactctgtgttctagctatactttctatgtgaaatttgatgttgttaaactcaatttgatttattgcctattctagagtaaacacttggggtatgcttactgaacaaatatttttgtgaagtgaaatgtcatatattaagtaaaatgatcatatttatgtgctatcctttccaatacggcttaaatatattttcaaggaatgtttatggtatgacagtacgttaaagagctgggcatttagtgacttaacatctgttttctcatgttctatggataaaatttgggtagagttttacttgttttgaaaggaaaataagcccagtcaaatgatatgaccaattgaaattagggcagaaaatatgtcaagaaactgagaggtaagtttttctgtactggtattctctggaaagtttcatctaaactgcagttgttcgtcagctggattttatttatctagtgccaattacattataattaatgtaaattgaattctcatttagtagatcagtttataatgcaatctatttggatcatgtatttaatttcccccttttttcagattatgaactattatggaaaaggaaaagtgagaattacattagtaacaaagaatgacccatataaacctcatcctcatgatttagttggaaaagactgcagagacggctactatgaagcagaatttggacaagaacgcagacctttgttgtaagtacacagttacagacatcttcagaaataagataagacataggatgttctgtttcttctccatgacaatctgttactttttagcagaataattttctcattctacttctatttactgtattttacacttacatttttactatttgcattagaactaccctttcattctttattagtagacacatcttatgatagttagcaggaagacatttttattgttattaaaagtaaacgtaaacttcttgtatactgtgatttcctttcttggggtggacagtttttgaaataattattcactctgtcttttttttttttttttttttttgagatggagttttacccttgttgcctaggctaaagtgcaatggcgcaatctcggctcactgcaacctccacctcctgggttcaagcgattcttctgcctcagcctcccgagtagctgggattacaggcatgcaccaccacgcctggctaatttttttgtatttttagtagagatggggtttctccatgttggtcaggctggtctggaactcccgacctcaggtgatctgcctgcctcggcctcccaaagtgctgggattacaggtgtgagacaccgtgcctagcctctgtcttttcatttatagttaacttattattattattattttgagacaaggtctcgctctgttacccaggctggagtgcagtggcatgatctcggcccattgcaaccttcacctccagactcaagtgatcttcagcctcagcctcctgagtagctgggactgcaggcatgtaccaccatgcccggctaatttttgtattttttgtagagatggggttttgcttgttgccgagggtggtcttgaactcctggactcaggcagtctgtccaccttggcctcccaaagtgcttgggattacaggcgtgagctgctgtgccacgcccatttacagttaacataaaaatgcctggatgtgagaaaaatcaactggaaaactctagagttattatttagaaagtggcaggttatagaattaacatacaacaatagttctaagataaaaatagtcatgtaatacttcatgatagtgaggctaccagaagatgggcccattcatcatgttagaatgtaaattaataaagacgtctggtaggcaatttaactacatggcaaaagcctgaaaaatattaatgcctcttgagccagctgttccacttctaggagtttagcctcagaaaataattaagtgtgttcagacattatgctctaatgctgttcattgcagttctctttgtaatggcaaaaagctagaagcaatccaaatagtaagcaaaggggattaattaaataaactgatacattcatgcaatgtactcctgtacagccttaaaaatcatattgccaatatgtctattggtatgtaaatatagtcacaatatattagataaataggttttctgttttttgtttttttttttctttttgagacagtcttgctttgttgcccaggctgcagtgaagtggtgtgatttcggctcactgcaacctccacctccctggttcaagtgattctcctgcctcagcctcccatgttagctgatattacaggcatgtgccaccatgcccagctaattttttggtatttaaaccattagagacagggtttcaccatgttggctgggctggtctcgaattcctgacctcaggtgatccacgtgcctcagcctcccaaagtgctgggattacaagcgtgagccacggcacctggccagataaataggttttaaaacaatatgtaaagaataattttatttttgtttaagataaatttatacatatacatgatgtgtatatgttaatactaaggtattaatagtagttgtctgggtgggtaagattgtagggttttatgtttttcttttaacttatattttataattcatttttgtaatgaacatgtattggcttttggggaaaaatgaactaatggcaacagaaaagagattaatagtctccacatatattagtaataaccatttagaaaaaaatactttaaatgctcctcttacaataataacacaaaagaaaatatctagtattatacacacttggcaaatatttgtctatattacttgacctcccaacaacattttacactgtgatcactccttacttgaaacatttttattccttgctttctgtgaaaacaaacttccattttacttcctgcttttctggctgttctttcttagttacaggcagttaaatttttggaccacctcacttattgtcctaataatgctctttatggctgttccaactctctccccaattcaggatcccattaaggattacacactataggtaacattatatttaacatgaataacatgaataatattttcatgttaacatgaaacattttgggcaagaaatctatagaagtgatgcagtataactctaaaaatatcccttcagttttttacattattggcgatattatcttggcattctattataaagaagaactttcccttcctctctttctccatttaaaaagtatcactgtaaactcatgcattcttgtatttaatatattatagttattctgttattcttttgattttcaaattgacccagatttgactaatgcaagcctcttcaaactgtctcctgtgtttttttgatatgccgtcatctttctttgagcacttttttactttctgacaaaatgaaatgttcaagacttgtgcttttcttttttctttttttttttcctttttttttgagacagagccttgctctgttgcccaggctggagtgcggtggtgcgatctcacctcactgcaaccttcccctcccaagttcatgcaatttttgtgccttggcctcccaagtagctggaattacaggcgtgcactaccacacccaggtaatttttgtatttttagtagatacggggtttcatcatgttggccaggcttgtctcaaactcgtgacctcaggtgatcctcctgcctcagcctcccgaaatgctgagattacaggcatgagccaccgtgcctggccaacttgtgctttgcttgccccagccctgaagtcatcagctttttccagagattcttggttccttctggtggggaatggtagtaagtctgattgccttctcaacatattcccttaaatgtctcaaaagtaccttaagtagcggggcacagtggcccatgcctgtagttacagctactcaggaggccaaagcaggaggattgcttgagcccaggagtttgagtccagcctgggcaacagagcgagattgtatctctttaaaaaaaaaaaaaaaaagcacttcaaatagaatattccccaaacgtgattttactgtgatcatatctctttcccctcataactggtcttcttccaatgtgccgtatgttagtgattgcgataaaagacctataggtgtcatctctgacattcctcatccaggtgtacacattgaatctactaacagttaccttctcaactggttttgaatctatccacttcactcagtgaaattcatcaccgtcatactaccactatagcctaaactggggctgctggaataacctcctgactggtcttgcattaaccattttgtaccttttccaaaccctctatctttcctcgctttagccagtgtgatcttttaaaatacaaatgaaattgtctttcccttgcttaaaacattttaatgggtttatttggctcttggaataaagacagcattccttctatatagcctataaggcccacatgacccacctttatttctagccttctattaaactctgctttccttaatttttatactccactcacaatgccttcctttagtttcctctgtttccactgctcttttctaggggtctttgtgtggcctgttccttttgcctggaagtgtttttcttctgttccagcataggctcccataacatcatgtatacctccttcataaaacttgttatgattgcagtttagcatttgtgtatgtgtgattatttaatgtatatccacttgaccagagactaccagactttttctgtaaagtactagatagtaaatgtttggggttttgcaagctgtatggtctctgttgctcagctctgctgttgtagcatgaaagcagccatagataatatgtaaacatcagtttggctgtgttccaataaaactttatttgcaaagacagacaagatgttggatttggtccatgagttacagtttgccaatctttccactagactgtaagcttcttgaggaaagggattgtatatccccattactttgcagagtttttggtatatagtacgaaccccaaagcttgttgaatgtctgtgaatgaatgaatgaataattgattcaaacaatctcttgatccttcatttcagaatttcaaaaattaccaccacccctaatattccgtgaatagcagtcaaatatgagattattcagatgaaacaaaatgaagtaatataaatgtattaatatgaagaattctataaaatcttttaccaaagaaaaagaatcaaaccaagaatctttcaaagaagtggaaatacttttgaggaagaggattatagttgcaagatttcaagaaaggattaagaattcaagatttagctgaccaagcatagtggctcatgcctataatccgagcactttgggaggctgaggcaggtggactgcttgagtccaggagcttaagaccagcctgggcaacctggtgaaaccctggctctacaaaaatacaaaaattagccaggtagggtgtcatgtacctgtagtccagctactcaggaggctgaggtgggaggatcacccgagcctgggaggcagaggttgcagtgagccggtatggtgccactgcattccagcctgggtggcagagtgagatcatctcaaaaaaaaatgttttttaagatttatttttgtagttattggaggcagaggaaggaaatgtgaaagatattttagatgctagcaaaattgtagatgtgaagaacatgagcataagacagcatgagtatggagacaggcagacaaagtagcctccggttgcaagtgccatgtgaagtttgaacaatagtaatgttattataattgagttttgcttccttattcacgcccacccaattttactgatgtcatggtttttccatgtgggaacaagtatgactggtggtggtgggggagttccccccaccatcgtctatgctacacatatgcaaattagtagtatttgtagctattgggaagtttttcataaatgacattttgaaacttgttaaatattgttagcattaaacttctttctaatacaaaaacattttagtaattttttatgatgaatggctataactttatataatgtggcacaaaacatattctactgctaataacagtgaattcagggctcaaaaagcaaatctctgtggagctaggcaagcagcataaatgagtggtgtggatcaagtgtaggaggactaacaggcactgtagcaaactaaagagccctgaataaatggggcttagtccctagcctgttgtttctgtgccaacctagtattgccaggtctttaaaatgtacaagagaagccggaaatccagatgttcatatgcaattacctgatttctaaatgtagataacctgtgcagatttttaaaaatataggcaacacttttgtgagcctagcaaaacatacctgtgggcttcaacctgtgaacatctctttacagcttttgctttacattatcaaacagactttattgatttgattctgaatttgtttgggaggcaaattttaccatttaatattgctttactgttaatctatattttggtatgtttgacataggcatattagtaattgtaaaacactgtatgttaaaatgatatagtatatattatttttcttttaacagttcttagaagtacaaccccacttctttttttttttttgaggcagagttttgcttttgttgcccaggctggagtgcaatggcgtgatctcggcttaccgcaacctctgcctcccaggctcaagtgattctcctgcctcagcctcccgagtagctgagattacaagcatgtgccactatgcctggctaattttgtatttttagtagagacggggtttctccatgttgatcaggctggtctggaactcctgacctcaggtgatccacctgccttggcctcccaaagtgctgggattacaggcacaagccacgcgcccagccatataatcccacttcttactctctcatctttatcagagcaattggaagcacgttcatgctttggtatgtacaactgacagcatgataacttcagtattgctatatgtttgatttttgcaatattccttgtgtttataatgcagttttgaatattgtttttttcctgctagtttccaaaatttgggtattcgatgtgtgaagaaaaaagaagtaaaagaagctattattacaagaataaaggcaggaatcaatccattcaatggtaagtatgtttgataaaatcatttctatttatttgggtgttgatttctgtttcttttttctttcccttttttttttttttttttttttgagacggagttttgctcttgtcgccaggctggagtgcaatggcgcgatctcagctcactgcaacctccgcctcccaggttcaagcaattctcctgcctcagcctcagcctccggagtagctgggattataggcgcccaccatcacacccagctaatttttgtattttaagtagagacggggtttcaccatgttagccaggctggtctcgaactcctgacatcaggtgatctacccgctttggcatcccaaagtgctgggattacaggcgtgagccattgtgcccagctatttatatcttcaacctgtgttttaagttctgtgtttacttttctacttgttgacatgtacctgtatctgaggaatgacgtatactatttaaaatagtttcttcacagttgttgaaaaaaatcttatgcacagagaggtttttggtattgttggagagtgtcactgttttatataataaaacttcaaaatgttgtgatccttttgaacatggccttccttatgccacttccagcagacaacatacactccccccttttgagtgttaaataggcactgtgtttataaggtattggagtgcatttagctcaagggtaacacttaatcccaatgtggaagaagaagcatagaaataatagaaatcacacaaagtattttcatagcatatttgtgtatatgactagatatttactgttcagtgaattttattggggatagcatttattaagtatttatacttatggtactatctgcctcatgctgtaagtataaatgcttaatactccctggctaactgttacttgtaagcactctgtattgtttgaatagataagtactaccacactagatgctggcatcctatacttagagtagcctccattctgaagtctttgcagctacttaaatatgcagaagtcaggaattaaatgactgtaatattttcaaagaatatatttcttggtcatatttgagacatccttatactgttggtttgtatttttcctggatgtataaaaataatttaagagatatgttgataatttaaggaatatattcacaggtaattactgttttatgaaccataagatctgcatctctttaggttttatttttcacactatttagtataaagcggaaagtaaaagtcaccttcttcccttccagtcttaccaggggagactgctattaagtttgatgtatatttttctagaattttctttatacatgtgtagttatatgtagacatatatattttataaaaaaggaatcatgctatatatcctattctactccttcatttttttccactcaggaatataccttaaactttccatgtcaatacttacaaatctgttttttttttttaacagaatattttattgtttgggtagaacataatttgtttatttagtcatcttttttttttttttttttgaggtagtcttgctctgtcgcccaggatggagtgcagtgatgtgatcacagatcactgcggcgttgacatcctgggctcaagcggtcatcccacctcagcctcccaagttgttggtgcaccaccatgcccatgcccagctagtttttgtattttttgtagagacagggtctcgccatgttgcccaggctggtctcaaaactcctgagctcagcaatccacttgcctcggccttctaaagtgctgggattacaggcatgagccactgcacccggtctatttagtcttctattaatgaacatgtatgttgttttcattttgttttaaaagctccactgaatatacactgtgagctcttgtgtgattatttccctaggataaatttttggaagtggaaaatttctgggtcaagagtatgctcatttaaaattgtgattcattgccaaattaataggccagacttttaaagaggcaggtaagtctagatgcaatataaaacaaggaaattataagtgatagctatcatttattaagcacttcttgtatgtcagggagtaaacgttagtgctttatgcacactactttatttaatcgttggaacaattctgctttatggaagagaatgccaagacttttgttatttaactgtcccaaatcatgctgcaaatataagtggcagacctggaattcatatgcaggttccttgactccagtggtaaaggcattaaaaaggaagatgctgtctgtggaatttctttttcttagttttggcagctcagaatcaggcttgttttttgagatgcccgggctggagtgcagtgatgtgatcacagctcactgcagccttgacctcccaggctcaggtgattctcccacctcagcctcctaagtagctgggattacaggtgtgcatcaccatgcccagctaatttttttttttgagacagagtctcactctgtcacccaggctggagtgcagtgtcacaatctcgacttgctgcaaccctcacctcctgggttcaagcgattctcgtgcctcagcctctcgagtagttggaattgtagatgtatactacgcctggctaatttttgtatttttattagacacagggtttcaccatgtcagccagcctggtgttgaactcccaacctcaagtgatcctcctgcctcagcctcccaaagtgttgggattacaggtgttagccaccacgcctggccagagtttctgtattttttgtagagatgggttttgccatattctccaggctgatttcaaactcctggggtccagtgatccgcctgccttggcctcccaaagtgctgggattacaggtgtgagccactgggcccgactcaggcatgatattaatagtgaattctcataatggcaattaaaatagttgttggtagatagtaagtgctttatatattttatttcatttaatccttataacagcctacgaaataggtactattaataactcaattttaaaaataagaaaatggaagcatagaaaagtgaactcaggcttgtaatcccagcactttgggaggccgaggtggggggatcacgagatcaggagttcgagaccagcctgaccaacatggtgaaaccttgtctctactaaaaacacaaaaaattggctggacgtggtggcacgcgcctgtagtcccagctacttgggaggctgaagcaggagattcgcttgaacccaggaggtggaggttgcagtaagccaagattgctccactgcactccagcctgggcgacagaacgagactctgtctcaattaaaaaaaaaaaaaaaattagccgggcgtggtggcgcacacctgtgatcccagctactcaggaggctaaggcaggagaatcgcttgaacccaggaggcggaggttgtggtgagccgagatcacgccattggactccaacctgggcaacaagagtgaaactccatctcaaaaaaaataattaaaaaaaaaaaaaatcaagtaggccaggcacggtgtcttatgcctgtaatcccagcactttgggaggccaaggtggagaggattgcttgagcccaggagtttgagatcagcctgggcaacatggtaaaaccccatctctacaaaaattttttttaattaaccagatgcaggggtgcacaactgtggtcttagctactcaggaggccgaggtaggaaaattgcttcagcctgggaggtcaaggctgcagtgaacggtgttctcactattgcacttcagcctgagcgacggaacaagaccccgtctctaagtaaagaaaaggaaagtaatttgttcaaggttatatagctgatgagtggtagagctaggatttgaacatagggagcccctgactctaaggtcatggttttaacaactctaccatgccgcctggatgaatattgatttggggaaggaacaatcctgccagttaatccttcccactatttatgtttcctgttgttgtttacttgttttttctttgtttgtttgtgatggagtctccctctgtcgcccaggctggagtgcagtggcacgatctcggctcactgcaagctccgcctcccgggttcacaccattctcctgcctcagcctcccgagtagctgggactataggcacccgccaccgcacccggctaattttttgtatttttagtagagatggggtttcatcgtgttagccaggatggtctcaatctcctgaccttgtgatccgcccgcctcagcctcccaaagtgctgggattacaggcatgagccaccacacccagcctgtttgcaaattcattccttcccgagcctttcagcagtggttctcaatttgaatgtgcataggaatatcttagtactgttaaaaatgtagatttcaggccacacttccactaatttgatagggctggtatgggtcctgggaatctacattttaaaaaatatttttaaaataataacttatccgagtcacatggcaccaaagtgtgttagcagccaaaagtatctgttcgggtctgcagcagccccaattcttgcctcctcaggagacagaaggagagaccgagacaagttttagagcaggagtgaaagtttattaaaaagccttagagcaggaaggaaaggaagaaaaatacacttggaagagggccaagcaggtgacttgaaagacaggtgtgctgggaatctgcattttaacaaacatctagatcagtatttcttaactctttcaccatgacccacagtaagaaatagattttgtttttgagttcaatatatatacatacaccacacccttaggacagcgataccctatgtattagtccgttttcactctgctgataaagacacacctgagactgtgaagaaaaagaagtttaattggacttacagttccacatggctggggaggcctcagaatcatggcggaggtgaaaggcacttcttagatggtggcagcaagagaaaatgaggaaaatgcaaaagcggaaatccctgataaaaccatcatatcttgtgagacttattcactaccacgagagcagtatgggggaaaccacccccatgattcaaattatctcccactgggtccctcccacaacacatgagaattatgggagtacaattcaagatgagatttgggtggagacacagagccaaaccatatcgccccactacatgcagtgtactcaattctattctgtacctttcctttcccttctttttctttctctcttgcattgttagtgcttacccagcccactaaattaattttacaatcagtggttcccaagctacaatttgaaaatctctatctgagatgattctgatgcaagtgatccacagagtatactctgagaaactttgatctgatctacatgctgagttcagcttctcaaatatggcctttaaagcccttcataatctggaagccttcctttccattctagctttcattctgtacctcagcttcctacccctccttcctctaccactgagtgcacacatgcacttacttgtttttgccgttctgaactatctgcactgttagaagagccatgttctttcttacctctgtgcttttatacatgcagttcctttgcatgaaataccctgatctgcctggtgaatttttcttactcaccctccaagtttaaggatcacatcgtctttaaagccttccctgaccttctctctgttttcccaaagtacctgtgtgtgtgtgtatatatatatgtgtgtgtatgtatgtgtgtgtgtgtgcgtgtgtgtatgtgtgtgtgtgtatatatatatatatatatatatatttttttttttttttttttcttttccgagacagagtttcgctcttgttgcccaggctggagtgcaatggtgcaatcttggcttaccgcaacctccacctcccaggttcaagcaattctcctgcctcagnnnnnnnnnnnnnnnnnnnnnnnnnnnnnnnnnnnnnnnnnnnnnnnnnnnnnnnnnnnnnnnnnnnnnnnnnnnnnnnnnnnnnnnnnnnnnnnnnnnnnnnnnnnnnnnnnnnnnnnnnnnnnnnnnnnnnnnnnnnnnnnnnnnnnnnnnnnnnnnnnnnnnnnnnnnnnnnnnnnnnnnnnnnnnnnnnnnnnnnnnnnnnnnnnnnnnnnnnnnnnnnnnnnnnnnnnnnnnnnnnnnnnnnnnnnnnnnnnnnnnnnnnnnnnnnnnnnnnnnnnnnnnnnnnnnnnnnnnnnnnnnnnnnnnnnnnnnnnnnnnnnnnnnnnnnnnnnnnnnnnnnnnnnnnnnnnnnnnnnnnnnnnnnnnnnnnnnnnnnnnnnnnnnnnnnnnnnnnnnnnnnnnnnnnnnnnnnnnnnnnnnnnnnnnnnnnnnnnnnnnnnnnnnnnnnnnnnnnnnnnnctggagtgcagtggtgtgatctcggctcactgcaagctctgtctcccaggttcacaccattctcctgcctcagcctcccgagtagctaggactacaggtgcccgccaccatgcccagctaatttttttgtattttttagtagagacagggttccaccgtgttagccaggatggcctcggtctcctgatctcgtgttccgtccacctcggcctcccaaagtgctgggattacaggcttgagccaccacgccccgccttatttgtacttttctaccaaaaatatcacagttgttttccttacctgagatgccctgaaagccttctcagttctcttaagtctgagataacatcttcctaattatacggtatactcagcaattaatcattgaaagttttgtgttatctgttagatcatttgattcttcaggaattttcttaaaatattaatttcatgctacttgtggacagggtctgtgatggaatcttgtttccatttcactttggcacctaaacaatgtatttgttttactgttatctctatcttctcagctaagtgccttgagctattgagtttcctacctgcacacaatagattccccaactagtgtgttttaaggccggcctttatctttcttgccatttgttctttaaaactaagaaacagtctctagcaaacggggcataaagcagtctaatactgtcaaatttgaggcttcaagtaaaggattattcaaattgtctaattgccaaagtctaaattgggtgaggaatttaattagggactccaatatcagattttaacagtgtttacttagctagaacaagagtggcagttagactttgtagaggactcttaactgcaaaagctgaaaaaaatttgtaattatatatcattttctagttatgtactttggtaatgaaatgttaggatttctagtatgcggcagttaaactccatagaatatctaaactgtatattaaattttgtgcaataaaattgattttgacaataaagaatttgcaattaagttttattaggtagtttactgttttcccatgtagagaatcttgagttgttatgagagtaaaaggctgctatacagttgagtttgggaaaactacattacttagtagtctgaaagggaatacagtttaataagtagtctaacatagattcttatctctaaagtctggtctaatacaagaaaaagcctttccttacaactgaaaacttaaagtttgaaaaaatggctcatgtgtacttcattgtcctttctttattgcagtcagagttttcgaagcctttttttcattaccctaggcagaacttgtgtactttcttgctttcagtattccttgagcatatttccattataaagtttttcatgttgtattatataattttagtttatgtatctatttctcatccagatactcatctcactaaggtcaggcattgtcttttcaaatttgtatctaacactttactatggtagcacataatagatactcaataagtatgttgaaaggttgagtaaattaatgatatacttctagtatacttctagcacctttactgtttgcctggcacatgaacacttaaatgtcaacttttattattatacataggggatactttatatactttttaagtaacaaaaatgtaaattaattataactaaattttatatttttccttaagtgagacttagttcattttttttttttctattatttgtagagacagggtctccgtatgttgcccaggctggtcttgaactcctgggcttaagtgatcctcctgcctcggtttccaaaagtgctgagattacaggcatgagccaccatgcccgactgagacatagttcttaaaattgttattccaggctgggcgcagtggctcacgcctgtaatcccagcactttgggaggccgagatgggcggatcacgaggtcaagagatacagaccatcctggccaacataatgaaaccctatctctactaaaaatacaaaaattagctgggcatggtggcgtgcacctctagtcctagctacttgggaggctgaggcaggaggagaatcagttgaaccaggaggcgggggttgcagtcagctgagatggcgccactgcactccagcctggcgacagagcaagactccatctcaaaaaaaataaaattattattccatatgctgtgtatttttgccttgttatttatttttatttcagtagtgtttgacagtattagaattttagaaatgttacacttctagagctagtagacataattgatttttaaaatttaattcctgcttatgaaaaatatagcatgataatatcttcttggttaagaatgaaattctcattacacacctactgattttagggttaaaggagtgatatttctttctaaaggtagattaaacatttaacataaaaaggaaggggctgggcacggtggctcacacctgtaatcccagcactttgggaggctgaggtgcgcagatcacgagttcaggagatcaagaccatcctggctaacagggtgaaactccgtctctactaaaaatacaaaaaattagccgggcatggtggcgggcgcctgtagtcccagctactcgggaggctgagacgggagaatggcgtgaacccgggaggcggagcttgcagggagccaagctcacatcactgcactccagcctgggtgacagagtgagactccatctcaaaaaaaaaacaaaaaacaaaaaaaaaaaaacataaaaaggaaggagaacaggagaacagttattaccttatattttgactaactacaaagtgaaattttaaactagtttaagaggaatttgagagaagtcgattggtctcatgcttccttccgttagtttctgcaaatgttaaaactgagtatcaggccaggcacggccactcacacctgtaatcccaacactgggggcccaaggtgggtggatcacttgaggtcaggagttccagaccaccttggccaacatggtgaaaccccgtctctactaaaaatacaaaacttagccaggcatggtggtgcatgcctgtaatcctagctgcttgggaggctgaggcgttagaatctcttgaaccctggaggcagaggctgcagtgagccaagatcacaacactgcactctaacctgggcgacagagtgagactctgtctcaaacaaaacaaacaaaactgagtatcaattttgacattacagaataaaacactgcattttgtattatagaatgatatgtatctattaaaatgcctacagcaagcattatcctaaataagagaaatatcagaaacattcgctttgaagttaagaatgagaaaccaaggcacacttttaccacttgtattcaacatcgtagtgaaggtcatagccagagcagtgagcattgtagccagtgtacagtaagaccccccaaaaagtagaggcataggattgaaaaatgaggaaataaaactataattatttgaaattattatagtgataacccaaaagatatataaatggattatttagataagtttaaaagagtgagctttgtgcattggcagtatagccaagtgaggtttatcttaggagtggttattgttaattgaaaactttttcctaatatcctgctgtcatgacttgcagtatagtcagcattggcaatttttgacagtctttttggagactgaataaaaaataaagtttaaaagggttagtggatgtaaaattaatatataaaggtcagtcatatttccatatctcagcagcaaataactggaaaacatcattaaaacaaatattgtcaggagatatgaagtatgtagaaacaaatcaaagaaatgataagatttctttagggaaaattataaaattttattatgagatcttagagaatacttaaataaatggagaggtattccgtgttctctaatagtaatattgtaaaaatgtcattttcccaggccgggcgtggtagctcacacctgtaatcccagcactttgggaggccgaggcgggcggatcacaaggtcaagaggttgagaccatcctggccaagatgatgaaaccccatctctacttaaaatacaaaattagctgggcgtggtggcacaggcctgtagtcccagctactcgggaggctgaggcaggagaatcacttgaacccgggaggcggaggttgcagtgagctgagatcgtgccactgcactccagcctgggcaaagagcaagactgtctcaaaaaaaaaaaaaaaaaaaaaaaaagtcattttcccccaattgataagtagattcaatgcaactccatattaaatgtgataattctaaacaggaacagaatatagaaaaagaacaatgaggagaaattgacctcatcagatagaagtattaatactaattaaggcagtgtcatattgggataagaatagatagattgactcattggagtagaattgagagcccagaagagactccaatcacctgtgaccctgaactggaataattgggtaaatcattatcttaacttgtttttattaatctttcttaaatgtatgtatagctcagatttatttcaatatttaatattgcaagcgttttggtcttataaatttagtgatgtttttgtgacccatagtctgccgtagaaacttaactcttattaatattgattagcctatggtaaaattggttttattatggtgttgtttcgcttgaagttgcaatttccaagaacctatagacatcatcctagaagacattaagtgaagacttactgtgtatataagcagatttgaaattaaaaatataaaagatcttctgaagttgcaacagtgctcagaagtattataaaatagaaataaatcatttccaaaagagagatttcatttttgcccaaaatctttcttctaagctataaaagacaaaactgttcaatacacagttttgtcaatttaaatctacatattcacccaatttttataagataaaataaaaatgtataattattgaaaaaagaattgagagcccagaaacagagctaaggaaatatgcgactttagtgtatgacagaggtggcatgtcatatcaagaggaaaggaggaaatgtttgagaaatgaagcttgaaaaaaaaatagttatttaattaagtcggattccctacctcacatcatatacaaatatcagctgaagatggattaaaggctttaaaagtgaatcaacattttaaaaacttttggtagactatgttggtaaacattttaatccttgaggtataaaaagacaagacacaaagtgttttctataaaacttttgataaatttgattatattcttaatttcaatttattatatttttcagttctagaatttgattcctttttttcagtttcaagttctccagtaaactctcaatcttaattccttgaatatattaagtatagttactttaaattatatgtctgaaaacttcattatttggatcctttgtggtatgtttttattgcctgttgctttcttttaaaaaaaaattttttattttgcctcctcatatgtgtggttatttaagataaaataccagtcattttctgtgaaaaagagtaaagattttaggcctacaatattatctccctgcagaaaattttcttctggctagtggccgggtacactagcaatcccaggtcacctaaaatcagtgaatgatttaggttatttgaagttgggctttcatccctgaaatctgatatgtttccagttcacccttactcctagggtatagctctttcagacctcaaatcccccaaagccttgggtatttatcagatcccacatccttggcaaactctcaactcctttattttttccctatagtttattgagagttcatctcaatcttcttaaccatctcttagaaaattgtcaggctatattcagataaaagtggcctctcattctgaactgtgggttttcttctctcatatcttggtcgcatggtttttcatgaccttgttagctctctaatgtcattagagaaattttgtttcatattttgtccactttattctcatggttgaattggtccagtttacagattatcatctatcattaccaaagtagaacttctttttattaacgtttactttatgctttcttcagtaacttgtaaaagtatctaaatgtttggttgttcaataggactttaagtaattcttcagtcatttatgttaattgagaaaatgtataataaatatcactactaggttcaacacctagtggagatacatcagacatcccttctgacttcatttgaaactttgtctaataggatagaagaggcatacataaatgattatcatgtaagattttaaaacttttaagggcataagaaaggtataggtcaagtcttgcactgatttagagaggagaaatattccctccattgcagaggatgaagttaggctttatagaaaagaagctttgagctggggtttcagccttacactgaatcttgcattgggtaaaaacgggtatctgtcatgattcttgcctgtcagtagtttttaaccatgttgtgcagagatgaaagtaattctgatgcagtagtaattgtatttccacacattgagaagattcaaagcaaaatctcataaacagtgattttttttgagaagtaagtagaatttcttccctgtagtagaactattatgtgactaaatgtttttgaactttggcttattgaccagtttgtttatttttcttttatgtgccatttaaaaatatttaaaataaacttttattgagatacaataaaatctacccgaatatgtcctgctacataaccacaatcaagctatggaacatttccatcaccccctaaaatttccctggtccccttctcgctcagttccctaccctgcctctgcctcaggcaattactaatctgccttctgtcactggagattaatcttttctaaaactgcatgtaaatggaagcatacagtatacttttgtatctggtttcttttgctcaacatggttttgagatacattcatttgggagtgtatacccatagcttgtttttttgtttttttttttttttttgagatggagtcttgctctgtcgcccaggctggagtgcagtggcacaatttcggctcactgcaagctctgcctctcgggttcaccattctcctgcctcagcctcccaagtagctgggattataggcgcccgccaccacgcctggctaattttttgtatttttagtagaggcggggtttcaccgtgttagccaggatggtctcgatctcccaacctcatgatccacccacctcggcctcccaaagtgctgggattacaggtgtgagccaccacgcctggccagtttgttctcttttattgctgagtttattccattgtaggtctataccacactttgtttatccattcacagagttcacataggtttgtttttaaacttaccaggaacatctagctacaaatttatcttttttgcatattgattactcatctttgcaattgagagacactaatatcttgaatgctacatttataatgctgtaaaaatggattttgaagaggtagctctcatattgcctacacaatagtgccagtagagtatgctgctgtaacacaagtgttggtatcataacattttgacctttcagttgtacagagtacagatgtgtttttatgcactgtttcaaagattaagcataagaatgctaatactgggatacttataaatgttgtgatagctaagtagactctcaatgtcattaaataaaaacagtacaaaatacattatcagttttattagttattgcctgtaaaataaggaatttgggcttaactatgtttctaaatttagtgtttcaaaatttaatactttgcaaagtaaaattgttatgtaaataatgtgcatgtcttgctttttaaaaatatgacttattgctatagcttatggcatttgaaaaggcaatattttcttttggaactggatttctggttcaaatactaatttaacaaactattatactatattctatcatgagcttttctagttttatagaactgtaaaatttttaattaaaacattttttaagtttgcacgtaaaatttcttatggaaactagctatcttaacatttttttgtttcttggtatttcatccttaaaatgttgatccacatttagtagatactcttgtgtatgtcatttttatgtacaacacatgtacaattttctaatagatttcaatttttaaaagcataggctctaaatttaatgacttgagttcacatttccaccctgtcactgtgaaactttgggcaagtaattcatctctttacagtcagttccaggccaggctcagtggctcacgcccataatcccaacactttgggaggccaaggtgggtggatcacttgagcctgggagtttgagaccaccctgggcaacatagtgaaaccccatctctacaaaaaaatagaaaaattagctgggcgtggtggcatgtgcctgtagtcccagctactcaggaggctgagatgggaagatcacttgagcctgggaggcggaggttgaggtgaaccaaaatcgcatcactgcactccagcctgggcaacagagtgagacccccatgtcaaaaaaacgaactaaactcagttcctcgtttgtaaaatggggatgaaagtaattcttgtacagatttaggagataatttacagagtccttaacacaacaactggaccaaatacatacttgttgaatgaatgggtaaatgccattctttgttgtgtacaaacctgcaactattttttaaaactttgatttgttattaatgtcaacttgggattttgctttaaatcccaggtgaggggatagttacttcctgaacatggctataatttatcaaatactgttagatagtgattacttgataagaatgataaaaggcattcttgagattgtatactgttctatttttattcatacatatttggatgctattcaaggttattggctataatgggcagggaggaggacctagcaagtctttaggtctatgtgactattacatttaaaaaattttttttttctattcagtccctgaaaaacagctgaatgatattgaagattgtgacctcaatgtggtgagactgtgttttcaagtttttctccctgatgaacatggtaatttgacgactgctcttcctcctgttgtctcgaacccaatttatgacaaccgtaagtacttcattttcttatatttgtagtcttaacttgttttttgtaatagtttaattcttaaaattattttggtaattaggaaaacaatatattcatgataggaaaacttccagacattagagaaatatataacagaaaggaaatcttctctaatctcatcctccagagataatcactatccttaggtgcatattttaccagtttcttcttcctgtatatacacagatacattgtcatcatcatcatttttgacacagtacaattttggcaacttaaaatcataagtgatgattgttttaaaaactaactttcttcttaccatatatcttggacattttccttttaatcaccttattcttttcagtagcagcatattttattatgtagttatatcataattttattaattaccctcttacaaggcatttggtttgtttcttttctcattttttctttttggcctagcaaactgtactgcaatacatattcttgtatatttttttttattggttttttttttttttttggagacagggtctcactctgtcacccaggctggagtgcagtggtgcagtcatggctcactgcatggcaaatgctggctcaaaggatatggatatatctcattttgaaagattatgaaactttcccccaaaatactgtgtgtgtgtgtgtgtgtgtgtgtgtgtgtgtatgtgtgtgtgtgtgtacatagacttagatatacgtccaccaatggtgtatgatatacctgttttatgtgtagaaggatagagagacttagggctataaaggaagcatgaaagttgtattgccatagggagatgtattgccatagggaaaattgtattgccatggggatgtggtcatgatttatgaagattaatctggtgacagtgggtaggattgattggcggaatcagaatttagaagcagggagatgtaattagagaatatgtcattacctagaaatgaagccacaaagtctaaagtaaagcagttagaaaggaagtggacagataaatagatgattaatgtatttagtgtcatttatctatacactaaaacttttattctgtgaatgcttttcctcaaattcttccctgcaaaaagaaataaaatattactaaggtagcaactcatttttttgaaaatcctttatatttaggtgctccaaatactgcagaattaaggatttgtcgtgtaaacaagaattgtggaagtgtcagaggaggagatgaaatatttctactttgtgacaaagttcagaaaggtatttatttatttcattgaatttagaataaattttagattaatagatgcagttactttgttttcccatttttttttttttggtttcttattgactagatgacatagaagttcgttttgtgttgaacgattgggaagcaaaaggcatcttttcacaagctgatgtacaccgtcaagtagccattgttttcaaaactccaccatattgcaaagctatcacagaacccgtaacagtaaaaatgcagttgcggagaccttctgaccaggaagttagtgaatctatggattttagatatctgccagatgaaaaaggtatgacattttgctggtaataatttatatatttcttgaagtggtcctgctaataacatcttcttgtaatattcatttgagtacagttatgtatattcataatttatgtttcttttcctggaagctttctgttggttttttctttatgctctttgcatctctttatttgttgggttgttttttgttttgttttgttttgtttttgagacagagtctcactgtcacccaggctagagtgcagtggcgcaatcttagctcactgtaacctcctcctcccgggttcaagcgattcttctgcctcagcctcctgagtagctgggactataggcacgtgccaccacgctgggctactacttttgtatttttagtagagacagggtttcaccatgttggctaggctggtctctgcatctctttcttcaagaagaggtttgattagtatggaataatttcaaagtatctaaactgcttactaaaatttctattttatttttgaaggtctgttttagtctttgtgcacttaccactcagagagtagtctctatattggtttcttatcaaaccttattgcattagttgacattattgacttgtgtgataagaaaacaagatgaatattttaaacagcttgttttgggttttttttgagacagggtctcactctgtcactcaagctggagtacagtggcatgatcgtggctcaccagagcctcagcctcctgggctcaggtgatcatcccacctcagcctcgtgagtacctgggactataggtgcgcaccaccacacttggctaatttttgtggggtttttttgtttttttgtttttttgtttttgagatggagtcttgctctgtcttgcccaggctggagtacagtggcgcaatcctggctcactgcagcttctgcctcctgggttcaagcaattctcctgtctcagcctcccaggtagctgggactacaggcatgcgccaccacacccgactcattttgtatttttagtagagatggggtttcaccatgttggccaggctggtctcaaactcctgacctcaggtgattcacccacctcagcctcccaaagtgctgggattgcaggtatgagccactgcgcctggccaatttttctgtttttttatggagacagggttttgtcatgttgcttaggttggcctcaaactcctgcgctcaagtgatccacctgcctcagcctcccaaagtgctgagattactttaaacaattttttactaagagaaaaatatccttttctactgatactactgatttgggacatattctataatacttattaaatccaacttacatacatatttattgaaaacattttctatatgtgaataaaatatttgtttattaaaggagaggatacaatcctataattttttatctgctttcctggtttctttctaatcagatacttacggcaataaagcaaagaaacaaaagacaactctgcttttccagaaactgtgccaggatcacggtaagaatagtttggatcgattcatatttaaataggttttgttttatttactttattcagtttttcaaattttattatttttgttttgttttgttgtttgtttgttttttgagatagcatctctctctgtcacccaggctggagtgcagtagggcaatctcaactcactgcaacctctgccccccaggttcaacaattctcctgcctcagcctcccgggtagctgagattacaggcatgtgccaccacacccggctaatttttgtatttttagtagaaacagggtttcgccatgttgaccaggatggtcttgaactcctgacatcaggtgatccacccaccttggcctcccaaagtgctgggattacaggtgggagccaccacgcccggccagtttttcagattttaactgataatgttatttttcaaatgacatttaataatggaaaaactttatcctaacagttaattttcctgagagaccaagacctggtctcctcggttcaattggagaaggaagatacttcaaaaaaggtattttatttcctatagcatatttcttgtgatcagaaagaccagtactttgcacaatatattggaattctatttttaggaatgaataactgcttctttgaaaattttctctccagatttttcatgctttcagtatagaatgaattaagcatggcttctgaaggttgtgttagaaactgattatgtttttgggatttattgttcaagaaattacatgttgttcatatggtagcaattttattaattacattgcgttatgaaaaaatgttactgatttggttagttacctgtttttataaataacattttactggaacacggccatgaatatttgattaaatattatctctaaactgctttttttttttaacactatggcaacagggttgaatagttccaacagaggctgtatatagctcacaaagcctaaaatatttacaatctgactttttacagaaaaaaaaattgccaatccctagtttaggtaattcaaccgagggctaattagaagaagtcttttttcccccacgtacattcttaaatcattgctttttcctggtttagtttgtaaagcatttgtataatatgtaaatagatacagaattaattttttctgtaatttttttctgactgtgaattttatagtctcttagggttctgttgtaatatatcttaaaagttatgtgtattttcttatccctaatgagtgttgtctccatccttccattttctcctaaaagtgaagagtaagagatgattttggctatttggaatcccattaattgtaattctaatatttatcttttagttttcaaaaatacctttatagagcctcagaaactagattttcatatttaattgaagtgaaattacatatgccaaagtaacttgccaaaatcattttacctgtatttgtaaaatggtatatacgttacagaatttcattttggattcgtgtaataattttagtgctttttacatttttttatttgaaatgttacattggtttccttgacatttttctttatatatatttgtgtgcttatgcaattttaatttagaaatgctttttataattttgttcattttaatttcgtaaaataaatttttcctcccacagaaccaaacttgttttctcatgatgcagttgtgagagaaatgcctacaggggtttcaagtcaagcagaatcctactatccctcacctgggcccatctcaagtggattgtcacatcatgcctcaatggcacctctgccttcttcaagctggtcatcagtggcccaccccaccccacgctcaggcaatacaaacccactgagtagtttttcaacaaggacacttccttctaattcgcaaggtatcccaccattcctgagaatacctgttgggaatgatttaaatgcttctaatgcttgcatttacaacaatgccgatgacatagtcggaatggaagcgtcatccatgccatcagcagatttatatggtatttctgatcccaacatgctgtctaattgttctgtgaatatgatgacaaccagcagtgacagcatgggagagactgataatccaagacttctgagcatgaatcttgaaaacccctcatgtaattcagtgttagacccaagagacttgagacagctccatcagatgtcctcttccagtatgtcagcaggcgccaattccaatactactgtttttgtttcacaatcagatgcatttgagggatctgacttcagttgtgcagataacagcatgataaatgagtcgggaccatcaaacagtactaatccaaacagtcatggttttgttcaagatagtcagtattcaggtattggcagtatgcaaaatgagcaattgagtgactcctttccatatgaattttttcaagtataacttgcaagatttaaatccttttaaatcttgataccacctatatagatgcagcattttgtatttgtctaactggggatataatactatatttatactgtatatataatactgactgagaatataatactgtatttgagaatataaaaaacttttttcagggaagaagcatacaactttggacatagcgaatacaaaattggaagctgtcataaaaagacaactcagaggccaggcgcaggggctcacacctgtaatcctagcactttgggaggccaaggcgggtggatcacttgagaccaggaattcgagaccagcctggccaacatggtgaaaccccgtctctactaaaaatacaaaaattagctgagcatggtggtacgtgcctgtactgtcagctacttgggaggctgaggcacaataattgtttgaacccaggaagcagaggttgcagtgagctgagatcacaccaccgcactccagcctgggtgacagagtgagactctgtctcaaaaaaaaaaaaacaaaaaaaacacacttttttatatttctttttataatgttttaatgtattcttaaatttcaagcaaatttaagataaaacttgtaatggctatgccattgaaaaacttaattttttatttttgaggcccatgggccaaggtaacccctaaggggttttcttaggcttcttggagcttagatttgtatgtatatcaaaatgtctttaaaatgttaagttgggcagaaggcagttgaagtgagctttcaaggtatgggaggttttctacattttatactatttcaatctatgcctttaaagttgcttatgattttagctgtacactcattttttaaggggaagaagtttccttggaccattcgcctttcttagatgtcctcactccctgtgatctcataaaactgcctatttgacatctctatctagaaatctaattaaagctcacactcagcatatccaaaactgaattcttggtcttccctcccaaacttgcttctccttcagtcttctccaactcagtaaatggcaatgccatacttctggttgctcaggccaaaaaccctgaagtcatccttgattcttcttttagcacccatatccaatccattagcaaatctggtagaccctaccttcacaatatatctaaagctgaccacctcttttgacctctactattaacgccctattccaagccaccatcatctcttccctggattgaagctgtcatctacaaaaattcttcttatatccttgcattcctacagtctgttccccataaagtagccagaatgattatttttaaaacaagtcaactcataccattcatctgctcaaaaccattcattggcttctcatctcactcagagcagtcaaagtccttaaaagttgcaggcctagactccctgtcctacctcaggtaccaccatatcccacctcctcatgcagctccaggcaccttggcctcagtgctcctcaaagcatcaagtatgcacttgccttggacagtctgtacttggtattccctctgccttgaatgttgttctcccagaaaaatgcatagttcactcttacatccttcaggtgtcactccactgttacctgagcaggtcgtccttgaatatatacatcagcattccctttcccccctgctttatgtatgtccatagcactcaccacgatctgactttactaagtatttattcatttactgtttgttttcccataccgaaatataaactttctaaggacagaaatttttgtgctttattgttgaatctccaatttgtagaaaaatgcctaccttatattaaacactcagtaaatgtttattgaacattaaaagtattactaatagaactttggtttttgaaagaaataataactttaattataagacgtatatgatttttgcagttttacttagtgtgacattgggtttatgagaatcgtgtacattcaagtccaggaataataatggtcatccaaattgtttgaaaggaaaataatcccagtggcaaaatgatggtagaatttgggtaatcttttttttccttttatgaaaagagattttattgaaggtaaaacattagaggttcattgagaatctctaaatccatgttttgacattgtcaagctcattgcaacttccagattgagtaacacttataacacatttccttttcaaagtgcaagatttttaaaagagacttgtcacatattcatttggctggtttcaaatggtgagctgaatgctgggtaatctctactagctccttaatcagatttaaaattctcagtgtttcctagttgtttctgcatactttatgtgagttgttatagctgtaacattacactttatttgctgtttgtgtttcgtgacttttggtaattctggcatttagaaacctttcactttgcttcaaaacgtagttatattttggagttttcatttgatatataattatttattttgcccttttatttcccaaagacattgtaagggttaattagatcattatattttattattacagattaaagttgggcagtaatcttaattatgatggaattatcattatgctaagtaattaactttacctagtttgttttacaactagaacctgccctaaatgttgaatatcttcctagcaagaaacagtctgtcattttacttacacgatgtctaaccaaaccataactttacataaactagtcgtttcggtcaaatagaaaaatgtgtgaatgccataaaaacaaaaattctcagttaaatgatactgggaaatagggaagacagcaaagtgagacttgggctcaggatggttcaggaagaaaaaaaaagaaagacccctgagtaccattaatattcctcagaaattattatttcaaaaggaaatatttctgtattataaatttttcatgagcagccattatgaaatctcacaagaatcatagaattcaataaaaaaggtagaaagtaatttttttacttaaaaatataaattaaaataaatttttaaaatcataagcacataaatagaacttaccagggagaaagaaaaacctgaaggcacaatttcttttctgttcaaaatgtgaacccaggatgtctctagatgatgatggatgataggtggggagattttttttttttttaatacagaatctcatagttttggattaattagcaccaatcagtttaaacactgactgttagaatagctgcatgggtttttttctttaaactaattaagcgttggctacttagtataagtaagtataagccgaattaaggttctgctacatctgtgtttagaatatttttttaaaactaaataagtgttggctagttttgcggtgtaagcagaattaaggttctgctacctctgtgtttagaatattcccaatggatttttcatttttcaggtgctattttttgaccctgtatagactttaatttaaaatgaatttggtaacgtttctcctctgtctctacatatattcatgctttcacctgctcttttaacacctgcttttagtatctgaggcactttttctgaactctacttgtgcactggatccctcctcctttctctgccaggctgtgtttactttatccttacatcaccacttagtgattcctttctttgtataaacatggtaaatgtcttcattagcctaaaaggaaagaccaaataaaacctttcctaccacttggatgcatttgcatcctgacttctgaaatgcctccagcctccattttctcccttcccagttattccttagcccagccatctctgtctttagctcctacaattttcttaggatattctgggaaagatgagcggagactgcccgccttgtcaaatctagtgtctttttttcagtcctcacactgcttgacctatgtataacctcctatacttccctctttgcatactcctctgggttttctgtggtagtcaagattcctccctgagatttatttcccatgagtcttgacccctcccctcagttggtgctatttccccctacccgccctccgatgatcttatcagagcccacaggttcagttttctttcatgctacctgaatgtcctgataaactggctcgctctcttctttaccttccataatggcattaccatttaccacgccacccaagatacttactaggaacctcaaagtattgtattctttttctccatcacactcatacttaatcatcaagtccttttgagcttgtctcctcttgaatatgtcccttcttaattcctgctgccttcttagtaaaggccttcattcttttttccctagtaataatcttttccatatgttccagttaaaataccatgttctccctattccttattacatagctagcattccttgaaaaaaaacaattctctcaggcctccatacctttagcatgttacccactctgcctctgctcttctggaactagaacactcatccttgaaggctgggcttctgtatgaaggttggtcctgcctccttacttgaggtgaagctttgtacatgcctgtattacggacatcctcttatttaagtgtttgtctctttcgtcattgggactccagcacccagcatagtccctagtatactagttggtgccgaataaatagtagctattattagaaaaggaagggtgaaattgacatgggagttagtaaaatgtatatggaaatgatttttaaagggaaaggtaatgattttctggcaggaaaagcagcaatgacaagattacttaagtcttgtgaaataacacttctcttccttgacctgctgcttcccttttttaccacacacacacgcacacataccacagccctttgagactgaaagcagctctattgagaatagtagtgtcaactgtattatgtagaaattctaaagtttttgggattatttcatagccctgaccttgctacttctctccactttatgtggcaggtttaatctcaggtctccctcatacacttctcagcctcagcacctaaccctcacacaacactccagtattgatgcagtcaatcttgtataacattttttgaatgtccaatgtgcaaagcacgatgttggaaattatacagaggtgaataagacaaaaactcttgctctcaaagatgtcagtctttttctttgcaaggataacacatgtagagtaaaatgcataaaggggactaattttaaatgtacagcttaattaatttttatgtatgttaacacccatgtcaccaccatgtttaggacatttccagcacccctgaaatttccttcatgccccttcccagtctgtacctacacctctaaatctattttcaatcttaatggccttttaaataactgggcttctcacaaccatagtgaacagaaacagctgggttgtcaacgtctaacctaatacttcaggaaaactcatgatggtttccatgttaagagagacatggagcagggcactggcatggtggatggatcacgcctgtaatcccagcactttgggaggccgaggtagggggattgcttgagcccaggagttcaagactagcctgggtaatataaggaaaacctgtctctgcaaaaaaaaaaaaaaaaagaggatacaaccaaatggaagaacattccatgctcatgggtaggaagaatcaatatcgtgaaaatggccatactgcccaaggtaatttacagattcagtgccatccccatcaagctaccaatgcctttcttcacagaattggaaaaaactactttaaagttcatatggaaccaaaaaagagcccatatcgccaagtcaatcctaagccaaaagaacaaagctggaggcatcacactacctgacttcaaactatactacaaggctacagtaaccaaaacagcatggtactggtaccaaaacagagatatagatcactggaacagaacagagccctcagaaataacgccgcatatctacaactatctgatctttgacaaacctgagaaaaacaagcaatggggaaaggattccctatttaataaatggtgctgggaaaactggctagccatatgtagaaagctgaaactggatcccttccttacaccttatacaaaaatcaattcaagatggattaaagacttaaacgttagacctaaaaccataaaaaccctagaagaaaacctaggcattaccattcaggacataggcatgggcaaggacttcatgtctaaaacaccaaaagcaatggcaacaaaagccaaaattgacaaatgggatctaattaaactaaagagctgctgcacagcaaaagaaactaccatcagagtgaacaggcaacctacaaaatgggagaaaattttcgcaacctacttatctgacaaagggctaatatccagaatctacaatgaactcaaacaaatttacaagaaaaaaacaaccccatcaaaaagtgggcgaaggacatgaacagacacttctcaaaagaagacatttatgcagccaaaaaacacatgaaaaaatgctcatcatgactggccatcagagaaatgcaaatcaaaaccacaatgagataccatctcacaccagttagaatggcaatcattaaaaagtcaggagacaacaggtgctggagaggatgtggagaaataggaacacttttacactgttggtgggactgtaaactagttcaaccattgtggaagtcagtgtggcgattcctcagggatgtagaactggaaataccgtttgacccagccatcccattactgggtatatacccaaaggactataaatcatgctgctataaagacacatgcacacgtatgtttattgcggcattattcacaatagcaaagacttggaaccaacccaaatgtccaacaatgatagactggattaagaaaatgtggcacatatacaccatggaatactatgcagccataaaaaatgatgaattcatgtcctttgtagggacatggatgaaattggaaaacatcattctcagtaaactatcgcaagaacaagaaaccaaacaccacatattctcactcataggtgggaattgaacaatgagaacacatggacacaggaaggggaatatcacactggggactgttgtggggtggggggaggggggagggatagcattgggagatatacctaatgctagatgacgagttagtgggtgcagtgcaccagcatggcacatgtatacatatgtaagtaacctgcacaatgtgcacatgtaccctaaagcttaaagtataataaaaaataaataaataaataaataagaaaaagaaagccaggcatggtgacatgtgcctgtggtcccagctattagggaggctgaggtgggaggatcccttgaacccaggaggttgagtctgtagtgagcagtgattacgccactgcactccagcctgggcaagaccctgtctcaaaaaaaaaaaagacttagaattggtgatccaggccgcctaatggcatcaaataatttgttatatctttaatttattgaaggatcaccacatgcttttaaatagcatggagaaatggaaagaatagggactttttactcaggtaatacccagcctgctacctaacaggttgtgttgtactaaataaaatggtacataagaagaaacactgtaaattatatagtgcgaatcaaatattgttaataaaccaatatctgtatatcctatgtcccggattaatctttaatttagatactccttctagttatctaatacacagcagagtgagaaaaatcattatggattaggttctttagtaagaaacctgagatggacttctcattagcattaactagttattgcccagctttggagagccttcttttggcttatcatttattataagcccagaaataggtgactaatcagagataaatgtatgggttgtctgtatctagttttatgccttttttttgcctaagacgtagtcaaattaatattttaactaatacatcttagcagagtttagttaagcacaaagttaacagtgggtaggattgaatcttgaaagtaatcatgtctgtaatgtttttcatgcatgcaaaaagcacagacaaaaccactcatgccctattaataaacaaaatacagatcaaagttttcaaaagtaatcactctatttattctaaatgtctgtggctttaggaaaataccaccagctagtacttacctatttaaagatgtagaatttattatcctctaatattcttatcagttgtttccacaactttagtttactattggactttcaaaaatttaaagaattacaagtaaaattcattaaacacttgtgtgtgaatagtaatacacagtaattagtacagcatgttgcttcttcaacaaattgagttttcagggaaatcagcaagtaaatgaaatataaatttttggtaaaagtatcaaacattcatcttgcccatttttcctcttaaactttattatctaatcaaacatagttttccataagatgtaataaaatatagataaggttggaatatttgaggatccatttgtggaactgaatttaatgagacttcattggtgatacactcaatttttactgggtaattagctaataatgttggtcactgtctcacagttcaagtagctttaagatgatgtggcaaggaaaacacaaagcttttgggtaaccagcgttcttaaatgtatggtttttgaccaggtgaaccctttagaagtgatttctgttttaaaagtatgtacttaaaatacctttggctgtgatgaatgtagatcccagcagaataccaaaatcctattttttttgactgagtatttgtagatgcttaatgactgaaatgaatttggaggcactgatgaaagtgatttttttaaagttctcaggtactgttcaattatttaatgttaagtttagtatcaagatacagttgtttttaaaatgccaaaatgctgtttattatacagaatattttattacatttgcaatatctttgtatatagtgatttttttcttgataataaatggaaaaattctaaaacacttgctgaaattttgttgctatttaacttttaaaatatcagattttcttcatatttatagcatcttcctaacaggaaaaggtagttttagttgcttagaaacattagacatttttatggaatgctgttgctgaatatggttgcatttgtaactgtcctttgaaataattttgtagagtactgaagtgcctttttacaagatttttttcctttttccttttctggcttaaccaacaaaaatctgttttcagagtcctggaggctgaaagtccgagatcaggggtactaggacggtttctgctgaggctctcctcctggcttgcagagggctgccttcccatcatcctcacatggtagagagagagaaggatggagatctagggtgtctcttctcttttttgagacagagtctcactctgtcatcaaggctggagtgcagtggcacaatcacatctcactgcaacttctgcctcctgggctcaagagatcctcccgcctcagcctcccaagtagctgggactacaggcgcatgccaccatgcctggccaatttttgtattttttgtcagagtttcatcatgttacccaggctggtctcaaactcttgggctcaagtgattcacccgccttggcctcccaaagtgctgggattacaagcgtgagtcaccatagctggcctggcctcctcttttcttaaatccttttttttttaattgacaaaactgtatatattaatatttatcttgttcaacatgatgttttgaaatatgcatacgttgtggaatggctaaactgagctaatgaacatgtattacttcacttagttattttgtaagaacacttaagatctactcttagcaactttgaagaatatatttgttattaactatagtcaccatgttgtacagtagatctcttaaacttattcctatcaagctgaaattttaaatcctttgaccaacatctccccaactccgcaacccctatcccactctcacctccgcagttctagtaacaaccattctaccctacttctatgagttcaactattttagattccacatataggtgagatcatgcagtagttgtctttctgtgcctgacttatttcacttaacataatgttcttcaggttcatccacgttgtttcaaatgacagaatttcctttcttatgggtgaataatatttcattgtacatatacaccacattttcttcatttatct

SEQ ID NO: 89 - DNA, 2337 bp, Homo sapiens
  misc_feature (61)..(61): "n" at position 61 can be any base
  misc_feature (2277)..(2277): "n" at positions 2277 can be any base
cggaaggtgtgagccgcaaacccagcggagggcgggaagaaggaggaggcctctagggtgntcgggggactgggggccccgccggcagaggtccctcggcctcctgactgactgactgcggccgcctccggccaggacgctgggagctgcctgcgggaaggtgcggggagcggagccatggcctccggtgcgtataacccgtatatagagataattgaacaacccaggcagaggggaatgcgttttagatacaaatgtgaagggcgatcagcaggcagcattccaggggagcacagcacagacaacaaccgaacatacccttctatccagattatgaactattatggaaaaggaaaagtgagaattacattagtaacaaagaatgacccatataaacctcatcctcatgatttagttggaaaagactgcagagacggctactatgaagcagaatttggacaagaacgcagacctttgtttttccaaaatttgggtattcgatgtgtgaagaaaaaagaagtaaaagaagctattattacaagaataaaggcaggaatcaatccattcaatgtccctgaaaaacagctgaatgatattgaagattgtgacctcaatgtggtgagactgtgttttcaagtttttctccctgatgaacatggtaatttgacgactgctcttcctcctgttgtctcgaacccaatttatgacaaccgtgctccaaatactgcagaattaaggatttgtcgtgtaaacaagaattgtggaagtgtcagaggaggagatgaaatatttctactttgtgacaaagttcagaaagatgacatagaagttcgttttgtgttgaacgattgggaagcaaaaggcatcttttcacaagctgatgtacaccgtcaagtagccattgttttcaaaactccaccatattgcaaagctatcacagaacccgtaacagtaaaaatgcagttgcggagaccttctgaccaggaagttagtgaatctatggattttagatatctgccagatgaaaaagatacttacggcaataaagcaaagaaacaaaagacaactctgcttttccagaaactgtgccaggatcacgtagaaacagggtttcgccatgttgaccaggatggtcttgaactcctgacatcaggtgatccacccaccttggcctcccaaagtgctgggattacagttaattttcctgagagaccaagacctggtctcctcggttcaattggagaaggaagatacttcaaaaaagaaccaaacttgttttctcatgatgcagttgtgagagaaatgcctacaggggtttcaagtcaagcagaatcctactatccctcacctgggcccatctcaagtggattgtcacatcatgcctcaatggcacctctgccttcttcaagctggtcatcagtggcccaccccaccccacgctcaggcaatacaaacccactgagtagtttttcaacaaggacacttccttctaattcgcaaggtatcccaccattcctgagaatacctgttgggaatgatttaaatgcttctaatgcttgcatttacaacaatgccgatgacatagtcggaatggaagcgtcatccatgccatcagcagatttatatggtatttctgatcccaacatgctgtctaattgttctgtgaatatgatgacaaccagcagtgacagcatgggagagactgataatccaagacttctgagcatgaatcttgaaaacccctcatgtaattcagtgttagacccaagagacttgagacagctccatcagatgtcctcttccagtatgtcagcaggcgccaattccaatactactgtttttgtttcacaatcagatgcatttgagggatctgacttcagttgtgcagataacagcatgataaatgagtcgggaccatcaaacagtactaatccaaacagtcatggttttgttcaagatagtcagtattcaggtattggcagtatgcaaaatgagcaattgagtgactcctttccatatgaattttttcaagtataacttgcaagatttaaatccttttaaatcttgataccacctatatagatgcagcattttgtatttgtctaactggggatataatactatatttatactgtatatataatactgactgagaatataatactgtatttgagaatataaaaaacttttttcagggaagaagcatacaactttggacatagcgaatacaaaattggaagctgtcataaaaagacaactcagaggccaggcgcaggngctcacacctgtaatcctagcactttgggaggccaaggcgggtggatcacttgagaccag

SEQ ID NO: 90 - DNA, 1860 bp, Homo sapiens
atggcctccggtgcgtataacccgtatatagagataattgaacaacccaggcagaggggaatgcgttttagatacaaatgtgaagggcgatcagcaggcagcattccaggggagcacagcacagacaacaaccgaacatacccttctatccagattatgaactattatggaaaaggaaaagtgagaattacattagtaacaaagaatgacccatataaacctcatcctcatgatttagttggaaaagactgcagagacggctactatgaagcagaatttggacaagaacgcagacctttgtttttccaaaatttgggtattcgatgtgtgaagaaaaaagaagtaaaagaagctattattacaagaataaaggcaggaatcaatccattcaatgtccctgaaaaacagctgaatgatattgaagattgtgacctcaatgtggtgagactgtgttttcaagtttttctccctgatgaacatggtaatttgacgactgctcttcctcctgttgtctcgaacccaatttatgacaaccgtgctccaaatactgcagaattaaggatttgtcgtgtaaacaagaattgtggaagtgtcagaggaggagatgaaatatttctactttgtgacaaagttcagaaagatgacatagaagttcgttttgtgttgaacgattgggaagcaaaaggcatcttttcacaagctgatgtacaccgtcaagtagccattgttttcaaaactccaccatattgcaaagctatcacagaacccgtaacagtaaaaatgcagttgcggagaccttctgaccaggaagttagtgaatctatggattttagatatctgccagatgaaaaagatacttacggcaataaagcaaagaaacaaaagacaactctgcttttccagaaactgtgccaggatcacgtagaaacagggtttcgccatgttgaccaggatggtcttgaactcctgacatcaggtgatccacccaccttggcctcccaaagtgctgggattacagttaattttcctgagagaccaagacctggtctcctcggttcaattggagaaggaagatacttcaaaaaagaaccaaacttgttttctcatgatgcagttgtgagagaaatgcctacaggggtttcaagtcaagcagaatcctactatccctcacctgggcccatctcaagtggattgtcacatcatgcctcaatggcacctctgccttcttcaagctggtcatcagtggcccaccccaccccacgctcaggcaatacaaacccactgagtagtttttcaacaaggacacttccttctaattcgcaaggtatcccaccattcctgagaatacctgttgggaatgatttaaatgcttctaatgcttgcatttacaacaatgccgatgacatagtcggaatggaagcgtcatccatgccatcagcagatttatatggtatttctgatcccaacatgctgtctaattgttctgtgaatatgatgacaaccagcagtgacagcatgggagagactgataatccaagacttctgagcatgaatcttgaaaacccctcatgtaattcagtgttagacccaagagacttgagacagctccatcagatgtcctcttccagtatgtcagcaggcgccaattccaatactactgtttttgtttcacaatcagatgcatttgagggatctgacttcagttgtgcagataacagcatgataaatgagtcgggaccatcaaacagtactaatccaaacagtcatggttttgttcaagatagtcagtattcaggtattggcagtatgcaaaatgagcaattgagtgactcctttccatatgaattttttcaagtataa

SEQ ID NO: 91 - DNA, 40050 bp, Mus musculus
  misc_feature (18524)..(18630): "n" at positions 18524 to 18630  can be any base
  misc_feature (34289)..(34399): "n" at positions 34289 to 34399  can be any base
  misc_feature (37380)..(38406): "n" at positions 37380 to 38406  can be any base
gcaggaggatggaaagttggagggtagcctgactgtataacaagttcaaggccagcctgagatacatagtgaaatcctgtctcaaatacaaaacaaaacaaaacaaaacaaaacaaaacaaaacaaaacaaaaaaaaaaaaaacaaaaacccaccccaggcgtgatggtgcatgcctttaatctcagcactcaggaggtagaggctggagagtctttgtgagttcaaggccaggctgctctacaaagagagctccaggacagccaggggtacctagagagaccctgaccaaaacaaaacaaaacaaaacaatcaaaaaacaacttaacaatccttccaactctccaaacccaacgccacccccaaatcaacatcaaactctctcaagtcccggaaagcaaccaaacagacaacacctaaccaagctgagaagcggacagcactggagccttctgaagcactaacctcttttaaagagggggcgcagcccaattcaccagtgagcagattggcttagaaaggggcaagcgctccttgtgggacacagtcaccacttgttgatgaggttgcttgcagggttgacgccatggctcagcaggtagagtcacttgccaccaagcctgacacctgatctgcatcccaggagccacagggtgaaaagaaaaagcaaccctctggcttccacacaggcaccatggcatgggctccctgctaaacacgtatgcgtgcgcacacgcacatgcatatgcatgcatgcacattcatatgcacacacatagcgcacacatacacaaaattattaattaaaatgtaatttagattcggagtggacacggcggtcgccgcctctaaagagaagactcaccacatctatggctggggttctgagctcagtgtttcagaggcctccaggcagactgcagactgtgaaggaaggtgcagaatctctcattggtacagaatggattcgtcacacatttaccagttcaagaattcccgataaagtgtttcggcctagacctgaagatcatgaaaagtacagcggggacccccagaggcctcatagactgtacattgtcataagaataggaagtacaaagaggcatccagggctggagagatggctcagcgggtaagagcattgactgctcttccgaaggtcctgagttcaaattccagcaaccacatggtggttcacaaccatctgtaatgagagctgactccctcctctggagtgtctgaagacagctacagtgcacttacatataataaataaataattcttaaaaaaataaaagaggcgtccatactgggaaaaagatacgatcaagatgctcggactacagaaggcacacagccctcaaattcacaagaacatcccaccggtggatgcaaagctgaaagtggttaaaccctagataggcatccagcgcctggagctgccacagggacttcccacagaaaagaccatgtccagcgcgtgcctcaggggcaccggggagttggtcatgtggtggcatctgaagcctgtggagctggaagtgacgtcctgacgccacacagcttcagctcacagacacacttactgaggaagccgttctcattaaagtgtatgctcatcaaaaaaaaaaaaaaagtaacttaatttaaaaaaggatttcttgtaagcgatgtcagtaatctggtgagttggtgactctgtttctgggtaccctatctgctgttgtactaagtttttcctgtgcctaagccgtcttcctattagagatgtagacttgctgtgtgtctggtcacttgtacacaggtggggatacatcgttctgaattcattgaaatttctgagtgtgtggctcccctggccctgcccgaaatatgttaggtacatcttcctgggggtttgtgtgtgtcataagcacactggtatgagtcatgtgtggtttatattaaacacacaaacgtgtattctttacagggtctcatgtagcccaggctggcctctaactcatttagttcaggataacctgaatcccagagccttctgtctccgcctcccaggtgctgggttacaggtgtgtgccaacaaacccagggaaatctacgttttcagtaaattgatatctcttggcaatagttcccaagagagttcaaagacatgttttatgtacacttacaatccatttacttggaagagttgttctttctaggactgttctaggcacttccatggataataaatgcaagcgacctccagcccctgcaggcaggagttgctgaatgcttcctgcgtttcccccttatcttaactcttcatcagctttgatgcatcttgcaggcgtgctctgaacatgacagctagcacactctgggtatttaataagcagccgattcatgaactaaagctaccctcaaaggtgaaagcagtttatttaagctacaaataaacacaggtgggtctcagatttggcttgtttcttctctgaagcaatggatggggtattgttatcacctagtcaactgttgcccgagtccaccttgagcaaatagaatggacggatcctgtaaaagagaaactggggctaagagaacagggcaaaggccacctctatagcacagataagtttcgccacagtcctgaatggcttgctaagtcccaattagctagcttgaagtaatctcacttttattggtaggaggtgcttcctgcatgaaagaaaaatccacttgtgcatgagtacatgcacaacccacacacacactcacacacgtgcacataccacacacatgtactcgcacacaacatgcacacccgcgcacacacacatagatgcacaccacacatacacacacacacacacacacacacacacaggagcactcacatgcacacactcacatgcatacaccacaaacatgcacatacatgcatgcacacgcacacagactcatgactgtatgcatatggtcctgagcatcctgaaatgctgagatcctgtgctgggtttagtaaaagaattgatgactcttcccttatcttctgggatcgactatagcctttgacattctctttgcctttccccaggtgagtcacttgaagccctgcacccgcagcctgggctcaagcctccactctggccctaggagtattctgagcctggctgaatgccactctgatcattgtggttttgtgtggctttgtgtcctgtcaatttacgtgtccagcaggatggctttcccttggatgtatgtcactctacaccactcagacaccactcagatgaacacgccacgtgccccggctctgtgttgtgtgtccagtggtcttggttcccactcagccccacctccgcccacaggagagctctcctgagcatcccagcagctagcctgactgcttttcaagtgcacacccacgagactctgaggcctccgtccgctttgttccctcagtctggtgtcagaggtccatcctgtgctgtggctggatgcagaatagcccgttctgattactgcagtgccctccacagtggggttgctaatgcttgtgtgtgtcctagtcaccattctattgctgtgaagagacactgtggccaccacaactcttatgagagtttaactggggctggcttgcagttcagaggtttagcccattttcatgatggcgggaagcatggcggtgtgcaggcagatattggaccagtagacctacatcctgacagtgggcacagggagagagagagacagagagacagagacagagagagacaagacagagagatggagagagacagagaggagacacacacacacacacacacacacacacagatgtggagtctggggtaggcttttgaaacctcaaatcctacctcctctaacaaggccatacctcccaatccttccgatcctttcaaatactcacccccttgctactaaacactccaatacatgttcctataagggccatccttattcaaaccaccacagtggttgtgctatttgagaaatttgtgatttttttcccctaaagacttttgcttgttttcttttttttcttttttcttgagacaaggtcttatgcagcccagcttgtcctcaaactcactaatatagccaagcatggccttggacttctgatctccctgcccgtctcctgtgtgctaggattacaggcatgtacctgcatgcctggcttaggcagtgctggggacccaaccagggctttgtgtctagccgagagttttacagctacagccctgaccctccagggatttggggagcatgaaggaactggactctgcctttgtggacgtcctgccttcacttctctggggtgtgcttagcagctggcctgcctgacttagaggaggttccagctgtttgccaaagtgctttaaaggaatggcagtctcatccttcacgtggttccagcatctgcactgtcgttttataattctagtcatcttggagagtgacaacatcaccttatagtcagctcccctgggagatttggaccattttcttttctccctttcctttcctttcctttcctttcctttcctttcctttcctttcctttcctttccttcccttcccttcccttcccttcccttcccttcccttcccttcccttcccttcccttcccttcccttcccttcttttgtttttttgtttttttgtttttttttgttttttgttttttgagacagagtttctctgtgcagccctggctgtcctggaactcactctgtagaccaggctggccttgaactcagaaattcgcctgcctctgcctcccaaatgctgggattaaaggcgtgcaccaccaagcccggcagatttggaccattttcatcaggactctaggctgttctgagtgccatggctgtttaagctttttgattccccctccatttttccttccctccctcctctttcccctcctccctctttcctttctccctttctcctttccctccttccctccctcctttcccttgccctccccctcctccctctcctccctccctccttctccttactctgtcagtctttccctctctcctcctctttcagcttgcttgctggagacaagtctgtgcactcagggcttggtaagttaagcctacttaatgccgatactcctaagagggaccaactcagagttggcatttgttttgtgtccttttcctcacaaagatattttgagatcgttaatgacccccatagttggtcagctttgtgcaaataaataatttcgggggtggggcagaaaccctgaacacttgcttgggctagagggataacccacggatgcacagaggctgcgctagagacagacagtggctatgaagtcttcagactctggcctttgttgccagggttacaggattagtactctaatagcccagatgctcttgtgagccacagctgtctctgcatcgtgctccgaggaggtagtgttcaaacacatacgaagtggcttctgggatttgaccagacagaagtgattcttcttgggacgggaggaaccagcacgcgctggtttttcttctttcacggtgccggcttcggaactcagcgcccctgcttgggttaaacatggcctctaccgcggagctgtactacagctcagtttgtcgtttgtcttctcttattgactcacaggaattttacaaagtgttctgagtagaagtcctttctttttctttttgagacagaggctcaatgtgttccccaggctaaaagttaactcccagtgcgaggatcacaggcttgccccgccaccttggcctagccaatccgggttctggaatcccaggtgctgcctcgccctcctctggtttagccaatcctagtgctgggatcccaggtgttgccccgcccacctctggtttagctgctctttctagaccacttggtgtctctccagccttggctcctcccactactcagaataccaattcacactttttttttttttaaagatttatttatttattatatgtaagtacactgtagctgtcttcagacactccagaagagggcgtcagatcttgttacagatggttgtgagccaccatgtggttgctgggatttgaactccggaccttcggaagagcagtcgggtgctcttacccactgagccatctcaccagcccctggagagatggctcagccgttaaaggctaggctcacaaccaattcacacttttatcagttttatttattgtgtgtgtgtgtgagtgtgcatgtatatatgtgtgtgtgtgagtgtgcatgtgtgtatatgtgcgtgtgcttctgtgcatgtgtgctgtgcatatgcgggtatgtgtgtgcatgtgagtgtgcgtatgaatgtgtgtgtgctgggaaccccatcagactgcaggtggtagacctgcatagatgagaaaggctttgaaaaatgcagggttttttttgggggggggcacacatagagggtaacatgctcactggggagcaacctccctacacaggaaaggggttggcaaagcttgcttcagtaggacacaggggactttgatcacgaacaaagaggagtaagttggactacacactcacatacatacacacatgcacatgagtatacagacatacacatatacacacatacacacatgcacgcacacatatacatacatatacacacacacatgcacacagatttagaataaatttaaaaaaattaaagcatgaaatgtaatttttaaaagatatcagtgtggctggaatctgggttttttaaaattaaggtccatgaaggccggcataggaaagaggtcagaagctggatcttgaggagaaggaggtggtaggagaacaatggctccccaaagatgtccaagtcaaaatccacagaaccaagaatgatgtcagggactgatactcctcatctgacgttgactagagcaacgactctgggtcatccagctgaacccagtacagccacgaaacccttagtgcagtggccctcaaccttcccaatgctgtggccttttaacccagttcctcctgctgtgctgacccagaccatgacattattttgctgctacctcataactgtaattttgctactgatatggatcataatgtaaatatctgatatgcagacggtcttaggcaactctgtgaaaggggtcccgacctacaggttgagaaccgctgccttagtggaccagggaggttgtagagaagagccagggacatgaatgcacatttgctggctttggagatgaacgagctcacaagccaaggatttccctggacatggcctctctgagcaccgattctcctcagaaggacctgctgacacaagtgggtgaggagtgcctgtctttgttctagtggccatacacagtgagtggagaggaggcagtttttaggtgacaggaaggtgtgtgtgtgtgtgtgtgtgtgagagagagagagagagagagagagagagagagagagagagaaaggggacagggacagagggacagggacagagagagtgagacagggacagagatttggtgacagtacccatagcaaggaacctcagaaaaagcctgggtcacagcaacagcagcctggtctctctgggtgggggtgtgctctctgggtgtcttagtcagggtctctattcctgcacaaaacatcatggccaagaagcaagttggggaggaaagggtttattcagcttacacgtccacattgttgcttatcaccaaaggaagtcaggattggaactcaagcaggtcaggaagcaggagctgatgccgaggccacggggggatgctacttactggcttgcttcccctggcttgctcagcctgctttcatatagaacccaggagtaccagcccagggatggcaccacccaccatggtctgggccctcccacccttgatcactaattgagaaaatgccttacagctggatctcatggaggcatttcctcaagggaggctcttttctctgtgataactccaggttgtgtcaggttgtcccagagaaccagtcagtacactgggtctggaggacatgtttaattgcctcctctggagaggctgggaggtggtgatggactctctagaacacttcggggcctcttctccttagttaagccctgcacatgcctcttctcttatgcagtgatgtgacctagctccacccccgacatatgacttatgccaggagatcctacactgaatctctcctgagtggctatcgctggcgtgtgggaaatgtacacgtggctcacatgagacaccaccttcatagcttcaccctcaaagaccccatcaatattcagctgtgagtcagtgcccattgtaggtggcttgggttctcttaggtcctgagtggagctatttcagacttctaggaaaacagttagaaaaaaatagaccccactcacaccccgatgtatatggcttcaggacagttgtcaggcaggctgggctggtgtcttctagtgtgtacagagacacctgctgctaggaccagaagctagggctggtgtccctaatctctctctacctttagctaagaggcaggcacactgggtggacatttgggatctgttctgtgcctttgatatttgtaagtaggaaaatctgcatacgcttataaggtgcctatttgggaaatgaaaggggtataaatgcacacaggagtctgttgtagtaatctgagcgtgtctgacttctggactctgcccttcacagcaaacacttattaaaacactcccatattactattaaagaatttgagctggactatggtggcacacacctttaatcccagcccttgggaggcagaggctagcagatctctgtgaatttgaggccagcctggtctagttcggggacagccagggctacagggaaaccctgtcttggaaaacaaacaataaacccaataataatagtaataaaacaaatgagctttgaaaagtagttttcatttgaaattccttggctccagggaactccacttggcttttgactgttggatggtatttatcattgaactaatacccggtaatgtcttaagtgcctttcaggtataccacaatgctcatcaggataaactagagttagaaggttctgtttggaaaatccttatttgaattcgtatttatttgaaacctagccgtatacttcttgtatttgtggaccaatcaaaaattcttgtcgcggctccaacgttttcctaagtattttaaaagccagacgggtgagagtcctgtaagcgtggccgcaggtgtgtaattgggcagcctgcaacgaaagtccctctcgaccctcacctaaggctccccgctcccacatcctactcaggttgggaacaggctcgaccgggctcctgacatcactgggggacacaagggaaccgataatgcgtagccttcctgggggcatcccagcctcagcgctcgcgactcccctggtttcccagatttcctgcgcaatttcaggcggtcatcctccatccaggagggcgcgctgcaagtggctgtcacccagcacgcagctctgggactggtctttgctctgaaactccagcctgagcagctgacactcagggtgcccctggacacgtgcccgggacagaggctctccaaacctgaacgacaccccgaggatgatccgtgcatcaccagcctccttgaccttaggcagacgcccccagccccccggccatttttggggcagccccctcccccgccgcccccggagtaaagagagaaaaggactccacggggtcggggacgtgcaaaagtgatttctcggaaagagagcgcttcagagaaggcggatttggcaggctgcgctgattgggccgcgccagcgcccctcccgctcctcaattagctcgcgcgaccgtcgctctgcgcgcgggacccgccttctcccccgccccatctataaaagcaggcgcgcgcgtacgggcctccaggagcccgcgggcggtcccggaggcgcgggcagcgtgggaaccggcggcaggtaggacgcgatggggtgggcgcgggggccggggctgtggctctcccaccttcgcccaaacggagtgcacagcacgttagcaggtgcttgctctggctgctctccaaaaacaacaacaacaaccaacaacaacaacaacaacaaaacccaaccaaatgaacaaacacctctccctttaaaatctgcctgatggccaacttcataatgaagagaaatagatctgccaatcaccgcgcggcagcccggcttccatgcatgaactatccaaagctcgcgactgggctcgcccagggaccgactggctttgattctgactagtggcaatctgattgcccagtggcgctggacttctctgattgtccagtggcccagctggccccggaaggaaagtcttccgtgtgggtcccacacagctctcaagaccagatttgctgtgagcttggccccaggctataggggcagacttttcccctggtgagaaagattacttacccacagccgggaagggcgttcagggggtagaaactaatagaaaccattcactagaatcttaaaatggtagatcactgttttgtttgtttttgttttgtttctgatacagggtatcactctgtagcccaggctcattccaatgagctcccggttatccgcctacctcttctgagtgttaggatttcaggcggagcttggggggtgcccaggtgctcaatggccctgtttttttcttttaaagtcaaacgataagagcagtttcgtgacagttctaggtttgtccctttaagttatggcaggctccttcatgaagaactgggaccgattcagtgtccctgaggaagcttggggccagaaagagatgggtctgtgatggatttccgttcagtggtggtcagactgtggcccagggctgaatgaaagggattacggtgtggtgtgagccccgccaaacatggctggtgcagatgttgacagctgtgttaggcgagcctctgtcccctgccttgtgagaagcctgacctaagacacgttgctctagatgtaagttagctgtaggcaggattgggcccacagggaatgctgcctcaaaatcaagaagaggaagctagaatcatgtgagcgtgtttataaaccattaattgtccatagttgtaagagagtcaggctatgcctgtctaggacctcagattggcctccaaggcaatagaggagattgtccaggtgctgagagccggaccctgtcaggtgttctttcatctgcagaatgaatgaaagaaagcatcccttctgtgtgtactgtcactggcagggtgctggcagtttgtgctgtgcctgcccaggggatggtggtccctcccagtctctcccccttccgagtgtagaagaggctgggttagagaattttaacctcctagcttccatggtctgccattcacctttccttttaaacaccccttttctctgtcacccaccaagacatctgtctttcacagttctggggtgttgggtaccccaggatccctgacaagaaagtgccattcctgttctggaaaaaactccagccatgccagggaagtcccttcagatttcaggaggctcagggaccatgggggtatgggtcacaaatctatctccaggagctgagttgaggctttcaatggacacatcctcagatactctggacccctgaccccagctcccaccccaccctcatccttagaggccacacaagacactaccaaaccaggagagcctcctatctcctctccagaacaagctgttggagccaggactctacttggttttaggggtacccaatgccatttcagttctctccctaggtattcctttctgacttgtcacttatgaactcagtggtcttagaatactgggtttcttgagataacctttctttcctgcctttcttgtgagggtccttagacttaggagccaatggcttcccaaggtgaagagcccctgctgaggtcagggtttcccagccgtcttgatgatttgcttgagaggtgcctcaggtggcaccgcacttgcctagcaggcacaagctctgggtccagtcctcagcacgggggaaacggaggcagaaagaaagatcaggcgtccaaggccatcttcatcaaactagggagttggagatcagcctgcgatacaaaaccctgcctcaaaaataaaactcaaaactgactggagtctgactccgctttagccctcgctcccttccaagcccactggtggcagttagggctgctgtgtggctaaaaccagccctggagagacctcatctccctcctctcaggctgctgccgtctttcctggccccactaccacctgcaagcggcctggagtttctgaccctcaggcctctttccagcaatcctgactttgtgggacatgctggctctggatgtgactatgttcttggggatatcttgacttctcactgatgataacttcttttttttttttttttccctaccccaagaggtcattttagttggaagactagaagtgctgtgttctggttttcagggtgggcgtctgtccaactgctttggggatttccaggctgttctagtaaatgctggctgcaagtccctgtgcacaaatgccctctctccccacgctgtaggaaaagcagacccgagagtgtccaagtgtgccattaggtgtctggggatggcgggcctggatatggagtccctgagctggctttgtactgtccctttgttctcactgagggctgattgtaagagggactccctgtgttgttggaggagtcctctaggatacaggctctgattgcaggtactgtacacacagctcccagaccgaatccttaacactctaaggtttattggcttcaaggacacccagccagcacaggactccagctctaactccatcccagtgggaacaggaccctatactgtctgatattactattactatcctagctggcaaagggcaacctgcaagcagccttgagggtgtcctctttctcgggtggtgctgggatcaaactctgtgaggaacactggccccttgggtatcagtagtcacgctggttcttagagaggcgagcagctcagagaaagcacagcattgtaggagagggacttcttcctagcaggtgccctcagtgtctgggacagggggtcagggaagagctggacccagagccagagctgtgggtggggcacatctgtgaacagcctttcggttttcctttgggtttagggccaccgggcactgctgatttctcatggcactggtccagatgtcttcctgagccggcacctttgcgtggacctctgatcttccggcagtcagttccgggactgctctgactcacagagatgtatttgttatcctgaaagatttgctttctttccaaggatgtgtgaccggaacggcgggcggcggctgcggcagtggctgatcgaacagatcgacagcagcatgtacccggggctgatctgggaaaatgatgagaagaccatgttccgtatcccctggaagcatgccggcaagcaggattacaatcaggaggtggatgcttccatcttcaaggtaaagcctcctgcgtacccactcagtggtttttggtttccctctggctctggaggtatttagggatatcctatgactaaacagcccactatttcaagagaaacaaggaggagtgtctgattctggcacgttccctcatgaggttgagagtgactttcctgcccattccgctcttcttgctgcggtgtactgacatgctctgcttggtgtactaaggaaggctttgctctttcaaagtgcgactccttggcatgcagggatcagctataaagggcgacaggcttccacaactgcttctgggtcaggtttgagggacaccctgagcttgtgttttaatgtttcccctctgagaggattgagtgcgatcaccgagggcaagtcacacagctggcctgagaggagtcggcaccctctcatctcaccctgggtggcaggtgatgctcctgtttgcactctgtactgccacggagagaagccacttctccgggatctcatagctcctgtgtgatggagcctgtgtttgggactgggtggtccaaggtcttaaccctttatagtatagagaactagggtaatttctcattaaggaccagcccagcccagttctgcaggcaggcagggtcagacatcccctgagggttgttacactcatgtatgagtgtccctaaggttttaggcacctacattcgtctctgggagtttcagagtcttaggtcatggccagcccacacttctactttgtgaacagctgcagccttggtggtttgacccagagtccaggttgtaaaccactgcctttagctcagtatgtctggggcagggtggaaggttatgaggcccactgaactcagaggaccagaagctgactcaagaccgttttcaagcaggaagcagggcctgcagagactctgactaccaaaactgtcttggatgggtccctcctggggcacagtcttccctttccagtgagaactctgaaccaagcatatggtgactagcattgacactaaactcggaggcacagtgtgcttggctgaaaggccatcacgaatcttccagaaaaaagggcagagtcctggaccaggggcctcagttgttgcaggagacagcaggcctcgcttcatccagttccctgcttcagcaaagcaggagtcctgaaataaagccccagatttatgcatcttatgcaacgttcttcacggccagcaagccgtttcaacagccctgaggagaatgtgcaagattcccgatgtttccgttggttacgcagtcgctctgtgtggcaatctgaaatgagacatcaatctcagcaggaatggcgggagatcaacgggcgggcgggcgggcgggcaagtggcaggagattcagggcagagagggtcttctctgagctgtcctgagtggggcgggtacctccgcatcttcagtcagactcaacttgactgttgaaggaaccgtaggatgaggccttgggcagatagagccatcttaggggccgtctgcttaagtaagaaacccacttttctcagccagttaaaacctttaagaaatgtaggtgttaaggaaaagttatatgcttgcttctctaccagggaaagggattacaccagagagcccttgtgctgtctccgggcagcgtcttgcggcttgcttcctgtgtagaccgcaggggggagaatgaaaaagatcctgagcttacctcagccaggcaagggctgagattccttgggcctcgctcgagataggcctgaccgtttaccacttactctgtgtgcagagggtcttgaaggacggaataggggttaattttcactttactttattttgagtttggaacttaggtagttcaggttgatctcgaacttgctctgtagctgggtataaccttgaccttctgatcttcctgcctctatctcctgcgtgttcggattactggtgtgggccaccatacgtggtgtatatggtgctgaggattgaacccgaggctcttgcatgccggacaagtactcctttatcaactgagctacactcctagtattaatttttcaaacacagtgcaacacaatgtcagcagagaagagcttcaagcagtgggcgcccctgcgggtcccaggacaactcactctgtgccttcagccctgagagaccatgcagctaagatagccctgcagagatggtttctggccagatgtggcaaggctcagggtaggcctgtgctagtacccagtgctgtctcacgatgctccctgaccatggagtctgatttgattggtacctggtatctccaggctttcctccccgaggaagcatgagaccagaatggagggataaactgggcagtactgctgagatcccaccgttctggcatgcgccagctgaccgagatactgctggggtatctgtgctttctcgggtgccattggagagtgggttcacccaatgacttaaggggtgtggtttttcacttgtgtgccagatattctgggctgctacatccagggagaggtactgctggggaatgccttaccgtgtagggtggtcttcactgtgtctgtggcaaagaggcagaggtttccatgtagcccagccccaaagtcactgttccagtctgctttggagttcacaacagcccacaagtcaatgtgtagccagcagtgccatttacaataaaggccagaattggaactgtctacttaaaaaaattttttctaaaagtgggtttgcagccatgtcagagaggaagtgaccactcaggctcgggggtaggaatgttcctccagcttcttgctgagcatagatacagaacttggcatcaacagtgcagagagcattggcctggaacataagtgtccccggtaggtgtacatgtgtgtgtgtgtgtgcatttggaggccagaggtctatcattgtccacaaaaaacgatttcactgaacctggagctcagggattaggctaggttgactgccaacgaaccctggggatcctgttatcgtgaccccagggctggggtcacaggcacacatacccatctttttctgtgggcaccggggatttgaacctgggcctttatgtttacatggtaagcactgtattaagttggcccctgctttgaatttctggcctttgcttaaagcacaagctttggatgggtcagaaaaaagaaattaaataaaaagaaaaaaaaaaaagaggcacttaacagggacaacagttggctgcatcttaaagggctagaatcatgcaaaaaaaaaaaaaaaaagcccaaacagatgttctattaagaggagagaccggtggatacacatgtgttccttttcatgctggaggtgttatgtgacaaagcagaaagtctttgacggtgctggtgaagccatccacattttcctctttggacttcatgacctaagacacccctcttgcctcctccccaggtccttcaagccagaggactttgccaaagctgcatcctaggctgtggggagcctgggttcaaattccagctttgctgagtgttttgggggacccttacccagctcttgtctgttgagatacagtggtcttcctgaagtccaattgggtgctgaccttggacaagggttgatggccaggaaaggctctgggggaagggggcgggcggtatgcagccggcctttgagttgaactctgtggtttgtgtccctctgtgtttactgagtttctctctcgttcttcaggcctgggcagtttttaaagggaagtttaaagagggagacaaagctgaaccagccacgtggaagacgaggttacgctgtgctctgaacaagagcccagattttgaagaagtgactgaccggtcccagctggacatttctgagccatataaagtttaccgaattgtccccgaggaagaacaaaaatgtaactatctgttgggaccaggaagccctctaggaacctccttcaccccccccccccccacgcttagctcctgaagccctcagtctccacagggctagagcagacatgccacccacagggtttgggtgcctggttttagctcaccagagttgttctctcttgtgtaagcagacatagagagctgctctgctgacctcatacgccatgtgctgtcaagtggcagcttcctgcagagggagtggcccagtggaggcagggaagggtggtggactctgggtcatggcagccagaagctggagggagcgagtccccggagctcagcataaactcctccaaatgggtttgaggctctgctgaagtctgtgatgcaggattccctgctgcttccaggcagtctacagaggaggctggggaggagtgggcaaggcagggacgggcggtaaggtccagggaaaagttctccagttagacgggccggcagtggggacatcactgatggcttcggtgtgtcactgctggagaggataacatcaatgccgaggtcttttccagcggtaatgtcctaagagcatctgtaaaggaatgaacgcacactggccttccccagcagagcctcgtggctcccagggcctggtccgttctgtactgcttctggaaggccggctcctttgtcttcgcagtgatttgaagcaatagggaagtttctttcagagccctgctcccccaggaccagccaggcttgatctggttaatgaccctgacttgtttatagtgtgggtggagccccctcacctgcaggtttgggggtgaaggagaggcagaaggacatagcatttgcatggcatttgtcttggtatactgtactgtgaagttgagtggtttgcctgcctctctggctggctgggtgggtgggtggggctctcaacctctgcttgcccagccatggcttctaggtgagtctctccacctggatgaagcaatggggagagatgatacaggttcctgggggtggggagcctggcggnnnnnnnnnnnnnnnnnnnnnnnnnnnnnnnnnnnnnnnnnnnnnnnnnnnnnnnnnnnnnnnnnnnnnnnnnnnnnnnnnnnnnnnnnnnnnnnnnnnnnnnnnnnacaaagtgggtcagcacccatctgggaccaggtatactggccgatgaaagcattggtcccctggggaggcaggcagcaggctgtgaaatgtcatgtgtgtgacttccccatgtggcacgtatacacacacacacacacacacacacacacacacacacacacacacacacacgcacacacgcacacacgcacatgcacacgtataaaagggcaaaaagattttctgttacctggcactccctaccttccaggaaatctctgggtgtttgataaaaacccagcctagcaaacttaccttcagtatatgggccataaatgcctggtataaaatgcacccggtggggttcagatagaaggaagaagccaaagtctggcgcttgtccttcacaagccagtgtttacaacccctccaccacccaccacttctccctttttgacttggcagatcagatgacccggccatgagaagcaagggctgagcctttcccaaaccttccagcagctgctggtcaaaaccagcgaggacgctcactactcccgtttccttaattcagcattttaagaaaaggttgcagtgtgctcggctgccctgggtcatggtgtctgtcccctttcccataggcaagctgggcgtggcacctgcaggctgcatgagcgaagttcctgagatggagtgtggccgctcagagattgaggagctgatcaaggaagtgagtggagggggtctcaggcgtcttccagggaggatgggacattgcttctaaccctcagaggcactgagagcctcaggctctgcagggaagtgagggacaccccagctacctccccaggccagcctccctttactggtcaggccctgcccatccaagcatagttaaacccattgaatagcagctttgaaggtctccatggagtcttagccttgtttcttagccaagcttcatatggaggtctccatcgcttctggtcatcccgtcggccctcatggtaactagatggcttgcttttcaagacacaggttttattcctgagtgtgttataagattggatgactgaggcccgtaggatccactaaaggtggtggggaccagcctgtggctcagcgctcacctatcgtgtacgacagttcccagcagcatacacaaaacacacatcttagaataatcccccatcacatgcatggttggcagcctggaactgaaggctcagtgggctccgtttaagttaaacagatggcttttttgtgtgtctgtttttagcctttatattgtgtctgtacaaggtggggtttccatagctgaaacaaccctttaagcttatataagcaagatgaggtctctttagacggcagctggcccagaccctgtcacctcagctactcaggaggcggaggcaggaggggttaagacctgcttgagctgcagaatgaattcaaggtagaaaacttcacgagaccctgccttgaaatcaaaaggggaaaaaggctggcaatgacatagctccgtggtagagcgctcgcctcgcgtgcacaaagtcccggtttccatccccagctcagtgacatcataaaaataaaaccaagactgttgttagcaacgacacatcagctgtgtggtctgcagcattctgtggagcactgcagccggccagcatcaccttcccaagctgcccagctctgcggcacatggccgttgtgatgttctgggtggtcttggttctgtgtctcccccacccccaccttgtcttgttttcggtataagcctttactgccaacttgcctgagccagtagatggtgatgatgtcacaccagggtcacaagcaaaggaggtttcaggacgtctcctaattggacccatccaccactgaaggcccgagagccctgtggctctctgagtgagattctcagcacagtagaattggcttggtgtcaccccagagggttgccccagaactgggctatgtctcccagcatctgaaggccagtgaactctttcatagccaaggctagtcaggatgccagcccagtgggtttgtagcttagggtctgatgaattgcaaagggaagctctgcttttctctcatgagataaaagttgtggatttagttgtgtgtctgatattgggttttacaaacatggggtcaggtgagtgctgtgctggtgacccgggactcaactgctcttttctgtcacctgggtctacagccttctgtggatgagtacatgggtatgaccaagaggagcccatccccaccagaggcctgcaggagccagatcctccctgactggtgggtccagcagcccagtgcaggtgagtgtggctgtccggcactagcaaccactaggctctttatgttagggtaggaggtgcttgccactgctaggatccatgtcctgtggaagggtcatgagtcacagccggggaccgagacagccaagctgcagcctctcaggcaggcacaaaggtcttggtagtcatgcatggtcagtcccctcctgtagtccccggaagctgagaggagcctgccaacatccccaagcctcaagggaggtcccagctctcagccacctgtctcttcctggctcactgtcagggcagccccagagccagagagagccagggcgttaggagcgggaggggagctcagtcaggaataggcgttagtttggaaccactttgggcagttttcatgtcttggtggtgcctcttgtttgctcatccataaaatgggccaccaggacctgcctggtaggatccacaagttaaataaaggattcacccctttgatagtatctgggaggtacacccatgctgtagctacttagagggtcattcacctgggcccctacctcagtgtgtgagcaacttttatggctcacagacatcttggtttcctcttttgcctctctcctgctaagacaggaactgctgggaggtcttaactggccttgcaggactgtgaggtttccaggctgtgggtgttagtgtcctgcaaggggccttgcgctgcaggggtgtgtctttggcaaaactgcctgggactccagcttccttgtgagacaagtccccaaccattgtgtatggtccttggggtagcaaggaagcttagcacaaggacaggaacctgtagtgcagaggaagtcccctccatcatggtaggtttctgtgtctcacgtagagtgaggtctgcccactaatgttgacaccagcagtgtcagcctctcatctatagctcagggatacttgggtcctccctgcaccagcccagcaaggcatatcctttcttttctctgcttacaggcctgccactggtgaccggatatgccgcctatgacacacaccattcaggtaccagggtactctgggagagcatggcacaggctctgcttgaaaatagccccatgatgtagatggggtcatgaggtcccacagacaagtgtggcctaggggtaggctccagagactgattcttcttcctcgttctgtgtggtttgggagcagttatagtcatccaagagtgtcctcagggacagctctgcagccgggaatgtaggttgctggactgccttggcctcgcgtggtgggatctgacctcttggggcgtcaggttcatcatgtgtgaaatgctgtactattcctaacacggtctagtagggacacagctggccagtgtctcccatgtagggtctgtcacctcctctcacttccaactctgtagcaagagtcctagagatggttgtactgatatactgatggtgctgaggctggtgcagatgttggtggtgctgatggtgctgatgtagatgatactgatagtgcagatgttgatggtgctgaatggctatgatgctgcagatgctgctgatgctggtatggatgctgatggtgatgatgtggttgcatcagtgctgtctatagaagttggacctggttcctcctcccagcccccatgctcccagactcaagataatatttacagatacctgtatgaagctaggctcttctctgactagatcataacctaaaataacccatttattttaatctacattctgccacgtggctggttacctgtgctcagggaccatgtgtccctctcatcacaacttcccgggagaatctcccgcacttcgccctatcccagaattttctctccctccgggatgtctctcttcctatttcctgcctaagccataggccgtcagattgactgtttccaggaacaatgtccatacagatgtatgaagttccctctacagctgccttaatgagtgaaatgattctttctcctggagcactgtagatgaagagcgagccttcatctgaattctcccctccctcccgctccctccccacctgcggtcttctggctgtctcctctgcggtctgtgttattttgtctctctgttgtgtgtgtctgatgtctgtctgtccctgacaaagtgctttgctctgtatttatggaacagcacaataggtacagtatgggaaaggactaagggattatctttttatagagatctggagttttttttcaagttaagacgttactttgctgaccccggctgactgagaatagcgtgcggccctgcagacatgctattgatttatatcctcgtgtgccttccaactcttaggggatatttcttttgattatggttgcttttaacctattggctgttttcagcgaacgattaccatagtgtgtacaatgtatgcatgcacacacacacacacacacacacacacacacactactctggtcataggcacggaagggtatataatttgagatttaagctatgcatttagcttgtgttttaaaagctgattgagaatctgggaaactgaggcgacataaggttggttgcatgggtctttcaaaggcaggttaaacgggccgagaacacagtatggaggcagagcaaggacgtaattttaaatggtctcaaggccaatggttaacctggttgcagagcctgacaaaagttcagttgctgaaggcaagaggtgtttctggaaaaaagctatttctataggtgacggcgctcctgatggtggtgatggtggtggtggtgctgctgctgagactgatggtgctggtgatgatgatggtggtggtgatgttgaggatcctgatggtggtggcgatcatggtactgatggtgataacgctggcaaccatggtcatggtgctgatagtgatggctggtgtttgtagtgtgattttgggtgccagagtcaagggtgacattcttgtgggctcttgtctctttcccatgctattaacctcctctaggttatgaagacaggtcgtttcccatttcaaggccctgggcagtgtgactgatgggtctcagagtggggatctgccatcctcactgctgctcgctgtgaggcaggtggcatctctgtgccgtcctgcgagccaccgtgctgcctggtttcaggacaggctcggtggggctcagggagaagccctgggagctgtcacgaaggtagaggcaggtgctcaccaagtaagaaaaacacaaatagacgttcgcccctctctctagtgctggcctgtccatgtgttggggtccttttagatctggctgtggatggcgagcttagcttgtacagcttccacaagcatttgtcttctcgactgccctcaaggcttctgtaacccactcaggaggcccggggtcacgggctgagcctttggccttgtcagccccgggctgtggccctgagaatctgctgaccaatgcattctggggccacactggccgggccagacctggggccttctgagtgagaggtaaaggcaggctgtggggaggaagtgcccttgagccttgcacagctgcctcagcacaagtgagggaagcgaggtgccctcagccacagctgggagctcttcttccagaacccaggccacatgccccgtctctgtagatacgctgcagccgggcttcctgactgcagagatgacctggggtgagatgggtgaggcagggggaccacagggagtaagggagaccatggcactgtgcagagccttgactctgaggtctaacccatggtagctgcctccctgtggtaagcagtgttataggtcttgagaccaggctaggatagacttcctatttatcagaaaaacccagacctctggcttttaaattttattttattcattgatttattgatttatttttagaacaatcttgagagatgtgtagctcgagatggtcatgaagtcacaatcctcctgcctcggcctcgagtgctctggcatgaggcacccctctctgtatttgccacccacgccaaggctttctcagaggtgctctgctgtcagacctcttgaggctgccaatttgttcccagcctgtgtgcatctaaggaatgggtcaaacagcaaggctttttttggtgtgtcagcacttcagggtgaggcagagccagcctgctgtggagaaaaatgccaggctcccccagcagacagctggagtggcagggcttgccctttcacctcttcagcctgcaaaatggctgcggtgaccagcgatgtaccacaggggccagatgtatggatatgcccaacccccgcagaaccagggatttcagtacgtagtctcaggggtctcacctgtggaccatattttgtcccgtttccctggctcctgtggtctcacaagagacccccccacaaagctggcgctcttgtcatcgctaccttgctgatgaagagcaggcacagagaggtggagccgcttgcctcaagtcacacagctgtgaggaagcagtgctagaattcagtacgaaggcgatgcagatggcgatgctgatgatgctgatagcgattttaacggtgggcctgggagtgaatgtggggcgagctgctggtgtcacccacacaggcccacccaggcagtggtgcagttggtgactgcacagctttaggacaccatgagtttggggagctatcaacttgtgtggctccagagagaagcctggattggcctgaggtggcgaggcgaagcttaggatgcacaaggctgccgacagtggagaattcagtttatagcagttacaaagcttctccaacaacaagcctctagctctgggctcctggtgtccgagcttccctcccaggagtcccgcctctatgattccctccctggagccccgcctccacactagctgttagtcaggggccgctgggccctctgccttgtgtttttctcatctttccactttgtaaccttatctggaatccggttgtccttgcctgcaagaggacgtcagtaccttcagtaccgcctgctagacaggaagccagaggccggaagaaaaggaaagtcaacgaaagccaaatactgggttggcacgtttccagcctcagggttcaagttcaaagtctccctcccacccaaaaaagatcgttgggattattatggtcggttggtgccagactgaagcttttctctctttttaaaacttttttgttttttgttttgtttttgtttttcgattgatgggtttacgttgtggcactggggatgaagcctaggacttgagtgcgtgagggagcgcttcccctccgacctgcaccccagctcctgaggtgacagagagaagggttggctaggatgtagcctatggtcacagctcctgcctgtgctgctcataggtggagagaaggcttctaggtctttctggaggacaggctgtgtgtaggattgtacagaggctttcgatctgagtccaggtcacagtgtttgtgataatgttgataccttcacaggtgggtttcttcccatctctaatgggggctaccgagtgcagggtgactcgggaaccagagccataggcagctcatgagaattacattggcatgcttgtatgtcttgagcttggtacaggccttcctagatctctctgtgtttgcgcatgtgcatgcacatgtgcacatgtatgcatgaatgcatgttcacacctgtgctcatgtgtgtggagatgtgtgtgtatatgaatatgtgttcatatgtgtgtaggttcatgtgtatgtgaatgcgtgttcacacgtatgtacacgtggaagccagaggcaagtctcaggtatcatttcttgggcattgcccgtcttattttttgagacagggtctcctgctggcttggatctgaccaactaggtgagactggctggccagccagcctccggggtcagcctttctctgcctctcatgggctgagattaccagcaaacagcacttggaatgaggaatagactctgagcctttaggggaggcactggggctccccatcttctaggcctgatggccctgtgctcttggctcccacagctttctcccagatggtcatcagcttctactacgggggcaagctggtgggccaggccaccaccacctgccttgaaggctgccgtctctccctgagccagccggggctgcctaagttgtatgggccggatggcctggaacccgtgtgctttccgacggccgacaccatccccagtgagcggcagaggcaggtgacccggaagctgtttgggcacctggaacgtggcgtgctactgcacagcaaccgcaagggcgtgttcgtgaagcggctgtgccagggccgcgtgttctgcagcggcaacgcggtggtgtgcaagggcaggcccaacaagctggagcgggacgaggtggtgcaggtctttgacaccaaccagttcatccgaggtcagtaccaagtcacctcgctgccacccactgtccctgccttagaggtcacacccacctccttccttgtgcctcctgtatcatgggccaagtgcactcttgcatggctttggcagtggtatagctgggggaacccttggaagcctagcctgcctgtgctttctgagcgcctgggcaaccctttcctcacctccccctcggtataaggacagcagagttggagcctttccttttggagttgacgaagctgatggttgttcctagcctgggaacggcttagcaatgcagactccagggcctcagcctgcccaggctcggcttctttaccctgacagggtccctaggggatgtggcatgatttagtgggcaggaggatcatggagagagagttccaggccagcctgcactgcacagtgagatcctgtctccccaaaacaaatccagaccaacaaaaagttccccaaatcgcctagcagtattcgggagtgacaaatcccatgggtccttggttggcttctagctaagcagccttgtatcctaggcccctttccttggctgttgggggatctgtgacttccttccaagttctgtaccccagccctgggccctggctacacacagctcagcggttcactggtgtctgtgttcttccagagctgcagcaattctacgccacccagagccgcctacctgacagcagggtggtcctgtgcttcggggaggagtttccggacactgtgcccttgcgctccaaactcattctggtgcaggtgagagccggcagcagtgtctgcctgtgcccagggtgagaagagacagcaaggactgggggctccacctgggcagaggtcggggactagatcatacgtggctcttgtcacctctgtgatggcttcccacgttgggactctcttcatttgtgtttccttcttcccctctctgcttgctcctactttccctccctctgttctcctgttcctccctcttcaggaaatttctgcttgtccagtggccctaagatctaagtgacagatcacggtctatttgactatggtctgaacggtggcactcttgtagatgtaatggtgacagtctgaggagcagccagcctggttggagcagttctgggagaacactcttagccatgtgcaggaacgctgcccacctggctccatcttgtctcggaggggattggaggacctgtggtggaggatggccccagttcccctccaccttgattctgactttgcacatggcccttgcaggtagagcagctgtatgccaggcagctggtggaggaagcgggcaagagctgcggtgctggctccctgatgccagccctggaggagccccagccggaccaggctttccgcatgtttccggatatctgtacctcacaccagagacccttttttagagaaaatcaacagatcaccgtctaagcctcagtccgggcaccccacctcgcctgagctcaagcttcaagagtctgtgactaagagaattccgaaaggatgtggagccctctgactggggtgggcgggtgtcctccaaggggcctccggaagcccacagagggatgcgctcctgctcaggcaggtgtcagaagcttgcaggggctgtggccgcaacctgtgattaaagcattcctttcctgcgtttcccccttcaccactaatggctggcctttctgtgtgctgaggtctttcgacagttcaaatcatctggtggcagcagactcgcctttgcccttctgcggccgagggcggagatttatgactttctctgcttggttggagaagaagaatctttactattcagcttcttttctttttggccagaactctgaaaaaaaaaaaaactctttttaagacaatatttgtattctcacaggctcagctgtcaatcacttgagaccttccctgtaaagtggggcagattttaaatatgggtgtagatactgcttgcagccttcgcaggaattttggttgtggttcattgattcacacagactctgtgtcagctgacagggctgtgtggggcatcaaaggaggaccaggcactgtggagaagacccattcactggcatctcacccttccttgtccagctccatacccagtcctaagacccagtgaaaagccacgtccaaactgtgctctgggctcatcagtgcccacccacgtaccagggaaaggcacacaccctacccagtgggcacagagcggaatgtccccctaccgcaccatttgcgcccccaatctggctgtccaacctagtttgtaagtaatctaaatcagtgactatagccccgcctaagggacacttcccggaggagggagccgctgaaaaggagttagtttgagggtcagtacacaacaggggcagaaagccaagcagatgtgggggcagggagagtcatcatctgcttttgtctgagagaaggagagcttctccgtttgttcaactttgtaacaagctgggttacatgctccacgcagctagagaagcctaggtgctctgcattccctggggaactgcaggaaagccttacctgctgactgttgctctggggaaaagcctgagggtccagagcagctacaagctacaggccataccttacaacctgaaaagctaaggaccacggtgaccttcccggctactgtgtgaaggtgctgggtggggcctgctcaacagacagggtcgacagagtgtgtgatacatgcaaacagaatccttggagtgtgtgatacatgcaaacagaatcctgggcccctgcttctccccctcagtcaaagcaggagtgtcccttccgaagccaggacaacctgttcacaaggccccttgtcacatgtcaccttccacctgcctcaaggagtgctagtgtccaaatatttatttttgtattctcttaagaagtattgatttcatcctttattaaaaaaagttgctctttcacaaaagtaatgtttgtttctttttttaaaaaatcacttttgaatatagttttcattagattccaggatttttttttctttttaaattttgatgttaaaaaacgagaccagaggtctggagagatggctcagtggttaagagcactgactgctcttccagaggtcctgagtttaattcccagcaaccacatggtggctcacaaccatctgtaatgggatctgatgccctcttctgggatgtctgaagacagcgacggtgtacttatctacataaagtaaatttatttttaaaaagtctttaaaaaaaatgagaccagatctgactctgcagcccaggctttgaactcattgcaatcttcctgcctcagcctccttagcaaggggaggagaggtgtgagtcactgtgaatccttaaaggaatctttaaaataaatctttaatttacttttaagaaataatggattgagattttcaaggatttagggatttttttttcttctcttaagacaatagcagaaagctctggagaataacagacacaggagagcacagagggcgggcaatccacgctgttctaccagatgtagattagggtttcagtgagcccaggcctcgtgcagcatgggagggcatggaggaaggagactatgctgacagcacccttctggaagcttctagaagcattagtgggacggtcaccagtcatagcgctgaggtgtgatcttccattcgtgcacacatacttatgccagacaccggctcagaatgaccctcactggtgctataaccagcccaggggccatttcagtagcaactgggaacaaaggccctccccacccccacaccgcaggtgggcacagactgctagttctgctgtctctgaggcagtgtgcactgtctctgctctcatgggatctcagagacagggccagttagtcccagcttacccatgtggaaagtgcgggagagggccatgtttggcttgagtgaggcctcccttgttccgggagtgcagttagagcttctgcaagatccttggcccagaggacagctgactgcagagcaaagtaaagcagccatttctgcagggagtcccgttggcttcagagggctccaacgggggtcttgtgtataaacagctcctctctggatgtgcaaagtgaatccagtcctgtttgtgtctctcagagttcaacctctgggccaagagtggatgctgtctccctgaagtgcgggagggaatttggcatctctgaaggctggggcctcctgggacaggacttgggtcctcaaaggaatgtgactttctctgggtggagactgtttggtcctgaaggaaaggccagctacctaaccaccactcttgggatcatataaaacccttattaggttagtgtgtgttaacatgactctgagtggctacttagttccctaatgtctgcaaggtccacctgagcagaacaaactttctgcttcccttcataccagtcacagaagacaaggaccctagagacatcgagggaagagcagggtggggtgaggcaagtgccctggggtgcctgctgtgtgaggtattggctgggccggtgaaagacaagggttgattgtgtggccagaggacaggctagggttccactcatcatgcttctgtctcccatttccctcaccatcgagagggatttgataccacacacaaagaggcttaacaggcccgaagagcacagagcagagcctgccgctcagaaaatacccaaaataaccgtatttctgtttaccactcatctgtaattaagccaggagtgattagagagctgaactataaatattaaatagtccttgctgacacgctacaacgccaatggttaagtaagtgtgtgtgtgtgtgtgtgtgtgtgtgtgtgtcaatcaactatgtcaataatgtaattgttaatagggtgtggtggtgcactcctgtaagccaagcattccagaagctgaggcaggaggatggtgagttccagaccatgctgggctacacagtgaaacactgtctcaagaaaccaagctgcaacaatagtggaattagcactcaattgtttggagtgataaagaaacgtatgactgtgcagagttatatgttttccctttatttatggacaccgatttaattgaatatgatattaatgtggtcatttctgagccttccattgtaaacagtaatgaatttattaaacttctctcattaggttccttacacagagtctgtgctagcctagtggaagggctgccttgctgactccccgatcctggcttcccttccggaccagagcctggagttctgtagctttctcttttactattattattttgtttgtttgtttctgagaaagaatcttaatctatattccaggctgacctcaaacttggttttgatgctcacggcaggtggtgggacaggccagtgaggcgttgcctgtgatccacccaccgggagccctgtgatgggaagaagggatcagtggttggctcagggcttcggagagacttgagatcccctcatgaaggtgatcccatgttgctttaggcagtcctacggactcgcacatcctgcaggaggagtcgctgtgagcatcccttagaggacatcaaaatagtgtgcttttggtttagcctttcctatgcggtgggaggggaaggggcgggagagggaaggaagggcagaatctgggctctaggatcccttgtggtgaggtttggggaagggaataggctttcgtggatgctgcccggtgagcagggtcctcctgtcctgcccccccatcccgttagcatgtgcaagtggaggactgagctctgagtgaccctggcttggagctgtgttgcagattgggactgaactcaatatatgttggcattatgggtcatacctttgtgctgagggctatccctactatcccctactttgtgctgagggctatccctactatcccctactttgcttttgtctgaagtatatagaaaaaaaacttaaaaaattgcccaaaccccaaaagggacatgggaggtatccccttagcaggtccttagccagctttgggggagaaaaaccagtgtctcagccaccctggatccccttttccttcctgtccgtggcttctgcaagggtctctcagcctctagtgccatgagcggggcattggtcaatgcagggtagagatcccgaggccagaataaagtgactcttgccaaggcctctgagaacaagtcaaacatctgatgatgggagagtcttcttgattatccatgcaagccagtgtcacagggttgagtcagaactatgaagaagggacacgtgggtcagagccagagaagacacgtgacacggcaggacaggatttagttgggctgagatgactcttgaagctgaggactggcagggaaacacaggaggttctagaaggaaccaccaccccaatctgtagtcctgaccttggggactgtcagggaacgggtgtgtgctgtttttaagtcactgctacagcactgtccacagccataggacagtgacacagaatgttgaccttcagaggagaaacccaggactcccgggatgggagttagggatcctgggttggatggcgggtcacatcatccccttttctccggactcaacttcctcccagctgtctctctttcatcagcatcctgtccttctcacatgggagccacactgccccccagtacttggggacactggggtggaaaccccaaggttgaaaatagccctgtattattcttggttaagtttctgctctttccccgaggcagccggctgagaaagccacttccttctgccagcctgccgtccatactggcatctgtcttctgtcctgctgggctttcagccacctggggctggcccagaggtgggcttctgtggaaagattttccctgtgttcctgccctgactgtggcagaagttttggnnnnnnnnnnnnnnnnnnnnnnnnnnnnnnnnnnnnnnnnnnnnnnnnnnnnnnnnnnnnnnnnnnnnnnnnnnnnnnnnnnnnnnnnnnnnnnnnnnnnnnnnnnnnnnncaagcttgaccttaaaggaccggttgccactgagagatgtaaatgacgccataggacacagatcgccttaggtgtgggaggagaatgacacttttaaagaggggcttcccgaaggcaaagcttcagatgatggcttgtctcgctcaccacagagcaggccagagatgtttgtccagtgaaatggatgtggatgtgtaagcgaggagccgctgggtctgatgggacttgaaggttctagaacatatggtcaccctctctgctaagtgtgacccatgtgctgatcccttgaaatcattctccaggtggattacagtgcctcgagtgtcttctggactagaagacaacccggtggggacagcgatccattccagcatgctggattctacccacgatcctgagtggccccagtgatatccagggcaggtcccctcacccatgagttgcatgcctcagccacgtccaggggcaggtcacctcagtcatgatcaggaagactctgtgacaggtggtggaacccccatcccatctccctccacttcaagaacatcactctcactattcagatagagaaattaagacccagaggtgagctataaatggcagagccgcttgtagtggtcatgaggtggcccagtgcttagtggaagatgggaggtcagcagcctgacaggttccttaccacagaaccctaactgtgtcaggcactctgtctccctctgtgtgtttcaggggagggtcccattctcacccagctatgggccttgacatctctgaggcaatggttcttccagaagggtctgtgactggataacatccagggaatacaagggaaggctccactgggcttctgggaggttcttccagcccttcttagccaatgaacaggtacgaggactctccagccttgagtctccatctttactgcatcacacgggaaactccttcttcttaccttgcttggcctcctgtgatgtgggactctcctatatgtcatggatagagcaaaagggtgaggcatatgaagcaaggtgagtccgagagaccacctagccgggagaggttgggtgtcacccagctctcttgcaggtctgtttcagacactgatacagaacctagtgttctggagcagaactagaccaacctcacacctcgagcattcctggatgggtgctgggtggacttcctggaatgcttagttcatatcagaaaagagtggggattttttttttggccgctgtgttgtcttgtccacgagacccttatcatgggctgctttgccatcctggttcacctcctttagccgctcaataatgtcctgagatggttgtctctgttgacaccaaggaagcagaggaacagcagggtcataacgacttgctcagggctgattggtggtgttgtctgaagccagtctccttatccaccattgctgtcctcacagaggttcactgcagagcccacgaaggttacaacctgagggttacaacaaacattggactccttgttgcttggaggagatgaccttgttacaaagttgcttgctggagtgacagttgacagctaagtctccgcctctgtgtttttctggaaattagaggctaaagtccaggaccacatatcgtgaatagaatctcccaccactcaactcaagccatgatggacccagcccggggtggcctctgctcctgacacggataacccctgcagggaactaaccaaccttagcacacttttgttaatgaaatcccacacttttctggtatttattaaatgtctcctctcccttttacctatcttgggacccatcatgatcccatatcctagggtagtcacatctctttgactgtgactccttcagactgcctggcttgcatagccttgactattttgaggtgtcctacagaggctccccccagctgggactctgtagtcttttcctcctgtttaacggaggatactgagaccagacatggagatgcatgcctttaatcacagcattcaggaggcagaggcaggcaagtctctcagagttagaggccagcctggtctacataatgactttgaggacagccagggctacacagtgagaccctgtctcaaaataaataaattaaaaataaaataaaataaaaccacaagctgctgggatgtcaggcacactacacaggtggattttttatgggtgctggtcttggtctcccaggaaattgttccccctgttcacagaggattctccaagtccaaaggccaataacaatgggacagttcagggctcaggaacatgtgctctgccaggggatacaggctgagacatctttgtgacccccacgggtcccccccagttcctggggtctccagcagttcctacatactttacttttattttctattttttaagaatgctcttcagaaagtcaacctgaacagttttcccaaaggtccagagatgacacgcctgcgacactctggatccccagcctggtttctctctgagcagcttctccttcctgccacctcagccacgacagcttcctttcgcttttctcaggatccacacacccttccagtgatctcagagccagtgcacccaccacttcctctgcctggaatctgcttccttccctcgtaagctggttgacagcttcctccttcagactcctctgccaacctccagaataaaataaacaactccctttgcactgtgggagctcagtacaaagggaggctcctctatagtacactcaaggaaggcaagactccttccatttgtgttccctggtgtatcttcaggcctgcagcccagagccaggtggatgataaagggtctagtactcttgtgactccatccatccaccgatcaatccacctgtcacttgctcttgaattcacttagcacttatccacccaaacatctatctattcatccacccattcatttatccacttgataatgcatctattcatccactcaaatatccacnnnnnnnnnnnnnnnnnnnnnnnnnnnnnnnnnnnnnnnnnnnnnnnnnnnnnnnnnnnnnnnnnnnnnnnnnnnnnnnnnnnnnnnnnnnnnnnnnnnnnnnnnnnnnnnnnnnnnnnnnnnnnnnnnnnnnnnnnnnnnnnnnnnnnnnnnnnnnnnnnnnnnnnnnnnnnnnnnnnnnnnnnnnnnnnnnnnnnnnnnnnnnnnnnnnnnnnnnnnnnnnnnnnnnnnnnnnnnnnnnnnnnnnnnnnnnnnnnnnnnnnnnnnnnnnnnnnnnnnnnnnnnnnnnnnnnnnnnnnnnnnnnnnnnnnnnnnnnnnnnnnnnnnnnnnnnnnnnnnnnnnnnnnnnnnnnnnnnnnnnnnnnnnnnnnnnnnnnnnnnnnnnnnnnnnnnnnnnnnnnnnnnnnnnnnnnnnnnnnnnnnnnnnnnnnnnnnnnnnnnnnnnnnnnnnnnnnnnnnnnnnnnnnnnnnnnnnnnnnnnnnnnnnnnnnnnnnnnnnnnnnnnnnnnnnnnnnnnnnnnnnnnnnnnnnnnnnnnnnnnnnnnnnnnnnnnnnnnnnnnnnnnnnnnnnnnnnnnnnnnnnnnnnnnnnnnnnnnnnnnnnnnnnnnnnnnnnnnnnnnnnnnnnnnnnnnnnnnnnnnnnnnnnnnnnnnnnnnnnnnnnnnnnnnnnnnnnnnnnnnnnnnnnnnnnnnnnnnnnnnnnnnnnnnnnnnnnnnnnnnnnnnnnnnnnnnnnnnnnnnnnnnnnnnnnnnnnnnnnnnnnnnnnnnnnnnnnnnnnnnnnnnnnnnnnnnnnnnnnnnnnnnnnnnnnnnnnnnnnnnnnnnnnnnnnnnnnnnnnnnnnnnnnnnnnnnnnnnnnnnnnnnnnnnnnnnnnnnnnnnnnnnnnnnnnnnnnnnnnnnnnnnnnnnnnnnnnnnnnnnnnnnnnnnnnnnnnnnnnnnnnnnnnnnnnnnnnnnnnnnnnnnnnnnnnnnnnnnnnnnnnnnnnnnnnnnnnnnnnnnnnnnnnnnnnnnnnnnnnnnnnnnnntgtaaggtgggggggaatgctggcctgcagtgtaaggtaggggggagtgctggcctgcagtgtgaggtggggggagtgctggcctgcagtgtaaggtgtgtgtgggagagagtgctagcctgcagtgtaaggtgtgtgtgggggagagtgctggcctgcagtataagaggggggagtgttggctggcctgcagtgtcaggtgtgggggagtgctggcctgcagtgtaaggtggggggggaatgctggcctgcagtgtaaggtgggggggaatgctggcctgcagtgtaaggtaggggggagtgctggcctacagtgtgaggtgtgtgtgtgtgtgtgttgctttcagtgtaaggtgggggtggtgctggcctgcagtgtggtgtgggggtagtgctggcctgcaatgtgaggtgggggtagtgctggtctgcagtgtgaggtgtgtgggggtgctagtctgcagtgtgagatggggtggggtttgctggtctgcagtgtgaggtgtgtgtgtatgtggagggggagttcctggccttcagtgtgaggtgtgtgtgtggggtgctggcctgcagtggaagggagtgggaatggggcttggacactacaggatgcccaagggagaagatgccttttgaacaggatgattgtggtgcgatgaaatacaggcagagagcagggatgatgtccagtcgtgaaatggctctgcgggagccccagagatggctgagagtggccaaatgtcccaggatgtgactgctgtgagtgctgcactggttatagggggctttaggctcaggaggccagagccatggctgtgaccactgccaggtgtcatgtgggcggggctgggatggagggagaatggtttctgttgctctagctgtgggagggagctctgtgccccatgctctaccttcctcctctgtaaagccaggatatcctgggactcctgtttctcagatccacgtgaaggagaagggagagtgcccacgtgctggtccccagtgtgatttccccacattgatgacccttgtccaggcagctaggtggatgcaagtgaccagagaaagccataggtcaaaggaacagggcatccagctggcatggggggggggtactgtgaaccccacagaatcagctctgcctggggagctcccaggttcagagtcaacccccgttagcatcctggtgtatgctgtgggtttggccaggtgaagtccttgtctcttctgggctttcttgtagatctacggttccagagtgaacttggatgctctctcatgaccatgtctgctcccaccacagagccactgatctgggctgacaagatccaaacctgctatcttcagtagcagtgtgaggcaagggacttgcaactgctcaggaacagactgttcagttctggggccccagcacctcatagctggtgtctcatcccaacctcgcctgcctcttgcctggttactgcatctctgctaaagtcggctgcagagatggaagcctgtgccattaggttcatgacaagctgctgtcatgtcctgtgggggctcattgccatgggtgcagaaggcagttttccctccagacatttggctgtgaatctggtctgctatagcagctcctagctcatctcctctgcttgg

SEQ ID NO: 92 - DNA, 2878 bp, Mus musculus
ccggaggcgcgggcagcgtgggaaccggcggcaggatgtgtgaccggaacggcgggcggcggctgcggcagtggctgatcgaacagatcgacagcagcatgtacccggggctgatctgggaaaatgatgagaagaccatgttccgtatcccctggaagcatgccggcaagcaggattacaatcaggaggtggatgcttccatcttcaaggcctgggcagtttttaaagggaagtttaaagagggagacaaagctgaaccagccacgtggaagacgaggttacgctgtgctctgaacaagagcccagattttgaagaagtgactgaccggtcccagctggacatttctgagccatataaagtttaccgaattgtccccgaggaagaacaaaaatgcaagctgggcgtggcacctgcaggctgcatgagcgaagttcctgagatggagtgtggccgctcagagattgaggagctgatcaaggaaccttctgtggatgagtacatgggtatgaccaagaggagcccatccccaccagaggcctgcaggagccagatcctccctgactggtgggtccagcagcccagtgcaggcctgccactggtgaccggatatgccgcctatgacacacaccattcagctttctcccagatggtcatcagcttctactacgggggcaagctggtgggccaggccaccaccacctgccttgaaggctgccgtctctccctgagccagccggggctgcctaagttgtatgggccggatggcctggaacccgtgtgctttccgacggccgacaccatccccagtgagcggcagaggcaggtgacccggaagctgtttgggcacctggaacgtggcgtgctactgcacagcaaccgcaagggcgtgttcgtgaagcggctgtgccagggccgcgtgttctgcagcggcaacgcggtggtgtgcaagggcaggcccaacaagctggagcgggacgaggtggtgcaggtctttgacaccaaccagttcatccgagagctgcagcaattctacgccacccagagccgcctacctgacagcagggtggtcctgtgcttcggggaggagtttccggacactgtgcccttgcgctccaaactcattctggtgcaggtagagcagctgtatgccaggcagctggtggaggaagcgggcaagagctgcggtgctggctccctgatgccagccctggaggagccccagccggaccaggctttccgcatgtttccggatatctgtacctcacaccagagacccttttttagagaaaatcaacagatcaccgtctaagcctcagtccgggcaccccacctcgcctgagctcaagcttcaagagtctgtgactaagagaattccgaaaggatgtggagccctctgactggggtgggcgggtgtcctccaaggggcctccggaagcccacagagggatgcgctcctgctcaggcaggtgtcagaagcttgcaggggctgtggccgcaacctgtgattaaagcattcctttcctgcgtttcccccttcaccactaatggctggcctttctgtgtgctgaggtctttcgacagttcaaatcatctggtggcagcagactcgcctttgcccttctgcggccgagggcggagatttatgactttctctgcttggttggagaagaagaatctttactattcagcttcttttctttttggccagaactctgaaaaaaaaaaaaactctttttaagacaatatttgtattctcacaggctcagctgtcaatcacttgagaccttccctgtaaagtggggcagattttaaatatgggtgtagatactgcttgcagccttcgcaggaattttggttgtggttcattgattcacacagactctgtgtcagctgacagggctgtgtggggcatcaaaggaggaccaggcactgtggagaagacccattcactggcatctcacccttccttgtccagctccatacccagtcctaagacccagtgaaaagccacgtccaaactgtgctctgggctcatcagtgcccacccacgtaccagggaaaggcacacaccctacccagtgggcacagagcggaatgtccccctaccgcaccatttgcgcccccaatctggctgtccaacctagtttgtaagtaatctaaatcagtgactatagccccgcctaagggacacttcccggaggagggagccgctgaaatggagttagtttgagggtcagtacacaacaggggcagaaagccaagcagatgtgggggcagggagagtcatcatctgcttttgtctgagagaaggagagcttctccgtttgttcaactttgtaacaagctgggttacatgctccacgcagctagagaagcctaggtgctctgcattccctggggaactgcaggaaagccttacctgctgactgttgctctggggaaaagcctgagggtccagagcagctacaagctacaggccataccttacaacctgaaaagctaaggaccacggtgaccttcccggctactgtgtgaaggtgctgggtggggcctgctcaacagacagggtcgacagagtgtgtgatacatgcaaacagaatccttggagtgtgtgatacatgcaaacagaatcctgggcccctgcttctccccctcagtcaaagcaggagtgtcccttccgaagccaggacaacctgttcacaaggccccttgtcacatgtcaccttccacctgcctcaaggagtgctagtgtccaaatatttatttttgtattctcttaagaagtattgatttcatcctttattaaaaaaagttgctctttcacaaaaaaaaaaaaaaaaaaaaaaaaaaaaaaaaaaaaaaaaaaaaaaaaaaaaa

SEQ ID NO: 93 - DNA, 1275 bp, Mus musculus
atgtgtgaccggaacggcgggcggcggctgcggcagtggctgatcgaacagatcgacagcagcatgtacccggggctgatctgggaaaatgatgagaagaccatgttccgtatcccctggaagcatgccggcaagcaggattacaatcaggaggtggatgcttccatcttcaaggcctgggcagtttttaaagggaagtttaaagagggagacaaagctgaaccagccacgtggaagacgaggttacgctgtgctctgaacaagagcccagattttgaagaagtgactgaccggtcccagctggacatttctgagccatataaagtttaccgaattgtccccgaggaagaacaaaaatgcaagctgggcgtggcacctgcaggctgcatgagcgaagttcctgagatggagtgtggccgctcagagattgaggagctgatcaaggaaccttctgtggatgagtacatgggtatgaccaagaggagcccatccccaccagaggcctgcaggagccagatcctccctgactggtgggtccagcagcccagtgcaggcctgccactggtgaccggatatgccgcctatgacacacaccattcagctttctcccagatggtcatcagcttctactacgggggcaagctggtgggccaggccaccaccacctgccttgaaggctgccgtctctccctgagccagccggggctgcctaagttgtatgggccggatggcctggaacccgtgtgctttccgacggccgacaccatccccagtgagcggcagaggcaggtgacccggaagctgtttgggcacctggaacgtggcgtgctactgcacagcaaccgcaagggcgtgttcgtgaagcggctgtgccagggccgcgtgttctgcagcggcaacgcggtggtgtgcaagggcaggcccaacaagctggagcgggacgaggtggtgcaggtctttgacaccaaccagttcatccgagagctgcagcaattctacgccacccagagccgcctacctgacagcagggtggtcctgtgcttcggggaggagtttccggacactgtgcccttgcgctccaaactcattctggtgcaggtagagcagctgtatgccaggcagctggtggaggaagcgggcaagagctgcggtgctggctccctgatgccagccctggaggagccccagccggaccaggctttccgcatgtttccggatatctgtacctcacaccagagacccttttttagagaaaatcaacagatcaccgtctaa

SEQ ID NO: 94 - DNA, 42334 bp, Homo sapiens
acagaggtgtgaattagacacccctgctctggactgcgcctccactccctgagcaaagcaatgcagagcagtggaaagagtcttgggtttgaaggcaagaggctccagccccccgagcctcagtttccccatctgtcaagtgaggataaccacgcctgccctgctctactgggcagggcaaaggagatgatttaagagcaagtattttgtaaaagagaaagcaagctgcaactttaagttgctactcctagtgcccctcaaagctgcctagcaaattgattcttctccgtagtttcctgcattgagttctagaactcagtgctgggagtcaaagggtccctgttgactcctgggcctggggaacccactctgcctcggaacccttccttgcatccttcctttgtaggcaatcatttggtgcatcccagccaaccatgcacttacagagaaagaaacagccaaaagaaatagagagaagggaattacgacctggggtgcatttgactgcttcagttccgaaaatacttactaaagacctattaggtggcaatgaagttgacctcaaatcacagaaccttaaaattggaagggacttggagattatggattaagtagtacacgctcctgaaatcacacagcaacactgcaatcacctctaacaggcggtctagcatgtgttcccttcatgcttccagggacaggtggctcccacgtcaccaggcacctcattccacttgtagaaagattgttaaagcacagcccattattaagtggactgaggtaagcatgggggcaaattctgcccactgacacacaactaccatatgccaccaaagtccgaaatgaagcctgcttacaaatgaagacaattacaaaatcatccgtcttgtctctaagtgccagggtaaaaatggacttctaggattgcatttaaaaatatctctaaccacgctcaaagtttgtgattctccttagaggtaaattattgttgttgtattgatattttattgtgcttctgccatttgtttctcacagatgcacctgctgcacatctgcaaaggtaagctggagatgaacatgggtgagcgttctggattatttggcactgcttgctaagcacatagattcatgatgcactgagtcagaatccctggaggctcctcctgggaacctacatcttgataagtgtcccactgttgcttatttatgctaaaatttaaaaacactcatctatataatatacaataatatatattttgtaattgttgactttgtaattgtcttcatttgtaagcaggcttggagtcccataggtgaacccacctcccaggtttcagcaattctcatgcctcaacctcctgagcagctgggattacaggtgcctaccaccaagcccagctaatttttgtatttttagtagagacagggtttcaccatgttggccaggctggtctcgaactcctgacctcaagtgatccactgcctcagcctcccaaagtgctgggattacaggcgtgagtcaccatgcctggcccagaatttatatttttcacaaaccagtatttcctggcaatagccctaaatgttcaggatatttttgatctatgcttaagaaaccttttactcttaagtttttttttcctcccctgggactgtttcaagttcttccgttagtaataaatgtgaataaaaatttatacctgaaaggcaaaacgttattgaatgcttaatgaaattttttcctttacattaaatgtttacatactttgccactcctcggaggagggttatgaattaaatacctaatacattacagctgcttaataaacagccaataaatgaacgccaatgcatttaaaagtaatgagttttaggatataaaaaatagaaatctcaggtttttatttgtaatccttctagagtaaagaaacagattgcggcaatattagcaattcgtaaatcaccatccaaacccaccatgaacagatagagcaaactgactcagtgaaagagaaatgactggaagcaaaatggggtcaaagttcatgtctttagggcagatacattttacccagtaatatttctcttcccaagtcccctgagtcggtcccaacttactgccttttagagatctcacttttattgtaagatagcttcttacacgaaaacatttaccacttgtgcacgtatatatatatatatctatacatatgcacacacatcctttgtattcaactgcctgataaactgtagtcatttgttctgtgttgtggagactgataagtgaatcttttccttatctgccagggtaaactgccaactttcaaatactctttggttttcccaggtgagtcatgcaccttccagtgtctgtagccccagggctgctcatgcatgtgactgggtcttagttttttgacctagagaaggcataccaaagtctgcttgagccaacatctttgccaggtgccctcattgtgtttatttttgtcatataaaccttaagtggatggcaggattatgtttccacatgtgcacacctgtttacagaccacccacatcaggtagggcaatccctctgaggggccgcagcagattgtgaggggcttcctgttttcattccaaccttcctctgaaacactggtgtgtagtggcaacgttgttcttaagcttgagccccccgaccaagtgaagcatgagaaaatgcagcttaccttagtcacaggcagctaagcacaggtagttaatggcaggtaaattagccacaggcacctttggaaccagcagcaggtgcggcagaccggaccctcctcggaacgaggagcatgtgcagaagagttcgcacggcaggctgggagtgctgcctccaggaaggcctgtgctggggttgaaccttagctgttgtccgggaacttggatttcaggggggttcctgccaccctaacggataaaagtgcctcactgtgtccaaactatttgtgcaaacagtgtggtttatgctgaacacctgctttccttctgggatctggagttttttggaacacgccaggcagaaggtgcctatgtggccagcaccccccataaaaacccagggctctgagtctctagtgagcttctctggttgacagcatctcaaatgtattgtcgcaacttgttgatggaggaattacgtgcgttgtctgggattccactggagaggactctggaagcttgggcctggtttcctccagacctcaccccgtgtatcttttccttgtgctgatttcgctctgcatctttttgctgcaatcaacggtagctgtgagcgcaactatatggcaagtcctgcgggccctcctcccgcggaatcactgagcctggggagttattggggcctcaactcagacaggtataaaaattaatacacctcctagagcacagagatgagcaatgttcttccagctttctttccttttgccctccctgagattttttttttttttttgcaatgagcttataccttgtctatttaaggcatttttaatttagtgttgggataagtaggggcactgaaatagcataagattttcccccttacctcaagaataattcagcaaaataattcataatatagagcaggtaccaaattatgttataaagatttcagtatagctggagtccagtgtttttaaaatgtgggtcagtgaaggctggagtaggaaggaggacaagatttaaggtggatcttaaggatgatgcggtaggcagattaatggcccgcagagaggtccaagtcacagcccatgaaacctgggattgtgttaggctacatggcaaagggaaattcatgttgtagatggaatgaaggttgctaatcagctgaccttacaatagggagatgatccaggtggactcaatataattatacggtccttaaacgtggaaaagggtggtgcacctgcagtcccagctactcaggaggctgtggtgggatgattgtttgagacaggagttcgaggctgcagtcaggcatgattgcagcactgcactccagcctgggagacagagcaagcccttgtctcttaaaaaaaagagggggcaggagagaagggcagagtgatgtgatgtgagaaagactcactcgccattcacaaagccattgtgggctttgaagatggaagaaaaggccgtgagccaaggcaggcagctggagagaagctggaaagacaaggagtggattctccgctgcagcctccaggaggagccggctctgacgacaccttcattttagcccagtgacaccgtgttgcacttctgacccgaagaactataagattataaacttgcggccgggcacggtggctcttgcctgtaatcccagcactttgggaggccgaggcgggtggttcatgaggtcaggagatcgagaccatcctggctaaaacggtgaaaccccgtctctactaaaaaaatacaaaaaattagccgggcgtggtggcgggcgcctctagtcccagctactcaggaggctgaggcagaagaatggcgtgaacccgggaggtggagcttgcagtgagccgagattgggccactgcacttcagcctgggcaacagagcgagactctgtctcaaaaagaaaaaagaaaaaagaaaaaaaaagattgtaaacttgtgctgttttaagccattaagtttgtgataatttgtgacagccaccataggaagtgcattgagatttgtagtattttgcggggtgaagaggagggtgaaaaggaatggacaagcctgtcaggtccctggatggagatttaatgacgatgccaagactatggatcctagtgagaatcctgcatcccccatgccctacagctaccagggagatgaggcactgggagagttagtactcggctggtggttttgtgccctctgggcctagaaagtatgtaatgctgccatccctgtatgcgcagaaagatggttaatgcagccccactcagggcagtttgggggcttacctgaatttccccactgggagcctctctcctgacttaacctcaacagaggcatcttcttccaagtgctgcttgtaactcagcccccaatgcctgaagacacaccttcagcctctctcctgacgttcccctgcctttccaggaggccctggagggaaggaccccacactggctctctgctgagtggcccagctctggcctatgggacacgtgtgcgtttgccttgcccagcacacgctggggctgccaccattcccagagcagtgcaggctcttggcgccaccacccaagtgccctgtcaatttccagggcaggagtcagagccccatctgcaggtgactctggctttctcaagactgagttgacacctgtgctctcagcaaacatgtttctgagcactcttgaactcacttgctaagcttggcttggaaagtgtgaagggagagctggggtccgcagctggaaagactctcacctcctgcctctctcctgaacccatttgatgtctctcctctggccaaggggtaaatctgcacatgtaagtctcatacactttggctcttcatggaattggtccctgtagaagccgggccagaaagaatctagcaccctcttgcactacaatttattgagcctttactttgtgtcaggcaccgttctaagcagtttatatctaagattggatggatttccaccactcctattcccatttcgagaaagagtaccctttcccaagacaggaaaaacagccagggccataaaggagggccttttgtgacatcatcagaagtggagaagaggtacccagatcccattagcaaagtgcagccgaagagtcatgctaagttcactgtgtcccttgcggcattgccttcctcagtgctggctgccatcatacaaccccatagcttgtgtggcttaaacagcagacatttattttctcagtgttctggaggctggaagtctgagatcaggatgccaacatggtcaggtttagggagggctcccttcctggcttgcagacagctgctttctcactgtgtcctcacatgggcagagagtgagtgagagcaagctctctggtgtccctagtccctcatcgaaacttcattaccccacgaaggtcccatctccaaataccatcacgttgggggttagggctcaacatatgtatttggggggacatcatctggtccatagcaggcactgtccgggtcagaaggcctcccagggatttggtcctgaggctggctgtggaaggtgcccttgcttcatcacctctgcacctgctccactgtaagaactgggcagacagattggcagcttaggccaagcaagatagatggtacggaggctcgacaggaaggtttctggagatcaggaagataggaattaaggaaggtgaagaggaagaaaaaaggactccatgaagaggagagggtctctaaaagctggaaacataagtgaggaggtgagaaccagtctgaagcacccacctgtgacctggtgggggcaggaaggtgttagaggagctagggagctgaccagacgggaggaacccttcccattcttcatggaggcagattatcgctggtctgcaactggcattcttagagttaggaatcactgtgtccatttttctagacttctctcattggtgatgatttgaccttttcctcttgcactaatgagcaaggtggaggaaagagatctctctctctcacacatatactatctcactcaatgcccaccaatcctaagaggcaggaacaattgggttacgccatagtgaactgcccttctgtaggtcaaaatttaaatgtaggtgatgtcacagagtttaacctagtattaccatcaatgccattatacagattaggagactgaggcttcggaaggttaagtcatttgctcaagctcacacatttggtgagtcagggagcttggatgtgaactggggcctaactcccaaacctgctgtggtaggctgccatccatggaaacaggggttcctgcgggaatgtgtaagagatgaggttggtaagtatgacttttagatgccaggagttgacctgtgtggctaccaatgggaagcccctgaagacagaaaggtagggtagcaaagtagaatcaacagggaagggatgaggaggccggagggtaagtaggccactgcgagatcaggacgaaatttactgggatcgtgagatgctggaaggaaggatcagagaatctgggaccatgctctgcatctttttgctgcaataaatggtattgcatgagataccatttattgccatgtgtcctcattgtagtcatttttgtaatttatatgacaagaaaaaatgacagggtgatttttacatatgtgcatacctatttacacaccttccagatcaggagtggtgatctgagctcactagatatgctcaattaggtaataatcaattcaggtcatcaaattgatcacccaaatcaatttaggaaattgatgacctcaattaaggcaaatatatacaatgaaatatatgcagctgttagaaagggctagatcccatatactaaaatggaaagaaagccctttgaaacctaagaaaactgtgtttccattatgtgagcagaaatcttgtgtacacagaaaaatggtctttcttcttcccctcccctcccctcccgtcctctgagacggagtcttgctctgttgcccaggctggagtgcggtggcgtgatctcggctcactgcaacttccgcctcctgggttcaaactattttcctgcctcctgagtagctgggactacaggcgtgcgccaccatgcccagctaagttctttgtatttttagtagagacaggggtttcaccatgttggccaggctggtcttggactcctgacctcaggtgatctgcccacctcggcctcccaaaatgctgggattacaggcatgagccaccgtgcccagccagaaaaatggtctttcaattggaaatgtaattccagagaataaagaatagaaccacactgtaatatgacaagtaataacacacacaagcgctaaaggattttttttttttttttttttttgcctcccgatatctgaggggcaggctccgtggagcctccaggctgagaggctgagactggcagagcaggctgggttctggattctgatactcctgggcaggagtgtctcaaagattgagacattatgttcattctttggggctcctgttcttggcactatatctagcacatagtagttgcctcataaatacccattaaataagagcagaactaaacacatctggttagaaattgttcctaggcagcaaggaaccaacacgtggaaaatatggggtttctggagcagtgttaatgcaagccagttcctgtaatgtacatagtgacacctactgccaatgacacgtgctggagcccttccactgttgatttcctatattcacttacccttgtctttaagtggatgttggtggaaacttgaggatacatctttgtgcagcagacagcatttgtaagtaaatctgtgtaggcttagggccacattgataaaaatatatgagagtaaacatatacagaagctgttttaagaacttctgatgtcctagatgctctgatttctggaagctccatcccacatcgtagcaaatatattaaaacactctcatattctctaaatactcttaaataatgtgagtgttaaaacaatagtttcatttgaaattatttgatgttgcggaactcactttctaatgactatgacttcccggcaatcacggcattagggaattcataccaagtgatgtctaagttatagtttcaaaatataatgaaacatttatccatcaatacattacaattatgaaattaacatgttttggggaccttcatttaaacatttattaatctcagatttgcagtatactttttgtattgtgcagtcaataaaattttcagtctcaaacattttcataggtccctgaaaagctcaacgcaaaaaacagcccccatgtgtgattctctactgggcaataaaagccaatcgcgaccctcattttccccccattccagggcttccccaggatagaacgcggaaacgcttctttttccgtttccagggatttctttctttttccagtgtcgttctccctctcccccacttcatttttacaataaatgtcagtgcacacccaggagcgggtggtcccacaggggacatcttaacgcccacccaggagcggctggtcccacagaggacctcttaacgctgacgctttctggagaaaaggatttgtgatgaaaatttccccaaggggaccttctagcgcctagcaccttcgatgctcctgtttcagtcgcggtctcagcgggcagtggcctcctttgaagctgggattctcctgcccctcccgggcagcgcaggccaccggtgacccgggacggtctgtaaacgaccttcgcgtccccgtccccgtggaataacgcgcggcgggcatcactgcccaatatccagcgctcgtgaaggcggagaccggcggggcagctagtttctggttgtggattctgattaatgggccgcaggcgcacggtctgcaccgtccggctcgttgctagtggctcgctcgggagccgccgcactcccggggctgtccgcccgagccggcctggaaggcagaggacgcctccaggtcgctccgcggggcctccggaattcctgggaaagcccccctgcagcgccgcccctggaccccaggtgtgaggagcggggctcggccagcggctccagaagaggcccggaccccactgccgtggctgccgggggcgggaaagtgatttctcggaaagcagagcacttcgaagaaggcgggccgcgcgagccaagctgacgctattggtcggtgtggccgtcgctctgcgcaccgcccgtcccccccacgaccctttttaaggccgcgcgaccgctggcgcatcgcctggagcgcggcagcaagcgtgggaacgcgggcggcgagacggcggcaggacggcggcaggtaggcacagtgggcgggtagggcgcccgtgtcccgcgcggtccggtcccgcggggtccccgacgccaggcggggcgtgggggtggaactacctaccgtaatgtccccgggcgcagctcagtggccacccgtgtccctctctgctttttgcctattttccagccacctaagtccaatctgaatgcccaagtcgttgattgtcgtttgcctgtttccaaagattggtagatagatgcctttttaaaaatctcatttttctttaaatctggtttacatggaaaacgttaggagagctcatataatgaacggcaatagcaaccccctatcttgaaacgcgctctatcatcccactgaaattctaccacgtggaataatgcttggagggtcagagttgtggaactgcccaataaccagtcgttactgagggttagtttgtgaaggaggggacagactgcttctaaaattctgtttaatgacagtcaattaagatttctgagtctggcttgagggcctttgcttccatcacagcccagtcgtccttggcaagagagtctgtatatgggccacagctcacaaaagcattgtttgaaaaaatttattgaaagaacattgtttgtaaaatgagtcccaatacataggacagactttcctaaggtgagatgtgttacttacccagagctgtgaaaggctttacggatggaaactagagactgaattttccagaattttaagaagtctccccaaccaatggccccccactttctttttttaaaccaaaggtaagaactggtagttaaaatgacagttcaaagcttgtccttttgggttacggcagcttcctctatgaaaagatttgggagtgattcagtcacttgaggaaggttggtgccagagagagaaatggctttggtgctttctggtctagtgatgcgggtatgctaggccagagcgagtgccctgggccctccgaggcgggggagagggtggggtctgctgctgccagctcaggtgtgacctgtaatctggattaggtgggcccagggcaacctcttatcacgtccctcctggaaagcctgactgctgtatacatttctagggctgcagatagggcttggccaatagattacctcaaaatcaagaagaggaagttataaacatgtgattagacttattaatttttcctggctgggcatttggtggaattcgtttgttaatgtttaataaatcattatggatcataactgtagtagaatctcaggcttttgatgttacttagaatcttggaggagaccacgaaggacacacagacgtggctgcacatgtgcagagatcttgtaatgtaactatggcttttctctgcaccatgtgtgaaataagctgccgctggcgttggggcgccggcctgggttccaacacagtccgctggctgcctcggtatttgccgtgcctctctgggcctcagtttttcctctcttaaataaagaggggactggattagatgatttctaaagtattttccagctttcagatgctatgacttactcttctctttttccttttaaaatttctttttcctgtaaatcaccaagatagttgtcctgaacagtttagatgttatgaatccattaggaatcctgataagaaagtgttgaccctctttctagaaaaatgcgtgtactaacaaaatttttgcttttggttgcaggaggctcaggaactgtggattctagtttaagaaacttgtagcaaggaaatcaggggagttgaaagtctcagaagccaacccctatgttgtgttctggccacctctgtgcagctcattcctcaatctaggagaaatttttctaccttgccccaggaaagagctgctaacttgttttcggggagtgtgggggggtctttggtattggtgttccatttctcttctcaggtaccctctcccaagtctgtcccttctttatgataaacacagtggcctgctttagaattctgggtctcttgagatacagcctctcaacttacaggtgaggaagcctcagggagaggttcaagtgacgtcacaaggtctggttagagaaaagcctttgccagagttcagagttttcaaaccaaggtctaatttgggtgggcgcagtggctcacacctgtaatcacagcactttaggaggctgatgtgggaggatcacttgaggccgagagttcaagaccagactgggcaacatagcgagatcctgtctctaaaatgtatatctgggtgtggtggcatatgtctgtagttccaggtactcaaggggctgaggcaggaagatcgcttaagcccaggagttccaggctgccgcgagctatgatggcaccactgcactcctgcctgggtgacagagcaagaccctgtctctaaagaaaaaaaaattgaactcatccccttttaaatccataaacgcacaactgaggttgttggatggggaatttaagaaatcccacctcctcctccctgggacctggccctgtttcccgtctcatggccacctgcagggtggctgaagtttccagaatgcgtacttcttgtgaaggttctgattgatattttgctttctggaccagtgtggctctaccatattttgggatgttatgtcttgttactgctgattgtttcaaactcgtttgcccaaagaggtcacattttaatcagaagaacaaaaatgctatttttttttttttttgggtgggcgtctatccagctgtcttggggatttccagcactgttcttggaaatgttggctctaagtcgataggtcatgctagttctctctctctttctctgtgctgttggggaagctgtctgcttgggtgagagtgttcttccaaaggatgtctttgggtgccctgggatggttaggtccctagagtgggacatgttctggaagaggagcccagtgaactttgccctgttcggtagctgcagtttatttcctcactcttgtccctatctttcagttggtcgtaggagttgcccaggaaggaagtttggataataataatgacatctggcatgtaaggtccaggccctgtctcagttgctttccgtgtagcatctgaattctcttacaaccagtacaggtagtgttttgttagctgcatctgggactgggtagctgatgccctgagtttaaatgctgatccagcgtctcccagctgagcggtggcgggacttgaatgagatcgcggttctgtctcattctcaaactgctgctcttatcactgtgaaggaacagctatttagatgggctggcctgagggcctcctctttcccagacggcacggacgcagtattctatcagggaatgtggggccagctgggcatctggtagcccagttggttcttcggataatgggctgctcagtgaaggaacctggtgctgtaaaagtgattccccctctccttccagtcttgggctaaaactggagctgttcactgtggttgtatctgcctgaaaggaaagggcagatgaaagctggaaggagcacagccagcacagtgggaggggcctgcagggggctgctggtggctgcaggtggctgcaggtttcccacggagctttcagtttgcactcagggctgtgaggtcatggaggccagcattgccttctcatggcaggtgtcccggagtccctgaatctgtgggtttcccccaagccagcacctttgctgcaaacctctgagtttcctgttagcagtttttgggttgctgtgatgaatgagacaatatccgtaatatcacagcgtgtatttctgtctttccaaggatgtgtgaccggaatggtggtcggcggcttcgacagtggctgatcgagcagattgacagtagcatgtatccaggactgatttgggagaatgaggagaagagcatgttccggatcccttggaaacacgctggcaagcaagattataatcaggaagtggatgcctccatttttaaggtaaagagcccagctcccttccccactgtgggcacagtgtctcctttccctcatggactagtggagatgttgagtgacatctttctcatttacttaaaaattaatccagttttttaaaagcaaacattggttcaggagtgctgaatgtgtctcagacatgtacatgagctgatttcacatctcttgaattacggagtcacttttgtggtcgcttgtattctgatgaggagatcgaaggctcttttcttctcttttctgctgcttccttttcctgatgagccaagtgggagaaaatacttcgagaccttcacgctaagacctttccccacgggcttccattagaggcgatgcatataccagggaaggtttcagtccttgttctttcaaagctgatacttctgcctggcattgtagggccagctcaggagggtgagatgccatctgtcattcctttgggggctgggccgtgtggggggttgtgaacctgcagcagatgtctaaaaatagtctcacctcccttgagagtaatcggttccccatgcgtggagagacgtgatggagggtttgttctgtgccaggcctggcccacggcttgttttctgctcacatgatcctgtgtggtagatgctgttcccaccctcattctatagaggcactgagaggagaagtgacttgttgaggtctcacagctcttgtatgacggagccagcattcagatgcaagatggcccaactgtgaacccttggtcctaactccagaatagctgatcaacagagatttcttgccattacacctagattcagacagaggaaccaggaattagggcagcccagctctgcagaccagctgggctatcgaatcccttgtgggtcatcagagtcctgtgtgggcatctctaaggctccagatgtccaggtttcacctctgggagattcggagcccaaggtcaaggtcaagctagacttccacgtttgccagtgtggacactacacgtagtctgagtcctagcccaggttataagccattgccatgtgtgcttattctcttgcatttgggggccagagatggggaggggagagtgagtgtgggagaggggtgaaaggggctgagttgttgggggccagaatcagacctgagaccacaaacaaggtgtggagggggtcaaggctgtaggagcccatgacagtgctggactcccagccacagatgactgtcccctgacaccagagaacaaaaatgacaaaagatcacaccttaaccccagagtggaccataaataggtcaaaggtagcttaagatgcattttggtcctgcacgtctctgcctgaccgatgtttgcagtggggctgtgcgtttcagtaattctgttaaatctgcaatttgaggttgctgatcttcttgagaatctgatgcccattactgaccacgccaaggaatatggggacaagggaacgctttgcactcactttcgaggggtcccttggtgcccccacacgttccagattctttctgatcaaggaccccaggtcagggagcctcagcaccaagaagttttgtgatgccactgcctgcctcctcacccttagtgccattgtggatttctctcttgtttgattgcagatcttttttttttttttttttttttttttttgcctttggcatcatggtgaacttctcttgggaaggactgcaaatgtaaacagtgccagagtcccattcagtcggttgggaactctgcattatagataaccccaaaagccggaatttctctgcctcgccactgttgatgtctgggtctgggcaattctttgttgtaagggttccctatgccttgtgggatgtttagtggcatctctgacctctacccaccagatgccagtagcatcccctcccctactgtcacaatcaaaaatgtcttggacattgccaaatatctcctggtggggcagagtcttcccctccccattaagaaccctgataagagctggccactgccaggatcaacagacttaaccagaggtgttgggtgctgaaggcacagttgcaggttggacatcagtaaaacatctttaagacatggcagagggtgctggactaggctgtgtagccctgacatgtggcatgctgacggagacgaagcttctcccttcaccccattccctacttcaacttgtgctcggggggtaatgaaataaagccccagatttatacatcttatgcaatgttcttcatggccgtttcaacagtgttgagaaaaatgtgcaagattcccaatgtttccgttggttacgcagtcgcctgatgtggcaatctgaaatgagtctaccatctcagcaggaatggggccaggagggagacgcgggtgcccactggagcagggaggccatcgggagggccaccagtgccggtggagacatggcgccagcaagagcccatcatgtgcttccctgagctatgcttcttcccatccatcctctgagaggcctgtctctgtgacgttggccggatagatctttggctgttggatgaagtcaacctcggtcaggtagagccatcttagggattttccggttatgtagacacttgtttctttcaactgttcaaagaaaacctttcaacaatttaggagttaagaaagaaatttatgagtttggtttcttccgtaataagtggatggtaaaaggggccacttataccagaaaatccctcattgtctgcaggcatcatcctgaggccggcctcatggtatagatcacagaagagaaattgaaaaaacattgagctcattttgtaccgaccctgagtacactgatgaggccctgatagcaactcatttaatttttaaaaagtactttaccttcttgacatgacgacaaggggggaaaatctagttaagtgaggattatgattcatggttattccaggcatcgtaacagtcctgaatgagttaaagctcacttagtagcacagatatttctcattcagcaggccttgaagggaaaaatagcatttaattaaaaaaatgcaacatgaaacaatcatattaaattaggaagacctcctggtcttagttcagtgctgtcagcctgagttgtgcgtcaacaggagaaataagttatggtggaggctgaatgagccatagtgactgttgctggcggcaggggtgggggggccctgaaatcactctcatgtctagtttttgctctagctcaagaaggatctcgagagatcatcaagctaagttgaccttttaatgctggccagagaggctgggagagggccaggtgcctgctgtgtcacagagttcagggcaggcggcaagccaggtacccgatggtggccctggatgcttcctggccgtgggccctgctgtgatggatgatgtggcctggacttgctcgtggggtgagtgtgagcttggcgtgaacgagtgagtatggcagtgccttgcaggcaccgcggttgcgtatgtgtaccagcggatcacaacgttgccatgaaatctgtgcatttcaaggcccgtttgggatgtgggttaactcagtggttctcaggtgggggaggtatcatgatttaccctccagggaatacttggccatgtttggagaccttttttggttgtcacagctaggggaggggtgctattggcatctggtgggtcaaggctagggatgccgctgaatattctacaatccacaggaccaccccgccacaaagaagggtcccagctgatatgtcaggcttgccacggtggggaaaccctgatttaaagtaataaaaatttgaaactacagttgatttagtacatggtttgctggtttatttctttaaaaataaacaacagcaacaaaacccaaattaatgcccggtcagtgatgcagtcaatgaagagagcattaaagaccgtgtgctttaagaaatagttttagaggggagttttacatcaatgtcacatgaggaaactaccacttatgctcactaatgggaatgttcttccagtctctttaccccaggtagaggtgcaacattttgcatcaacaaagtaggcagcattggccttgaacagtaagcattcttgtcttttttgagaggaaaaacagtctgggctattttaaaggagctgtgactcatgggggcatgatggagtttctggaagtgtggtctcctgggtagctaaatccaaatccctggaatactggctaaagacagctacctgggccgggcgcggtggctcacgcctgtaagcccagcactttgggaggccgaggcaggcggatcacgaggtcaagagatcaagaccatcctggccaacatggtgaaacctcgtctgtactaaaaatacaaaaattagctgggtatggtggtgcacacctgtagtcccagctacttgggaggctgaggtaggaggattcgcttgaacctggtaggtggaggttgcagtgagccagattgcgccactgcattccagactggtgacagagtgagactccgtctcaaaaaaataaaaaaactaaaataaataaaaataaaaaataaaaaaagacagctaccgagacccaacctcccttccccagtgagaatcttgaggggcaaggcccaggaatctgcattttcacaagcttcccaggggcagggggttggtatatgcattaagcctgagaacacttgctgtggtggggaaactgttgggttggaagtgggtacagctggcatttaatcccagactgggtggccttgggaaagttacttacctcttggaattgcattttcctgaagtgggtacagctggcatttaatcccagactgggtggccttgggaaagttacttacctcttggaattgcattttcctgaagtgggtacagctggcatttaatcccagactgggtgaccttgcgaaagttacttacctcttggaattgcattttcctgaatgggatcgggatgtccctacagatctcctatcattttaggctggaggacactgtctgatttttcctgaaaccgaagataattctcatctgactgtggttacctcctagttggtgtgtctgtattccaattttgcaagcttaaaatctgtccattcacctgtcttatttttttaaaatctgtactgccccattctacattatgactttaagatttcagctttgaatttctggtcctagttcagatcctaaggtttggaaaagtcagaaaacagatctattaaaaaaaacacacacacattaaagggaaagtacttcattacattttaaacagcacctggggggaaaagtctagaataaatgcaaaaatgcaaaacaaaatttctattaaaagtaacagggcgatggatgaccattttgactttttgcaaatgttcccttttcatgctaaattttaggggttgatctgaaaaagcaacaacttgttctttgttttgaacgctctggtgaaaccatatgcaacttcctctttgtgctgtgtaaacctcaggtgtctccagctcttcagccaggcaagggcttggctaaaaggtgcactccagggttggaggagccttcagcctgggttcgacttctgactcagctgtatgaacctgggggaccccctccctggcttgggtctttccacatctggtccccagatgtgaaaagactcaagacatctgattggagtctctttgggtcctgaaattgaatgagagttgatggccaacaaagattcatgggaagggaaggatgtgtggggtcctggtcatggtgacggatatttgtgattggagtcggccatgaatttaatgtgcttctgtttctttcttcaggcctgggcagtttttaaagggaagtttaaagaaggggacaaagctgaaccagccacttggaagacgaggttacgctgtgctttgaataagagcccagattttgaggaagtgacggaccggtcccaactggacatttccgagccatacaaagtttaccgaattgttcctgaggaagagcaaaaatgtaactatcctttatgggcatgaaaccttccagaagctgccctggcctgtagccttcaccacagaacttgggtctggggtagacacagggtctggggcacatagtttcagttaaacaaagcagttctctccttcgtgtaagcagaaattgagatctctttccagtgacctcagagggaagggcggaggagattgggtgctgcccaacctgtgccccacttgctgcctgaccacagacatttgtagggcctccctggacaggaacaagcatcctccagcagtttctgatgaggaatcctttcattttccagcagcttgcagaggaggccaggggaaaatatggtgaccacagaaggcctggatcatgagggttgggagtaaagctctcagatgaagttgtcaaagatggcaccatggccttcgttgttggagatgggatatgcctcagtgtgttactagatcctgattgttatttgggaactccgggatgtgatcattcctgaggtttcttccagctctcaaatcccaagaaagcatttgtgacagattaaagcaggacagcaaaaacatgccgcaccctggtcctacatcactaaaataaatcccaaagtactgagctgggatctggcctcagaaggcttctcaaagccctgtgctgtgccgctgccatgaattgtagctgatttatgagataaaacctaattaccagcgctggtttagaacatgcttttaacacattgattttcttagccacttgatgaggcttttagaataacccactctggctttctccttctaagcttctgagtagtccacgaatgcctgtaagaaacagaaacccccaaaacttcttggggctgtgcagaagtttgaagtttgcactcttcccgctgtgggggtgttgacttagaattttttaagaagttaaaatggtgattcaaacaaatctatagtgaatctgtgtcagagagttgtgtaatcgtcatgaaggaggcagcatgatggtaaagatggtggacagagaatccgaggtgctggtgaatgtggcccatgaacgagaaagctgagccaaagccgatgcccgacccggacagtacaattgcggtttggggcgtttgtagcctaatcgtctgcaattagcacctaactctactgagcgtgaaccctagtcaatactaaatagtaaggccaacaaactgaccttcccttggagaatcgggtgccctttaggaggaaacctctatataatagtctggggtgaccctgaaaggctaagcagtcatctttttgcctcatttcccagttttggacaattttttttatcaccaaaaagtaaagtgtgatttgaaggaatagagaagtttcttttggcccctactgccacccccaagatcagtcaggcttgaaccggcaggtgaccccaacttgtttatagcatggggtgcagccagcatcacctgctagtgatgttaaagaagcagcaggaggttctcaggggtgaagcaatgtagcatttgcataattgcctacaggggcccactcgcctctaacctcagtggtttgcaggctccatggtgggcgccccacctgctccctacttccccatcagtagcttctcagtgaattctttaatctatcgaaatggaatcaaaattcagccgggaggaaacagtgggtaaattctgtaggtcactgggaataatgaatttttgtaagtgttggttgtgatacgtctcacactgataaacttcataaggtaagttgtcgactgaggaagcggcatgagaagggaaagagcagaggctggcccagcgtgcccctgtggacactgtgcacctttaggcggtttgtgattacggctggtgcccactgggcatcagtgagggtgctgcggtgtgtgtgtgtgcatggctgtgtgcactgatgcacatgtgtatatttggaaaggccaaaaagagatttcctgccaactggcaatacaaaaaagaccccaacctgccaacacgttttgccaggaaatcggtgagtgttttcaaatgccctggcttataaatgtaaccttcttaagttagcaaatgcttgctgtaaagtatatctgatacagactcattttggatctcagaaaatagaagaaagagaccaaagtgctgtctttatcctttaaaagtgttagcagaaacaaccaccaccaccaccaccaccaacttctctcttttgactttgctgatcagatgactgaagcatgggaaaaaaattctgtgcctttcccaaaccaatgaagacactcactaacttaacgtttccttaaactcagcatttacagagtagattatggcttcagcaaaggctgtgatgcctccgtgccatgtgtcatggtgtttgtctggttttctgtaggcaaactaggcgtggcaactgctggctgcgtgaatgaagttacagagatggagtgcggtcgctctgaaatcgacgagctgatcaaggaggtaagcagaggcagcatttcaggggtctggccctgccaggaggagtctcatgtcttctggcagggaggggcaccgttcttgctgtatgaaggcagccagaccctcgggctcgctgaggaagtggcatctccacctgtacagatctggaacggaaggactggctgggcgccccctccccaggccagcttctgccgacaggtcaacccctcacgccagatccctccttcatccctagggctgggcctgagctgccggttatgtgtcagtgaagttccttccagctccaaactgttcgaacactttggacagcagtcttttaaatggcatcgtgaattcccttgccttcctagcaggctacagagaacaaaatgtaaactttccttgctgcctgcgcttgtcatgatggcgggtgttgttgtaccagctctcatggctatttgattgcttcctttttaatgtgcagtttttattccttaacggattggaaagctggataaccaagcatgttcacattgcacataaattcctaacaggctacaagggagagcataatcggggcctccttaggcaagaatacatggcttttgtatacccatttcagctattgggatgcccttttcttctgtctttggcctcttaactatgcttttcatgggtattacaaggtggacatttgcatgactaaacctcgtgcagcctttgcaaaaggttgtgtgtgagtactgcataaattcttcttcttaataacatagcaataatggaatccttaagagtagcttggctgtcagagaatgaagataacagaatgtaacctacccgaacggccttgctcttctgcacaggcagctgccaagtgtctgggtggtctttggcagccgactgagtgaattcttggcttcgtggccctccaccaatgtcctgttttctgtagaaggcttttctgctgactcagctgagagagtgagataatcggattgccacaccggggtcacaagaaaagcaatttcaaaacatttcataattggatttatcagcctcctttaaggaatgggccagagactgaacatctgcatgtggctcgttgagcgagattcttgaaagcatggcagcctttggccagcatcactgttcactggtgtctcagagcttgtctgcgtgtccagggcgttgagggcaattggataacctggaacactgggtctgcaacaggcaggtcctggaaagggccaggaaacttattagtggcccccaaagagcctagtaatttggccacatggtttgaatgctaagcctggtagatttaaggcctagggcctttcaggttgcaaagtgaaacttgacttttgtctcctgagataaaggtgacaatatggttttacttacacatgaactgttcatttttacaaacactggagccccaggtgggagatcagtgactgagctgccctcctctccctcccctgactgtgcagccttctgtggacgattacatggggatgatcaaaaggagcccttccccgccggaggcctgtcggagtcagctccttccagactggtgggcgcagcagcccagcacaggtgagggtgggtggcctagaattgtcaccaggcatggcctgaagggtttacggcattccaccagccagggacggagtgggggtggttgttgctatcatgatccatgtctcattaaaggtagctcagccctgagaggtgaagaacgatggccctggtttcccaacatgagggcagagcccagctgtgcctttggccctgctctccgctgcttctcaggagggcacaagctgcttgttccctaggtgatgtccatgccagctctccccacgctcctgggaaagtccagggaagagggtctagtgaacttgtgtaaggccagagggaagatgcagctcttggccacgctggcgccccctccctgggtactcccttaggtcggccagtctgttacgacattaaggaccccctcagaaccaaagagagcccagggcatttggaggagaggagaactcagaccaggaacaggaagtttgttcagagccctagatttgaatcccacgctgggaagttacagatcttgagcctcagtttattcatccgtaaaacagagaaaccaggacttgcgccatggggtcacgagggttaagtgaggcattcatcctttgattctcttttgatgagccactcagaacccccagctgcttgaaatgcccccgcccccgccaggcccaggcttctgcagcccgtgaatgtgtttgcttcctccctcggcgtcttccccctagccctacatcccctgtgggagtctgggaggtggcagctggccccggaggccttgaaggttgccaggccttgggtgtcgagtaagaggtccctggaaaggcacctctgtctgtgctgcaggaacaccatccggaaagctagcttgcacccccaggctctcccccagagataagccctgggtggtgggtatgcagtccagtggtattctgggggcaagtgcttgaggtgggaaggaaatgtggccccacagtgtcacattgacacatggtcagaaatcccacagcatagaggaagtccccccgacttgccactctggttttctgcatttgtgaaacaatggctctctgctctggtggggaaaagcactgaattcagcggaagcctgtgctccctggagcctctggcacgccatgtgcagccttttaagggacttttggagaaggagcgattggggttactccctgtacaccacacctgggtggctctgagcttgcttttctgtttctcctgcaggcgtgccgctggtgacggggtacaccacctacgacgcgcaccattcaggtacggggtggtccgggctgagaggggcgtgggcactgtttgaagacaaagcccagataacccaagcagggttgcggggtttcgaggatgagcaggacctggtgtggaagtctaggcctggttccaaggatgagcaggacctggtgtggaagtctaggctccgttccgaggatgagcaggacctggtgtggaagtctaggcctggttctgaggatgagcaggacctggtgtggaagtcgaggctccgttccgaggatgagcaggacctcgtgtggaagtctaggcccggttctgaggatgagcaggacctggtgtggaagtcgaggccccaatttctcctcctcaccatttggtcaggagctggcgagtggcctcttttgaggccacttttcttggactggaccagcaagtagacagagtactctttgaggctgtaactgtgcaggagagacagtgagggacaggccagcgtctgtcccagcgctgcctctcttttggggctgcaggtggagtgatggagcctctcagagcctcatctcaggctcccctgcccaccacctctaggtggatgcagctgttcccatttcgcgggctcaggtggtcacgtacttgtgtgctccagactgggggcctccccgcggtgggcagaggtggcctttgtgtgtagtctcagcggctaaggaccctggctgcacttctgccagctgcccctggaagtgacgctcaggcgtggtgacggcatcttctgaacaaggaagctggggcatcttccagcattggctggttctgtgggaggcgagcagctggtctcatcagatgggccacagaacgttagggctgggcctctgggcaggggaggaaatggggcagggatagaagcgtgctggctgaggactgcatgggacagttttgtgggtagcagaggtcggtgctcacccaggcaggaaaactgtcgagatggcaatgccctgtccatgaagctcttgtctatttcctggcagccctttgagctggggggttgttttcactccggcttcacagatgaggagactgaggctgggaggttcaggatctcatccaggtcgcgcaggcctctggctggagcctgttcttgaggcctccttgtgcccggcagccgccatgctcacagggtctcagttctgggaggcctgggtcatgaggctaagcctccgggctcgccagccactgggctatggcctgggagtctgctgaccagtgctttccgggggctgtggagtagccaggcacagaactgagccatctcggtgagatgcagaggcacaatttggggagagcatgtccttgaattagtccagcagggtcatagccactgcctcatgcacagaacatccttctagaagctgtgagctttggtacctctgtccagccccgcccccacctctatgtaaatccatgcttcagtttccttacctggaaaatgggtataataataatctaccttacagggttaaatgtgctggtaggtcccaagccctgggcacagcacctgatatgagctgtgtagaccatagtctgtggtttataacttcaggagtcttgtctgtgtagataagcatttgtcctgttacccagtttctttaactggtgcttacctgtgccgagcacaaatacaagctccgataatcctcacagcagcccagtgaggtggatgctgtttttatctctactttgctgatgaaaagctgaggcacagagtggggaagcggcttgccccaggtcatccagctgggcagcagctgggctgggaccgcacgtcaggcaggtgggctgcagggtctgtgctgcgggtgtctttgttgctgcctctgtggtcaggccgttccccagcaaggctgttcttgtgggtgagtggctctataagggcagggctgggtcgcagcaggcccttactgttgcagaaggctcacctgcctcaccttggcagcccttggtgagctgcttctcacctgtcaggtacaagcctgacagctggaaccttctcttagcataagacgttctggggtgtgtggtcactaagacactcctgcttaggcgtctctgaagcacttagctgttccgggtgaagctgccagttcacatgactgagaggtgctggtaccaagataaggccccggaaatgacagggcaaagggccaaaggggtgacggagttgcctgaagcgtttcattcatttggaacaaagttcgaaagttgcttcagggtaaagggaggggagtgtgtggagtccgcaggcagtgcagaagttgcagacttggcgtggggggaagatgatgagtgaggaagagcgagaccagcggggaagatggtgagcagggaagagcgagaccagtgctgccatttccttctgggtgaccctatctaggattcagtttcctgaagtgtcaaatcaatgaggtggaccagagcttctgcagctctagcttcctaccctgcatgattctagaacctgcgtaactccagcatggctggaaatggagcccgtgaatggtgggttgtcaaataataaggcagggagcagagcccaatgggagggtccaaggagttctgagtgcccagcagtgtcagcagggaatgcagatggactcagggcctccccagatgtggtcagccttgcacaactctagggggcgccgtggagttaggcacctcacaacttgtgtggctccacaaggcagcctcgaaccggtctggggtacttagaaggagctgcaaactcactaagctcattgctagcgtatgtaattcttttggtttaaggcaattaaaatgcagatacctccctgcatttacatgttatctgcattcctaccttagattagtgttttccaaactttggtcacttgaggtccagtgtcacaattggttttcacagcctggactgttactaacatcatgtttttcctcaaatcttaatcttaaaataaaacttaagtttattttaaatgagaacccactatcattggctgtaaaggaagacctgtggcacctggtataagtaggtaatactgtctggctagaattgattaagattgtatttgtctttcattgaatttgtcttgacctctgacaatgccctgaatttggagccctaagttcagtgccattattcaaaagggaggttgacaggtgttaggtgttagagagctatcagcaccaaactgaggcttgctttttgaggtaatcagaggttggaagaatattgaagatggaataatcttgtgattacatgtatcacccctcccccattattctgtgtgtgccacttttggggaacccctgctttagtttgagtgtttttcagactctttcctgagaacagatttggatgaagggttttgcagagattcttaatctgaaatccaggaaataccaagggcgctgtgaatttgttgagaaaaagattatgtctttattttctttaacttcaggtttaaattgagcatttccttttgttatgaatgtaggcagcagaccgcagtgcccttggcagtgcctatgagacggagtattgtcataagaaatgagttgtcgaaacatcgtttgccctcagcttgacgtgtaaattacaacagttaccagaccttctctagaccttgtatttaaagagtcagtgaagaagtacagagaacactgttgtagttaatatgttcagtcattggtttccttagtcattctgtgtatttattcatgcatataaaaacattacttctacaagcagtacatggatttccccagaatatcaaagtggttcaagacacacaaagagttacccgtgtaggtgtgagacagactgtgcacttgggcaggagggaccctgtatgtctccccgcagcaccgtcatcgtgtccctcttgtccacagcattctcccagatggtgatcagcttctactatgggggcaagctggtgggccaggccaccaccacctgccccgagggctgccgcctgtccctgagccagcctgggctgcccggcaccaagctgtatgggcccgagggcctggagctggtgcgcttcccgccggccgacgccatccccagcgagcgacagaggcaggtgacgcggaagctgttcgggcacctggagcgcggggtgctgctgcacagcagccggcagggcgtgttcgtcaagcggctgtgccagggccgcgtgttctgcagcggcaacgccgtggtgtgcaaaggcaggcccaacaagctggagcgtgatgaggtggtccaggtcttcgacaccagccagttcttccgaggtctgtaccgtcgtcaccttgctgcccccacatcttagagatcacgcctcctatctgtgtgccatttgcagctcagggtggccctgtggtctcatggagggatgtggaggaggagtgaggggcatggtgtggcaaggaggtgctcctttgaatggcactctgccctctccactgagcgatcctggggtgcttctctgtgcctcaacttccccatgtgtacagtgggggtgcagaatcagtaccctcatcaggtgattgtcgggagggtaaaggaacttaacctcatgtaccttggagtatgttccaaggatggtccctgagcgctggctagagacacagagtctgaggccctgctccagccacaagatccgaacctgcatcttagcaaggtccctggggatctgtgtacaggttttgagacacgctgactttccgcacactaagtgctcaggatggcagctgcacacactaagtgctgcctgttagctttcgttacgctgtagggaggatgtgtaggataccagcctgggtgtctcctggagggttaggatggcgtctcccttctccacgtccccatgctctctgctcctctccctgtagcagcacagcccgagatagtgtcaggtctcagctgccactggcctgagaactgccagaggaggggcctggaagggcgggtgcaggggtatgtgtgagctcaggggcataagccctgaggaatccccctagtgaggaggtgtgaggccgcggttatcacccctgagcaggcagagcggcacagaagtgcgtcctgcaatgtacattcccgggcctacctcacatcctctgattccatgggtctgaggcggggcccaagattctacatttctaatgagctcccagggaaggcgactgctgccggtccaccggcccactttgagaccctttcagttggctgtcagagattcgggtgagggctgcagccctccctgggtgtcctcaggtcggggttgccaactcagttgcctccaagggccaggcaggtaagagcaatgcacgaattgagagataagagagagcactgggcagctgtgcccatggagaggcgttcaaacgaggcattaaaatcccggcaacaacctggaatggccaaacgaacagctccttgcttggaatttggcccaagggccaccagtttgagatcccatggtgccctggcctaaatgctacaagccctgggcctcctgatcccccagccctgctgctgcgggagttggaggtcatctcggccttgcttgcaaacaccctctgcctgtgtcattccagagctgcagcagttctataacagccagggccggcttcctgacggcagggtggtgctgtgctttggggaagagtttccggatatggcccccttgcgctccaaactcattctcgtgcaggtaagtatgggcagcttttttttttttttttttttttttgagatggagtcttgctctgttgcccaggctggtgtgcaatggcgtgaccttggctcactgcaacctccgcctcccgggttcaagtgattctcctgcctcagcctcccgagttgctgggactacaggcccgtgccaccacgctcagctaattttttgtatttttagtagagatggggtttcaccatgttggccaggatggtcttgatcttgtgatcctcccagcttggcctcccaaagtactgggattacaggcgtgagccacctcgcccggcagtctgggcagctttgagccctgcatccaggtctcctggccctgtcatgtaaggatcaagttttgggctggagaagaggacacaaggacaagtttccacctgtgtaggaggcaggcctgggcaagaccttcaatatgcgggaagcggattcttgccatctccgagccatcttctggtgtctgggacgcgcacagtctgtgtgtgtgtgttttcttttttcttttttggtttttaaatctaagcctcttctccagaaagattctacctgttcagttgcccgaaggtctaagtgacagattagggcattgccagcccttatttcatgtagtcaagggaatgaatctctaatggtgggatcctgggtgctggctgtcccagctgggacagtactggggagtatggaacagttttggcaggagtactgcttgcccttccttggcattctggctcattcacttgggactcacgtggcactggggtcatcagaggacctggctagggtcaaagacagtgcccaccccctttggagcctccgcctctgcctctgactttctgcacctcccatctagattgagcagctgtatgtccggcaactggcagaagaggctgggaagagctgtggagccggctctgtgatgcaggcccccgaggagccgccgccagaccaggtcttccggatgtttccagatatttgtgcctcacaccagagatcatttttcagagaaaaccaacagatcaccgtctaagtgcgtcgcttgggcgccccaccccgtctgcgtcctgcatccatctccctgttacagtggcccgcatcatgattaaagaatgtggatccctctgtctggggtgggatgccttactttgcacttaatttaataagggcattctcggaggagtagacgtttaatacgaagtggcggcatagccctgccgagatgtcggtgatggcctggatgctgtaaccacaacctgtggctaaaaattttattttctatcctttacccgtcattatcattagttgctatgattctttctgcattttcggttaactatcatttccaaagacttgtcattcagtaatattagcagatagctgcttcgataaaggaatttggagtttaaaaatcaacttgtgaaaacaaggttgtttttgtctttatcttttgttagagttatagatttatgatttcataggcttgattctatgtgaaatatctttttacttttatgcattttaataagatttaaaaatatttagattaaagccccctttaatgagtacaagaaaaactcttggcttgttagaagaaagtatattctttctagaatttggtgcaggaatatgtgttcatatccaggcaaacgggtgtgtttttatcttcagacaatgaaaccttctcctctggggctttgttgccaggaagattagaactaaatttatttttttcatttctgtcatgaaatcattccagatacctcttttcttctttccaaatggttttcacatgtgtttgaaatatttgtactttgaattgtcggattttccatgtcctcctttctcctttgtgcccagcctgagtcagcaccatcccgcattcagaacctcccagtgaaagggcagccttcattttgagaaggtggaaggtgttagggtttgggagacagctcatccaatctcccaagtctcatggtggatttgtgactgtgagagtttccggtttaaaatctgaaaagccagatatgcctgtttccttttcccagcaccatgcctgtggaggggacagtcagacccagaggtcctttacgtgtggatggagttcacaggcgaatagaggagaggaccaggggacgtggcttgtcccttttgtccaacaaagcattatatttttaagaatggcagacctgtttgctgaagtgttcataagataacaataggcttgaatctccaattcaaatgaatgtcaaagcacatatctttaatatgctgaatgaatatttatttttgtatccattaaaacagtatattgatctcttttattctttattaaaataaaatgctcttttttaaagctgctgtgtactgtatttttttagtcactgtcaaatatgatgtaattctcaccagattctaggttctgtaaagggggagttactgctgcaatgtgcagtgttaattcagtgcactggactgaaacaatatcgcactgggattttaaggatttttttttttttttgagacaaagtcttgctctgtcacccaggctgaagggcagtagtacgatctcggctccctgcaacttccacctcccaggttcaagcgattctcgtgcttcagcctcccaagtagctgggattacaggcatacgctaccacatctgcctaattttttttttaaaattagagttgtgatttcaccatgttgcccaggctggtatcgaacttttggcctcatgtgctctgccccaacctctcccccagcctcccaaagtgctgggtttacaggtgtgagccacctcacccaactcctgttttaaggatttttctttttcaacctatcccttaaacaacagcaaaaagatacggagacttagactgatcctatggaatgaaaacattggagaatgtttttattccgaatggggggctgtttgggtttctgtgagctgacagatgagtgtgcggaagggtgtggaggaagtggggtcttgtgctgatttcatcctcctggatgcagctggggtgatttgtacgaggcgtccctggttgggtcagccacacgtggctggagtgtgtgtcctatttacgcacatctcgctgtgctaggccctcaggatacagcaaggacatgagggacccaggttggcagtcacagagatgacttccagcctagtaggacattcccatccatcaacacaacaaaacccatcaattctgggaggtgcagggctggccaacccaggtggagagaagttccccagcaagcttcatccgcaaggccatgtctgttctctcctctgccctcatacgagcccagtgagactgggcctgttcttcatttctagcttacagatgaggaaactgaggcacaggctcatgcgtggctgactgagagccatctatgtcccaggaggacagcttcgcctgagaggcttcatgagcagatctcgctgccatccttgagctggtgggcttcctaacaccccacgcaagaggtcagcagctgggtgcgtcgctcactgtcttaggcatctttgccatgagtcacactaatgtccgcacgctgcaagtaggaattttgtttacaagcaagctcttctccatcctgtggattcaaggccaaatgtggaaagttgatatcgtctgttgtctccccagagttcaacgctctcgtgcagacggtcgacaaatccttcctactcaacttcttgcagcaagctcggggagaggcgggagaggggagtgttttcatttgcagaggaggaaatttgggaacaggatgcttctttaagaagtcgggtttctagagaatgctgtgagggccctggatgtgaactgacttttgagatgctgaccccacactggccagttagctctgggccctggagggaagctggtggggatgggctgacgggacatcctgaaaaacaagccatctccactcttggtagtttaaaaatgttttaagaagttaaggtatttcaacaattcctttctgagtgattgccacttagttcattaacttttgcaaaatcccactttgggaggccaagacaggtgggtcacttgaggtctggagttcgaaaccagcctggccaacatgatgaagctctgtctctactaaaaacaaaaacaaaaacaaaacacaaaaattagccaggtgtggtggcaggcacctgtaatcccagctacttgggaggttgagacaagaatcacttgaacccagtggggtggaggttgcagtgagccgagatcacaccactgcactccagcctgggtgacagagtgagactctgtctcagaaaaaatgtgcaaaatccatctgggacacaacatttttgcttgccctcgtaatgtccagaaggctggagatgatgacccctgggtccaagcatcctcaggatccggtgggtcctagaaatcctgggaaaatcttcctgaaagggcttcaccgggcagccacccatgcctgccacagggacactttctctccataaagaagcagctgtgggaatcaggaagaaatgactcctgtgcatgattcagactctccataatagaaagttttgcaacccaatgactcggaaatgtttagaaattctaaagaataatctataattaatgactgtaattttaacaacccagtgggctgagagtggggtgtggcagtttctcagtggaaaatctggctgcttttactacaagtaggaggagaatgacaaatatcctggccccagggcacacctgatctcaggctttctcttcaagcacaccgttcattaatctgttaaaaggcctagctcatggtaagaagcccatttaaaccagcatttcccaaacttatttgacttgacgttttgccttgcagcgtgtctgtggatgagaggtgcccacaagcgttcagtcttttatcacaatccgactggaacatcttaggagttgagaagagtgtgtacattatttctttcctattttctttgggctacctttcagtctggatggagtctgccagggatggggatggcttcagtctcctctttatatgtaactaactattcctaaacttagtggtataaaaaacgctttattttgtgggtcaaaatttagacagggtacagtggtgttggcttttctctgctctgcaatgtctggaatgttagctgggaacagctgagagtgacttgaagtcctgcagatagaaccacctggaagctttttcattcacatgtctggtgcttgggctggaaggaggtgaggctgggcacagttgggataccgatgagaatattgactttggcctctctatggagtttgggcttcctcacaatatggcagcgtcagggcagtcccgtggacacaggggaagctgaatggctgtttgtgacccagccatcactcaactggacaaacaagccctcctaggttcaagaggaatggacagaaacaccacctcttgaggaagaagtgtccaggaatttgcagccatgctttcaacctgccacgggagccccgaagcctctcctttgctgcaatcccacctgccttttatccccctgacctctccttgggcatcctgattcctttctgaccctattccttgagtcccaggcagatgggccttttcctcactttgtcttgggagtatggcagtggactctgcctacttcataatggagcctttttcttgtccattttgatgacctctcagagcagggctctgacacgttactgggttacaaagacccctccctgccagggccagcgtgcagcacagggtgcttttgagttccggtgaacggggtgctctggctggagcctagtgcgaagtttccccttctccgcccattcctcatccctcagggcacacaggtcacctttcctcgccttctcgtccccacctctaaggcttggccaaagtttcttcataaaagcaagaaagataacgaaagagccccccatgggttatggtttttgtggggccaggaatgcccagtttgaacctccagttccgccacctgtagccgagtgaaagaggctgggttattcagacaccccaagcctcagtttccccacttgttgtgaggcttgagtgtgctaacacatcaaggcaacccagaacagcgcttggcagagactcgcagtttatcactgtgaactgtcgttattggaaagtgggtggagtcgggtttggattcccccaggagcagagacagaaacaaaaggattcaaggtaagcggcctgtatgggaggtgatctcagaagtgctgggaggggaaggggacctgtggctttaatggtgaccctgtgctactggaggcctgggatctctgaggaatgctgaggcccaagccctgcagagccagccccgggttgttaattacttggcactttcctcttgccttatgtgcaggggtgggctcaggcgactgaagtctcagacactgctgcaggtgctggcagggggagtcacagctgcataaactggaatggggcaggtggggtggggcgggtaaggggttgtgtttgcttcggagagggtttgtcagcactttgaaggaaaatttgtgtagtggccggaaccacagatgacccagggtttgtgttccagcccagggatcattagctgtgtgcgtcacttaaactttctgttcctcagtttcttcatctgtaaaaaaggggcaataatgttacctattgggaggattaaatgacttaataagtatgaggggcttagaacagtgcctggcacgcagtacatactaagaaagtggatttgcacatatcattaatgcctccctccctttctttctttcttgtttatttattattaaatagttataagtataaataattacaataatttatgtcaacgaactatagtgtcaacaataactataggtaattatttaataattagtaattataaaataattgatactaaattaactatagaattatatagtgccagagttgtttggctatctttaattatacatgtagttatttaatttcacaaatagttatatgaattatggaagtgaaggtacgatggtataactatacaattattagataacttatcatagtggtatacatatttatcatgcagttattaaataattacaatggaatgacttattcgctctctgcgtttgtgcaagggcaaggatggccacgtcccagctctatccagcccctggcccagtgcctggggttcggtggcgctcagttcacgcttgcagagcgagcggcggtgagtggatgcggtggggtcgggctgtggtggtaaaggtggccgtgaacaggaggggccactagagcacacagacgtgaatgacatggggctccaggaggggcaggaagagctacagaaacagcatccccaaagctgcctggcacggaagaggtgctgcagaaatgggacttcccttcccatcctcttctcctgataaacaactgaaaacataagagcgagatcttggggcttctgtgaggttaaatgaacgaacaaaagtcttacagcggaaatcactgagaatctcccctcccctgtcttccaaggagaacatgattgtgagcctgctcctcccttcctgggggggttgcttcctgctggggagaggctaagttgaactctaggatcaagaaagggaaggaggcagagaaaggtgagaaaggtgagaaagatgagaaggtgctcgcatggagcgtccgggcagtaccaggctggcccgaaggaggtgcggatgagggggaaaggctgtttacagatgtggtggcttctccgtgtgcattcacctcctgggtctcaactcgtgcagatggagggtctgagttaatctgaggttacatttgtttgctcagctatgctttttcaagaggccattcctctgagactgagccccatggctcctggctttacatgagttacacgcatcttcttctccttttttctaaatagtaaggggcagagagagttagaaataaaaaggaaagctgaaaacaaaaacctctcagaagagactctggctgttttttgtttttttttaatttttaagtttttattaatgctcatcttccctgaagagccctggctgttttcttgaccagcttctggagagaaaaatcacagtgcatttgagtagctccagatgtgatctccccattcagcatttcccttcctgtagcatctgccgagccttccttctggcttctctgctctccgtgcctgaaaggagacattgagcaatccaggccagttcgaaatcctgagcccagaaataaagtgactgttgcttttgcgtccttgcacgtttgccccggctctcagcagaggcagaaggtgatgtttggaggaagcagatggcccggtctactgtacatttcagaacatttcaactgcaaggctggctggggctattgcatcactgagcccgatagggctgcagggcagaggcagggatccctgtgggtggaactgctgggtggcaggacggggtgggggagctgagggtggtgtttggagaggagggggagaagggggagacagtttggggaacgtgcctgaattcctacccaggtccagtgtgggttgatgcaaatggtgcacacgggctgagaggtcagctagatctgggttccgatcccgactccttactgatgagttgtgtccttggaaaatgacttcttctctttgaatttcagtgtccttgactatatacatgatggattcttcccacatcgcatggatgttgtggggattcattgtcctgacctcctggggtgttggtgaggattaaatgaaatcatgatttcgtttgacatgcttggacaagagccccacacactagaaaccctgggtgtgtgttagctgttgggaagattctcctgaccgtgatgatgggagaactcggcatagccctgcgggaggagtgttggttctcaacaactgcggctgtttgggggttgttggcttgtactccctctttgtagaggctcctcgctcctggctcagggctgctcccaggtgcactttcggtggcaaggcattcaattgtacacgctgactcaggcgtggtgaaagccagctggccctctggaccctggccttggtcctcagccctattggttgtccccgctgcccgggattggttggcccacggggaggggctctctgcctaaggatggtctccccagctcagtgacagagggatgcttaagccacgccaccaccttcgttcaactgccagcatacctgagtgtttgagtcagcctctctccctgtggcccagtgacatgggcagcaatgtgggaggctgcccagtgggtggggagtcgatcagacggagcgaagagatttctcgaaggccctcttcaccagcgtagcttacgacagtgctggagcgcctacctgagcagaccacgctctaagcttgttttgctgaacaccttcctattgtcccagaatccacctgctctcccaggaagactgatctcttccagggaccataagcagcttccccaacaggtgccccagcgggagaccagagggagggaggagacaggtcagagtgcctactcccgttttctccctgagtcaacgttgttcctcctgaggcaccggcccccataccgccctcctcctgggctccagcagccatgctctctcctggcccccctggtcccctgcctttagtgacagcttatcctcgttcctgctctgtctcctttggttcccttagaccaggtgtcagcaaatctggcttgcagaccgaatctggccacagagctgcaacgacagaattcagcgactgcagcagaggccgtgcggccccccaggccgaaaatattcactatctgcctctttccagctttccagagaaagtctgtgacctctgtgtgagacccacccacacccatgagattagtccctttgcaaatcccttccttgaattaacctgtgttgagtgtgccaatggctgtctgggacctacccggcacgcattctattatcctgacgtcctcttagcctggcaacattctcgttctctccattttgcagatgggaaagcggaggcacagggaggctaaataactttgatgagattaggcacacaatcagtagggggaggtcagttccagagtcaaaggcaggtgccaccagcaccccatggcacttcctgtcctgagctgctcttactcgctctcgggacggtcatgccaaggaagtcccctgtccacagccgggacgccctgggtggtgctcgtggcggcagggccagtactcgaatcagtgtccctactttgcttctgtgcccgggtcccccttgattgacacacgacctgtcatctattctggtctctgaagggcctttgtgcgcctcttctgtgctgcacgaggcgctgatttttacggcctgtcctttgcagaggaagcttctctcatgaatttctcaatttttgtggcaaggagggtccccaaagcctggacatgtcagcaacactcctgtcttttccaaacctctccacgcatcgccaccaggaagcggggcagcaggctgaagctgggaccctcactctgccccttagaatgtgagcaagggaaagtcccagagcagatcccagggcactaccgggcccttccctcatctgtaaaggagctccttcctcccagggccagaggaggcagcgtgtggtaagtgttgagcaggtgtaattatacatttaattactgccctcactaaggaaagtgtgcagctgtgtccaccggtgggtggttctcaaccaggggtggtttggcctttgggacatctggccatgtctggagacatttttggttgccatgatggaaagcaggtgctactggcatctagcgggtcaaggccagggacgccgctcgacaccccatagtgtaaaggttggccttcacctgcccagctagaaggatccaaccccgaatgtcagaggcgctgggttagaggaaggccggagtggccgtctgtctttgtggagggagggcctgtgtctgtctcgctcactgtcacatctccaacacgtagtgcgggtttcacaaatggttcttgacacatgggcgtgtgctggctgcccaccggagctggtcaacacggttcccacttctaaggcaggcagtgacctgtgctggacctgacacgggctttaggggctcagaggatggggacgagggctccatagagtggggggggtcagctcgtccctgat

SEQ ID NO: 95 - DNA, 1538 bp, Homo sapiens
atggatgggggaaccgggcggcgagacggcggcaggacggcggcaggatgtgtgaccggaatggtggtcggcggcttcgacagtggctgatcgagcagattgacagtagcatgtatccaggactgatttgggagaatgaggagaagagcatgttccggatcccttggaaacacgctggcaagcaagattataatcaggaagtggatgcctccatttttaaggcctgggcagtttttaaagggaagtttaaagaaggggacaaagctgaaccagccacttggaagacgaggttacgctgtgctttgaataagagcccagattttgaggaagtgacggaccggtcccaactggacatttccgagccatacaaagtttaccgaattgttcctgaggaagagcaaaaatgcaaactaggcgtggcaactgctggctgcgtgaatgaagttacagagatggagtgcggtcgctctgaaatcgacgagctgatcaaggagccttctgtggacgattacatggggatgatcaaaaggagcccttccccgccggaggcctgtcggagtcagctccttccagactggtgggcgcagcagcccagcacaggcgtgccgctggtgacggggtacaccacctacgacgcgcaccattcagcattctcccagatggtgatcagcttctactatgggggcaagctggtgggccaggccaccaccacctgccccgagggctgccgcctgtccctgagccagcctgggctgcccggcaccaagctgtatgggcccgagggcctggagctggtgcgcttcccgccggccgacgccatccccagcgagcgacagaggcaggtgacgcggaagctgttcgggcacctggagcgcggggtgctgctgcacagcagccggcagggcgtgttcgtcaagcggctgtgccagggccgcgtgttctgcagcggcaacgccgtggtgtgcaaaggcaggcccaacaagctggagcgtgatgaggtggtccaggtcttcgacaccagccagttcttccgagagctgcagcagttctataacagccagggccggcttcctgacggcagggtggtgctgtgctttggggaagagtttccggatatggcccccttgcgctccaaactcattctcgtgcagattgagcagctgtatgtccggcaactggcagaagaggctgggaagagctgtggagccggctctgtgatgcaggcccccgaggagccgccgccagaccaggtcttccggatgtttccagatatttgtgcctcacaccagagatcatttttcagagaaaaccaacagatcaccgtctaagtgcgtcgcttgggcgccccaccccgtctgcgtcctgcatccatctccctgttacagtggcccgcatcatgattaaagaatgtggatccctctgtctggggtgggatgccttactttgcacttaatttaataagggcattctcggaggagtagacgtttaatacgaagtggcgcatagccctgccgagatgtcggtgatggcctgatgcg

SEQ ID NO: 96 - DNA, 1281 bp, Homo sapiens
atgtgtgaccggaatggtggtcggcggcttcgacagtggctgatcgagcagattgacagtagcatgtatccaggactgatttgggagaatgaggagaagagcatgttccggatcccttggaaacacgctggcaagcaagattataatcaggaagtggatgcctccatttttaaggcctgggcagtttttaaagggaagtttaaagaaggggacaaagctgaaccagccacttggaagacgaggttacgctgtgctttgaataagagcccagattttgaggaagtgacggaccggtcccaactggacatttccgagccatacaaagtttaccgaattgttcctgaggaagagcaaaaatgcaaactaggcgtggcaactgctggctgcgtgaatgaagttacagagatggagtgcggtcgctctgaaatcgacgagctgatcaaggagccttctgtggacgattacatggggatgatcaaaaggagcccttccccgccggaggcctgtcggagtcagctccttccagactggtgggcgcagcagcccagcacaggcgtgccgctggtgacggggtacaccacctacgacgcgcaccattcagcattctcccagatggtgatcagcttctactatgggggcaagctggtgggccaggccaccaccacctgccccgagggctgccgcctgtccctgagccagcctgggctgcccggcaccaagctgtatgggcccgagggcctggagctggtgcgcttcccgccggccgacgccatccccagcgagcgacagaggcaggtgacgcggaagctgttcgggcacctggagcgcggggtgctgctgcacagcagccggcagggcgtgttcgtcaagcggctgtgccagggccgcgtgttctgcagcggcaacgccgtggtgtgcaaaggcaggcccaacaagctggagcgtgatgaggtggtccaggtcttcgacaccagccagttcttccgagagctgcagcagttctataacagccagggccggcttcctgacggcagggtggtgctgtgctttggggaagagtttccggatatggcccccttgcgctccaaactcattctcgtgcagattgagcagctgtatgtccggcaactggcagaagaggctgggaagagctgtggagccggctctgtgatgcaggcccccgaggagccgccgccagaccaggtcttccggatgtttccagatatttgtgcctcacaccagagatcatttttcagagaaaaccaacagatcaccgtctaa

SEQ ID NO: 97 - DNA, 22444 bp, Mus musculus
  misc_feature (781)..(1359): "n" at positions 781 to 1359  can be any base
  misc_feature (4375)..(5965): "n" at positions 4375 to 5965  can be any base
  misc_feature (18075)..(22444): "n" at positions 18075 to 22444
taaaccaacctcgtattaaaaaaaaaaaaaaaagaaaagaaagaaagaaaaagaaaaggagaaagttaaactttatacaggatttgtctttgaagttatgagtcgctaaagaagtaattcatttatactaaagatcttgccattcctaaccgtactttagatgagtatctcgtatttatttacgaagactctattgagtaattaaagccacggacgtagtgagtttaggagcacagaatttatatgacagagtgctttcgaaaggtatttattcgcagtagcatataaaattttttaataatcctgtcaaatatgttcatgaataatttattaatctcccaattgttaactaccgggcgtgcacacacccgcctgtgtcctgcacatcacgcagaaatctactgccatgttcctgaagtgacaaagacaaggtaaaactggtatatttaagatgtcctcagcctcacaaaagggcagcgctgcgggtcaggctggcgagttaacacacgcactcagtctcccgttgtcccgaagcccagcttctggccacactcgcggcggcggggttcccgcgcctccctgcaccaggcccagtggggacagagctggtgcggtcccaggtgagcgccaagcgggaccaatgggcgtccgcgctcgccgcggccgaggccagcgcctcccagaccgtgcgagaggccggcgcgtcccgcccgaggcccgcagggcggctgagacgagaggcccagccgccgcccgagcttcacccgaaccctcccgaacnnnnnnnnnnnnnnnnnnnnnnnnnnnnnnnnnnnnnnnnnnnnnnnnnnnnnnnnnnnnnnnnnnnnnnnnnnnnnnnnnnnnnnnnnnnnnnnnnnnnnnnnnnnnnnnnnnnnnnnnnnnnnnnnnnnnnnnnnnnnnnnnnnnnnnnnnnnnnnnnnnnnnnnnnnnnnnnnnnnnnnnnnnnnnnnnnnnnnnnnnnnnnnnnnnnnnnnnnnnnnnnnnnnnnnnnnnnnnnnnnnnnnnnnnnnnnnnnnnnnnnnnnnnnnnnnnnnnnnnnnnnnnnnnnnnnnnnnnnnnnnnnnnnnnnnnnnnnnnnnnnnnnnnnnnnnnnnnnnnnnnnnnnnnnnnnnnnnnnnnnnnnnnnnnnnnnnnnnnnnnnnnnnnnnnnnnnnnnnnnnnnnnnnnnnnnnnnnnnnnnnnnnnnnnnnnnnnnnnnnnnnnnnnnnnnnnnnnnnnnnnnnnnnnnnnnnnnnnnnnnnnnnnnnnnnnnnnnnnnnnnnnnnnnnnnnnnnnnnnnnnnnnnnnnnnnnnnnnnnnnnnnnnnnnnnnnnnnnnnnnnnnnnnnnnnnnnnnnnnacttggacaacaagtatgaaagtggaagctgttcttaaagcccccccccccccccaattaaccactacctggtttatctcgaagctgtgtgtgtgtgtgtgagagagagagagagagcgaggagaggtggggggacttgaagatattaatgggattttgatatttctgttgtgcatgctaatgtatgccctcctatcaagcttctttgatgtatttatgttcatggagtcaattgctctaaaatgtcttttgaaagttgttcattttgaaatttactgtgtaaactaccttcagtttctcctttgctttcagtccatccagcaaccactgccccccctttctttgaggtatttaaaaaaaaaatactaagacgaaataaaagaaggtaattgaaaagagagtgacagcagattattgatgtattctctttattgttttgcagttaaccttgttcatctcatccatttacaattgaatttttgttatattttctaaagaggaagttttaccaaaaccaaatattcctcttaggaacaggggcctaaaggatttgtaatcattagcaattaatttattttagatcacccatacttgaaacagatcgacccagtggttttaaagcattgtcatgcagcagctgcaacttgcatcctggaggcaggaaagcaccaagttgacaagtctactctaaggtacagactttatctaatgcccgcttactttgaagtggtatctttgtcattgtaatttcagtttttaaagatagagactaaaccttgctttatttcccccccctcctgcccccttcagcacttatttagaagactgtaaatttgaccgagagcgaatagaactgttttgcaccgagtatcaggttacttactttaaacttttaaattaacaattagtacccacccccttttttcctgctgtttgcaaaactgtgttttctttctccttccccagaacaataagaattctctagaaaccctactgggaaggtaggtactgtgttaggtgtcaagctgcggagcttttcccttgtgggtaaggaatggagtgtgctgatgggaaacaaaactgagccaaaaaaattgggatcctgacccaaaataaagggccaaagggcaagtggaataattgaagttaagctaatgtttttttcaagatagagcctgacataatcttagtaggtgtgctttcactcttttgaacttgaagatgaggttcaacagtctttaagttcagagtggaatgaaacgagttaagaagagaaagacaccattgagaaaatcctgaaagtttttctgtagatactacaaaattatcattgtctttcagtataggcagatctctccctcatataactgatgtttcttggcgcttggagtaccagataaaggtaaagataacaagcttttctgtagagggagttagaggaacttttttttaaaaaggttagagttaaagactgatgttttgtgttgttttagaccaaccaacttcataagatgtaccgacctggatatttggtgaccttaaatgtagaggtatgtatagatccttgtctaaaaattatgtgtaataaaaattttcatttcctttatataaacaaacatttttttcttccatagaacaatgattcccaatcctacccagagattaattttagttgcaacatggaacagttacaggtacagtattaggacctttaaatgtttctttcagtgggcatttgagaactgttatggagactttataatattcccagcatcaggtaatgaaggttggtttaggttttaatggcaaagagagaatggaaagcagaaatttaacatagatttcacttttaaaagtaacatagtaacatccccagtagcctgcatttactggtgcccctaattgaaaaataactttaaagtttgagttcagcacactttctttcattccatcatgcatctgactcataaaactgagcaaaagtaagagattggagaatgcctttcacaaattaaacttccaaagttttaagcaggagttttaaattaccctataaagggaaagttcacacaagttcttaaaactgttaatattttcagtgtaaaactgaagaaattaaagtcttcgttgattgatggatatgctaacgaatttcttaccaattaaataaaatgaagatcattcctgaaaatttgaatgaaattaaatgttccaaagacatctgtagtcactttagagtaaatattagcgaaactttaaacagaaaatgtgtgtgaatcataaccttccttagagaagttgagagataatttagatattctcagcctgcaaaaattctgttagaaattcccttttaactagaacttgaatacctgattggaggaccagatccagcagaagaagcgcttcttttccaaagggctttgcgagctgttgagctcccgtggactccttaggtgttcttccttccgactgtgttcttgcagctgcttcagagttgctgcttcctcacttgtatgcccaagttgtgacatgattgtacatcttttaggacttggtggggaaacttaaggatgcttcaaaaagcctggaaagagcaactcagttgtaatttggggaggctgatgaccccaggagcctagaggaaaaccagacgcgccttgtctcctgctggaccatcgttcgcgcgagctggatgtcattttcagtggaaaaagagctagcacccttttgaagtgatgccaaccatcaattttgacactttttttacacatgtgaaatggttaagagggagactcttaagcatctggattttcagtattactcttgcgttccttctatcttgagcgtcttcaagccctattaaagtatcgtaccctgaataaatacggtggtattcccacaagaagggcggcattctgtttggagtttgtgtgtgactttgacgactgagtgtgccaagcacatctgccctgcgtgggctcggacgcctgccttgccccaggttaagtgtttnnnnnnnnnnnnnnnnnnnnnnnnnnnnnnnnnnnnnnnnnnnnnnnnnnnnnnnnnnnnnnnnnnnnnnnnnnnnnnnnnnnnnnnnnnnnnnnnnnnnnnnnnnnnnnnnnnnnnnnnnnnnnnnnnnnnnnnnnnnnnnnnnnnnnnnnnnnnnnnnnnnnnnnnnnnnnnnnnnnnnnnnnnnnnnnnnnnnnnnnnnnnnnnnnnnnnnnnnnnnnnnnnnnnnnnnnnnnnnnnnnnnnnnnnnnnnnnnnnnnnnnnnnnnnnnnnnnnnnnnnnnnnnnnnnnnnnnnnnnnnnnnnnnnnnnnnnnnnnnnnnnnnnnnnnnnnnnnnnnnnnnnnnnnnnnnnnnnnnnnnnnnnnnnnnnnnnnnnnnnnnnnnnnnnnnnnnnnnnnnnnnnnnnnnnnnnnnnnnnnnnnnnnnnnnnnnnnnnnnnnnnnnnnnnnnnnnnnnnnnnnnnnnnnnnnnnnnnnnnnnnnnnnnnnnnnnnnnnnnnnnnnnnnnnnnnnnnnnnnnnnnnnnnnnnnnnnnnnnnnnnnnnnnnnnnnnnnnnnnnnnnnnnnnnnnnnnnnnnnnnnnnnnnnnnnnnnnnnnnnnnnnnnnnnnnnnnnnnnnnnnnnnnnnnnnnnnnnnnnnnnnnnnnnnnnnnnnnnnnnnnnnnnnnnnnnnnnnnnnnnnnnnnnnnnnnnnnnnnnnnnnnnnnnnnnnnnnnnnnnnnnnnnnnnnnnnnnnnnnnnnnnnnnnnnnnnnnnnnnnnnnnnnnnnnnnnnnnnnnnnnnnnnnnnnnnnnnnnnnnnnnnnnnnnnnnnnnnnnnnnnnnnnnnnnnnnnnnnnnnnnnnnnnnnnnnnnnnnnnnnnnnnnnnnnnnnnnnnnnnnnnnnnnnnnnnnnnnnnnnnnnnnnnnnnnnnnnnnnnnnnnnnnnnnnnnnnnnnnnnnnnnnnnnnnnnnnnnnnnnnnnnnnnnnnnnnnnnnnnnnnnnnnnnnnnnnnnnnnnnnnnnnnnnnnnnnnnnnnnnnnnnnnnnnnnnnnnnnnnnnnnnnnnnnnnnnnnnnnnnnnnnnnnnnnnnnnnnnnnnnnnnnnnnnnnnnnnnnnnnnnnnnnnnnnnnnnnnnnnnnnnnnnnnnnnnnnnnnnnnnnnnnnnnnnnnnnnnnnnnnnnnnnnnnnnnnnnnnnnnnnnnnnnnnnnnnnnnnnnnnnnnnnnnnnnnnnnnnnnnnnnnnnnnnnnnnnnnnnnnnnnnnnnnnnnnnnnnnnnnnnnnnnnnnnnnnnnnnnnnnnnnnnnnnnnnnnnnnnnnnnnnnnnnnnnnnnnnnnnnnnnnnnnnnnnnnnnnnnnnnnnnnnnnnnnnnnnnnnnnnnnnnnnnnnnnnnnnnnnnnnnnnnnnnnnnnnnnnnnnnnnnnnnnnnnnnnnnnnnnnnnnnnnnnnnnnnnnnnnnnnnnnnnnnnnnnnnnnnnnnnnnnnnnnnnnnnnnnnnnnnnnnnnnnnnnnnnnnnnnnnnnnnnnnnnnnnnnnnnnnnnnnnnnnnnnnnnnnnnnnnnnnnnnnnnnnnnnnnnnnnnnnnnnnnnnnnnnnnnnnnnnnnnnnnncacttgtgtctccagcctgcgcggctcccgcggccgctgcgccctttgttgagaggtagactttgctgaaacggggacgggatcccgagatcgggcgctgcctgggtccagtggcttccctcctctcccgaagaaagggctctggaggtctttgaacctccagggaacgcccccattttatagggatgggtactgtggggaacagcgatcccgacgaggtgggtgttaggctggggggagccccgacaaaaatgttattaacttaagttggagggacacttgtgtgaaattggatggctggtaagatggcggttcccagttgtttccaaggtcttgtgcatttgtgttggaaagggtaaagttttcaaggtggtatttgttgggagtcgaggacaggggttccatacgtacttggggcgagctctcaaggaggtgggcatttaaaatttgagctttgttttggagtgaagccggtgactgtacgttagccttgctgagcgccctttctctctccactctcacccctccttttttcttcttttctctcgaagacactacaactttcccctttgctgtgggatgagctgagacttaggtccattgcattttatagattttgctaaatgtcagaataggtcatgaagtaaggggatggatgcttcggagaaggagcactaacgcgttgattgcttatgtttacgtagtcatttggacttgacagcgctggagcatgatcgtttccccagagctttacagttaataattggaaataaacaaggagagagactttgatcattcccaattgcaataaaaggatttagtgggcttagtggtcacggttcaatatctgaaagagaattgagcattaaccccttcgctttaaagtaggcaaaattccgggcatatttaccctaatgcagatgtgtggtggcagttcaagctatttttataggaactcccccaacctttagggagacgttgtaaaacgtagtaaagacttgatactagagattgtaaattgttgaccacatgagtaaaaccaagttctgagactatgtacatttgggtcctaagtacactagggagataaaggagatttaatcaagaggttgatttttctgtaaaattattattatatgatgtgtttataatctacagtaaattgtatttatttccatgtcttctatgaaagggaaataatttacaataatctatgagggcaaattatactcttgtaataatatctttaaaactatgtaaaagattgtttatgcatgtgtagacactcaaatataatcacatacaaacttttgcaaggcatgtaagcatttggatatatttgatgtccagtctaccactaagctcatgagggtatgttaagtgttcaagtaggcaaagttctccccatcagtcaagtcgcccccaagtttacccacgctttcctttgagcagtgagccccaagtgggattatagagatcatttgcatttcttaggttgcagtgatcaagctgattgtttatcatcagagcttgcttctgttttccttcatattgacattactgtccttaggcctccaactaaaaactgacagctccaactgactaagctgtagcttgactattgagtattttcagtgttttatgcttgttgcatttttatgatttatagggagtttctatggtgcaagaggttgtttcttaagtctgaccaagcattctagaaagtctccatgaggttgtcagtactgtccaataggataaaagaatgaagaattgatatttgtatcaataacaaagtaagaattgattagcattatgaatggttgtaggaatagggccagattatttttatttgagggaggacagttgtgtgaattccaatttaaagtgaatttgagagactttgatcaagttcatgtgactgaaatgttcaaagagaactaactagtggtcaccttctattgaggtttgactgctcttttgggttagtgtttgcaattttataatagaatgtaacatggagaggaggaggcaagatagagagagccctttggtgggaacttgatgatgtgtgagtattggatatggtttctttcatatgcagagcatcagcctcactctttttaggaaagagcctgtggtttcacaagagagttgcctttaatcactaagtatggttgaatttacagcttgctccttttgagagtcataatttcatttactccttctcagcctgctttccttggattgatgctacttgttgacagaattccgaacaagtaatccggagcagctctgattgaagtcactagtttccccttcagtcactttcagagaggcttggtttgggtttggaccatctttagtacccattcctgttaattgcagccattggggcatgctggttggtagttccctcttgtgtattaaattttccttagaataaatctcccaggtgcatcttattgcgaattatgcaaattcctagattttgcttacagcaactttggggcttaacttttgtcaggtgtagaaggtcagcctgggtttagattctgtgaggaataaaagggacatcccacagctacatcacctgaggtactttctggtgtggcattgctgacaggtctcaactgtgagtttctaaaatgtatctgctgggattatcctttcatcttgtgatactgtatgggagttaggtgagaaaagacatttgcccttccccccatctttactctgcatttagttttgggcatgggctggtctcatggctctttgtaccttgttactataccacccacaaaagtagtttttcttgcctctagcatagtttattcaaatattcagttcagtattcagcccttccaaaaactttccatggctcatccaatctactggaggacttattagagaagggagccttagaagttcagttcaataaacgtctctgcaactccagtcttgctgggcaggggctaagtgtacagttggcaattctcaaaagatctctaagtaaaatttctgacatcgcgattgataacaggacagtcagaaaaaggcaagatgagaaagtaattcttccctcccaatggtcatgaaagagatccggagagtgcctggaatggccggtgcactctttttggggttgggactgaggtggcggtcacgcgaggatcggcaccctgcttccctgccccgcccctcccctcccctcccctcccccgcgtccgccaccccgcacgcccgcagaggctgggctcggccagctcagcgcagagttgcagaggtggccggatgccaagtgtaagtgtaagttgctatggaaaccccaacggaggcgagttccgaatccggaacaagacctagcccggggcacttcgggatccgcccctcacatccccgctcgtgtccgcggtgcccaggcctcagccgaggcccacgaggtgcttctttcctccctacccagtccggaaatgccggggatgcaggaggctcactgagcgctttccctttgtggggcctgagccctgccaggttctggttgcttgagccgtcgaaacaagaatcacgaagtttttgactagagtgcaggaaattccacagtaaattcggagacttagatcaatagtggctactgaatatctgtggcggcggcctcgtggtagccgcagcagagctgcgtggtgtctgcagagctggaggacagctgaagagagagagagcagaatctactcagttctcagccccagcccccagccctttttatctcgctccaggaatgacccgaaaggccagaagtaaatttagttggatccttttacaccatttaacagtggaggttattctgatctcattagtaaattccttttgtggaaaacgtttagagaatccagctgtccagtgttaaatgagttttataaaccgctcagcattcagggtatacagttacttggagttgtggagataactcaattctcgttttttaattatagccaatacttttttgtgtcttgcaggatcttttatcaagcagaaatgcatcgaacaaccagaatcaagatcactgagctaaatccccacttaatgtgtgtcctgtgtggagggtacttcattgatgccactaccataatagaatgtctacattcctgtaagtacacagtgttcgccttcttgggtctgtgcatttcacagctcatccattaaaaccaacaccatttccacattccttgaaaatgttagttcataactgtgaggtttactttcttttatatgtagtgatttgttacagttaggcagtatgtagttttcaagttattaatcggtttcacttttctactttgagaaaacctagtcatttcccatccttgaattttcagttctgatacaattaacctttgaacctttactttctaaactcacaaaacctttttatgttcctatttctagtctgtaaaacatgtattgtacgttacttggagaccagcaagtattgtcctatttgtgatgtccaggttcacaaaaccagaccactcctgaacataaggtaggaagtgctgttgtccctggtgggaagtgctgctagcattcctggttttgctttgcaggacgtttatttctgatatgtgtgctttatagggggtagaactttaatttcttgttattttaattaccctgtttagacaaagtttggttttgttcaagtatttaaaaggtgtctgtcttttaaaactgagttagtttcccttttttgtgcataactttattgacttaataacaggcaagaagagatttttttccccaacatttccttattctttattcttgctagtgagagaattctctgttacatgaaaggcctacctctctttactcttggatgtgaagagttaattactgcagggcatctgcagggtggagaacgaggcagagctctcctctctcctcacaggacactcttacactccaccacaacacctcatcactgtgcctcaacaccagcatgcctacccaaaccttagaacagttctaggtttgccatattaactgtttcttactttttcaggtcagataaaactcttcaagatattgtatacaaattagtcccagggcttttcaaaagtgagtaaatggattcagtgaagtttttaaagtgttggttttacctattatagcaaattctacatttcccttctcacccatttcagatgagatgaagagaagaagagatttttatgcagctcacccgtcagctgatggtaaattttggggggcaaaagacattttatgtcaggaagaaaattatttagtaatttaaattattttgtttaaattctcccttctattctcttataggtaaaatattcagtttctaaaattgactttcaaactgtctttatagctgccaatggctccaatgaagaccgaggagaagttgcagatgaggagaagaggattataactgatgatgagataataagcttgtctattgagttctttgatcagagcaggtgagtgctcctagaaagctactgtgtgctaatgtagttgctaggtactttgtatcactttgtatttgtattttctctctcttagattggatcggaaagtaaataaagagaagcctaaggaagaggtatgttctacttgggagtttaagttgtcctttagaatattaaggagttatatgatattattaaatggccaagttgtgttaggagtttgttgagttagtatttttaatagtaagttcaaaatgtaactagttgagagttgttgcatattggtgtgactattagtatctttttatcatatttaggccattcagacttttttgttttacctgaaagttaggaattggaagaaaattacttttgtaaatgtgcttctaggtgaatgataaaaggtacttacgatgcccagcagcaatgactgtgatgcacttgagaaagtttctcaggagtaaaatggacatacccaatactttccaggtacctacctcatgcattttgtgcagattttcaaatttaaatgttttttttttttcattctggaccttaagaaattttaaatttggtagcaaagtttaagatacctcttaaaatggttggtgaagatgctttttaatcgttttgggttagatcttgacgacagaaacatacatatttatctttgttcttttgccactgaatacttgaaatatatttcaatagattgacgtcatgtatgaagaggaacctttaaaggattactacacgctaatggacattgcctacatttatacctggagaagagtaagtagctcgttacctggaggctatgttggcccagtacatataaagaattgagtggtttttctttttctttttaatgttgtagaatggcccactacctttgaaatacagagttcggccaacttgcaaaagaatgaagatgagtcaccagagggatggactgacgaatgctggagagctggaaagtgactctgggagtgacaaggccaacagcccagccggaggtgttccctccacctcttcctgtttgcccagtcccagcactccagtgcagtctcctcacccacagttccctcacatttccagtaccatgaatggaaccagcaacagccccagtgctaaccaccaatcttcctttgccagtagacctcgaaaatcatcactaaatgggtcatcagcaacttcatctggttaggactgttaaggaaaagatttttcaaccccctgatttagataccttcattcattacagctttatagatgcttaatacatgtgactgtcgtccagtttgcttccttttgtagtgactttaaatttggccataaatgatggactagatgtgatacttcatatggatgttaagtggaaagattgattctttctctaaagaattggattctgagaaggattctgtgttaggaaagatgtgaaatgatttctgtgaccactgtttggatctggaaatgttctacagtgggtagacattgggccatagtttgttaatctcaattaatgcctacattacattctctttgattgttcttgttattatgctgttctgtgaacctgtagaaaacaagtgctttttatcttgaaattcagcaaatggaaagaataagcatagaatactgcattctgtgcagccacgtcactgtgaataacaatttcttgcatatttagccattttaattcctgtttgatttttacttctctgttgctacacaaaatgatcaaaggaaacttgttttacaatctgtatgcctaaaaagcgggtactaccgtttattttactgacttgttgaaatgattcacttttgtaagaatcagatggcattatgcttgttgtacaatgccatattggtatatgacataacaggaaacagtattgtatgatatatttataaatactatgaaaatattgtgtttcatgcattcaaaaacagttgtaaacttctccaaatgggttcgacctttgcggatatcacagtgcacccaatgctgaggcttaccaccagcacagaatttgttttaatgttgataaccagtttcaaattctttttcacttagaagcaaatggcagatcttcatagttctggcttttctccaataaaactttcaaaattaatattgcagtaatgaaaaattttaaccaaggcaaatatagtgttttaattttccattggttaaaatagaattaatgtttttaaattctgtttatcagtggaattctaaaatagattttaaagtcaaccagctaattgctgaagtaaagcattttatctacaattttattttagtgtatgtggcacaagtgtaatttcaaatttaagagttgttttcatagttaaaggaatctgccttcactgtaacgtctggaaacagaaacaatttgttatgatttctacagggatttttaatagagcaaacatgttgaatttaaaatatgaatgacccctccaagtctcagttttgctttggtcgaacttagcgtgtgtttatcagccatcagttatttgtgaggatgttaattccgtatgaatattgtttcatgtttgtatgggaaactgtagctaagcatttcattgtctgcagtctgcagaagaagcacaattgtattgctttgtcttgcttgtagccattaaatcattacttttacacacattgctgttaacttctgctttctttaaagatttagtaaatgatgttttatgaagccacaagatacatatatttttattttgacctaaatttgtacagtcccattgtgtgtgtgtcatttctaattatagatgtaaaattaaatttcatttttaattggaaaattcaataaaaagatattcatttagaaaatactatgctctttaattaaaattttgctatgaaaagcacagtgtgcagaagttttgggaaccctgtagtggattgtaagagctaaaacctaaggaaaatactttgttgtcttcaaatgatgttgttagtaaatgctttgttgtatattgctcgaaagcccaatgaaagaagtatctgcttatttacaatctttgaagcaaaagttaccaatgtttgccaattttggtgaatttaactcatttttctagacttttctcgaggttttcatggtgttacctaagacaaaagacatctcaccctctatgatggacttacttctgagagtgcgtttgaggcacttatggcttactaagcagtgtgtcaccatacttgaaaacacttccatttattgtatctgggatgaggctttttacccttactcaatttgaaaattgcttaagcttaaatgatatttcagtcaaaatttgtcttttaataaaacaacagaaagatgcatcgtggtttgcttcttaaatgacgagtcattgctgctcttaccgttaagatttaaaacctttcccaactttttaaaatcttcaccttaagaaagccccaatggaatctcctttgtaatttaccacattagggtacgtgaaaagttggctttaaagtttgactttcactcctaaaggtattctagcatcctagaatacaaagataataaccaagtagtctacagaaaatgcctaaattgatctcacagatactagtttaaaagtagaaagagaaatggggcccactgctgttgtgtaaatagtgatctatcttgctttacacatgcataatactttacaagtacttgcacctcctaaattgccggccgttaattgccctgagtagaaaggggttgcccttcagttgacttaactagttaagcacattgcctcatttccatatgcgcatgttcagatgttagggtctctggaagtaaagtacaacagaagcaaagctttccttcatcttttcctgttttcccaagcgttggaattaagctcctggtgacttctttcattgcactgtactcgttgtgtgggcccatcaagaacaaattctcttctgaaacctttaaatgcccacaggaaatactccttgcaaaggtcagcaagaagggaagacaccgtcttgtctgtgtggtttatgacacaggtttagggggaataggattcacctggcctgtggcaccagggacccagtcaacacccccaagaagttgttttcgctttgtgttcaaaagatttaagacacttttcctccccttgctccaggaatgacagaatgacagaagttcttatagtgcttacatgagagagactgaaacaacaaaaggccgtagtcaaattgtacttaaactagctttccatcatgttagaacccttctcaaaaagtgcatatcccttaatacacccaatgaagtggaacttggaccccctgctctaatttacagctcttagatatatagcacttaaggaagttatcttcttgtataaacaggtggttgtttccaaaatctgtcgtcccccccccatcccgacatctgcaatagtggcacccccacccccaatcccttgtttccaagtgtgaccaaggatttatgtaaggaagagaaacaagttatcacacattccagcctccagtaagcctggtgagaaacagtccggaggagtccttgaaccagagaatcacacagcaaatcgcaagatcacccatctttgattatgaaagtctctgaaaaatgtttacacagtcgagtgtttcctgcttccgcagttaatttttaaaactttttttttcttttggttcctaaaacggatttcctttatttgcatcagtttctttttcttagtgtgtaatttctggaggtatttgtcacacgaagaacttcactaaaactgccttcaccaagacagaaatcatctatcactccaggatccttatgggatttctgaaaacgttcaaagtggaaagctcatcttggcatctcatttagcctcttgaataaatagtaaaacacccaataaaaacttatgaattaaattcccttctctctgacccttgccaaaaacaaaacaaaacaaaacaaaacaaacaaacaaaaaaacaaccaacaatctacttccagagattatcagaagaacttttttaaaaagctgctcttcccttggttacctacatgtcaataaaaaacatccctggttggtattaacttggggccatgatgaaacccaaactacgagctccaactctgttctaaatcaggtagaagccaagctgacaggagtgacttgacttagaaggctatggatcttggtatgggggaaacacgtcgaaaattgggactagcaacagagattgctgcagtgtttcttccgaaggacccagaaaccgggggagatattccaataaaagaaagtagtagcggaaaataaagccagggaccagaatgattgtcacacctgtctcctccacccccccccccccaccaaaaaaaaaaaagtctccagttaaaggatggaggggagcgggatgactgtggaagcagcttcgcttggacggcagcgccgcgttccacgtcagggggaaggtttgaggtagtgtccctctgtccgtctgagctctagctctccccgcacgcacgagagagcgagcgcaggccgcgaggacccgggaggccattttgcgcgtgcgccgctcatctcgcaccgcccccagctcggcggacgcggctcccgccaaatttgaatgcgagctcgtcaggccgggccgggctcccgaggccgacggaccctgcgggcttgcggaaccggagctccgggggatgggcggccagagccgcggggctgcagcctcgaaacgcgaccttctctctgaagccgtccacgtccaagggccgcgcggccgttagggcgcggaccggagtcccgcgtggacccctttaccccgaggctgcaagacagtcacccctttgtcccctcctctctgcacgctttagttgcaaagccacttccccttcaccaaggtggtgtctttggagcttggagtcccgttgttgttggacggatttgaagcaaagttactaacagactggaagctgcccaggtcccccgcaggtgaccaggaccaggagtatggcgtgctcactttgagcgtgtccatctcctgggtggacgccctgatggtggagcgggcgaggacgacacaggcggggcacctcgggctctgggagaagggtcatccaaggggacacccaatctctacgtaggtcgtggagccggcgagaggggcgcacggatgcgagggcgcacgggcgcaagcgcttctctgatccgggagaagcgaaagtggcctgccggcaggcaaggcaaacaaaccgatccgctaatcagtgcagcaggctgcagaaaccgccatttggggacggatttcggcgagtctgtagcacgctgtgtgggaagtcataactgactcgcccaagaacacccccacacaccccaacacacaccattttagcgagtaaaagttctccccctggctttcctcttctggggcctgggagggacctttcctcggacctttgtacccaggggccggtgtgacagagaatggagcccagctgtcctctgcccactactgaaggtcttatttcactgttgctgaggagcatgtctaggtttcccgcccgtgatccccaccccagtctcccacctcacacnnnnnnnnnnnnnnnnnnnnnnnnnnnnnnnnnnnnnnnnnnnnnnnnnnnnnnnnnnnnnnnnnnnnnnnnnnnnnnnnnnnnnnnnnnnnnnnnnnnnnnnnnnnnnnnnnnnnnnnnnnnnnnnnnnnnnnnnnnnnnnnnnnnnnnnnnnnnnnnnnnnnnnnnnnnnnnnnnnnnnnnnnnnnnnnnnnnnnnnnnnnnnnnnnnnnnnnnnnnnnnnnnnnnnnnnnnnnnnnnnnnnnnnnnnnnnnnnnnnnnnnnnnnnnnnnnnnnnnnnnnnnnnnnnnnnnnnnnnnnnnnnnnnnnnnnnnnnnnnnnnnnnnnnnnnnnnnnnnnnnnnnnnnnnnnnnnnnnnnnnnnnnnnnnnnnnnnnnnnnnnnnnnnnnnnnnnnnnnnnnnnnnnnnnnnnnnnnnnnnnnnnnnnnnnnnnnnnnnnnnnnnnnnnnnnnnnnnnnnnnnnnnnnnnnnnnnnnnnnnnnnnnnnnnnnnnnnnnnnnnnnnnnnnnnnnnnnnnnnnnnnnnnnnnnnnnnnnnnnnnnnnnnnnnnnnnnnnnnnnnnnnnnnnnnnnnnnnnnnnnnnnnnnnnnnnnnnnnnnnnnnnnnnnnnnnnnnnnnnnnnnnnnnnnnnnnnnnnnnnnnnnnnnnnnnnnnnnnnnnnnnnnnnnnnnnnnnnnnnnnnnnnnnnnnnnnnnnnnnnnnnnnnnnnnnnnnnnnnnnnnnnnnnnnnnnnnnnnnnnnnnnnnnnnnnnnnnnnnnnnnnnnnnnnnnnnnnnnnnnnnnnnnnnnnnnnnnnnnnnnnnnnnnnnnnnnnnnnnnnnnnnnnnnnnnnnnnnnnnnnnnnnnnnnnnnnnnnnnnnnnnnnnnnnnnnnnnnnnnnnnnnnnnnnnnnnnnnnnnnnnnnnnnnnnnnnnnnnnnnnnnnnnnnnnnnnnnnnnnnnnnnnnnnnnnnnnnnnnnnnnnnnnnnnnnnnnnnnnnnnnnnnnnnnnnnnnnnnnnnnnnnnnnnnnnnnnnnnnnnnnnnnnnnnnnnnnnnnnnnnnnnnnnnnnnnnnnnnnnnnnnnnnnnnnnnnnnnnnnnnnnnnnnnnnnnnnnnnnnnnnnnnnnnnnnnnnnnnnnnnnnnnnnnnnnnnnnnnnnnnnnnnnnnnnnnnnnnnnnnnnnnnnnnnnnnnnnnnnnnnnnnnnnnnnnnnnnnnnnnnnnnnnnnnnnnnnnnnnnnnnnnnnnnnnnnnnnnnnnnnnnnnnnnnnnnnnnnnnnnnnnnnnnnnnnnnnnnnnnnnnnnnnnnnnnnnnnnnnnnnnnnnnnnnnnnnnnnnnnnnnnnnnnnnnnnnnnnnnnnnnnnnnnnnnnnnnnnnnnnnnnnnnnnnnnnnnnnnnnnnnnnnnnnnnnnnnnnnnnnnnnnnnnnnnnnnnnnnnnnnnnnnnnnnnnnnnnnnnnnnnnnnnnnnnnnnnnnnnnnnnnnnnnnnnnnnnnnnnnnnnnnnnnnnnnnnnnnnnnnnnnnnnnnnnnnnnnnnnnnnnnnnnnnnnnnnnnnnnnnnnnnnnnnnnnnnnnnnnnnnnnnnnnnnnnnnnnnnnnnnnnnnnnnnnnnnnnnnnnnnnnnnnnnnnnnnnnnnnnnnnnnnnnnnnnnnnnnnnnnnnnnnnnnnnnnnnnnnnnnnnnnnnnnnnnnnnnnnnnnnnnnnnnnnnnnnnnnnnnnnnnnnnnnnnnnnnnnnnnnnnnnnnnnnnnnnnnnnnnnnnnnnnnnnnnnnnnnnnnnnnnnnnnnnnnnnnnnnnnnnnnnnnnnnnnnnnnnnnnnnnnnnnnnnnnnnnnnnnnnnnnnnnnnnnnnnnnnnnnnnnnnnnnnnnnnnnnnnnnnnnnnnnnnnnnnnnnnnnnnnnnnnnnnnnnnnnnnnnnnnnnnnnnnnnnnnnnnnnnnnnnnnnnnnnnnnnnnnnnnnnnnnnnnnnnnnnnnnnnnnnnnnnnnnnnnnnnnnnnnnnnnnnnnnnnnnnnnnnnnnnnnnnnnnnnnnnnnnnnnnnnnnnnnnnnnnnnnnnnnnnnnnnnnnnnnnnnnnnnnnnnnnnnnnnnnnnnnnnnnnnnnnnnnnnnnnnnnnnnnnnnnnnnnnnnnnnnnnnnnnnnnnnnnnnnnnnnnnnnnnnnnnnnnnnnnnnnnnnnnnnnnnnnnnnnnnnnnnnnnnnnnnnnnnnnnnnnnnnnnnnnnnnnnnnnnnnnnnnnnnnnnnnnnnnnnnnnnnnnnnnnnnnnnnnnnnnnnnnnnnnnnnnnnnnnnnnnnnnnnnnnnnnnnnnnnnnnnnnnnnnnnnnnnnnnnnnnnnnnnnnnnnnnnnnnnnnnnnnnnnnnnnnnnnnnnnnnnnnnnnnnnnnnnnnnnnnnnnnnnnnnnnnnnnnnnnnnnnnnnnnnnnnnnnnnnnnnnnnnnnnnnnnnnnnnnnnnnnnnnnnnnnnnnnnnnnnnnnnnnnnnnnnnnnnnnnnnnnnnnnnnnnnnnnnnnnnnnnnnnnnnnnnnnnnnnnnnnnnnnnnnnnnnnnnnnnnnnnnnnnnnnnnnnnnnnnnnnnnnnnnnnnnnnnnnnnnnnnnnnnnnnnnnnnnnnnnnnnnnnnnnnnnnnnnnnnnnnnnnnnnnnnnnnnnnnnnnnnnnnnnnnnnnnnnnnnnnnnnnnnnnnnnnnnnnnnnnnnnnnnnnnnnnnnnnnnnnnnnnnnnnnnnnnnnnnnnnnnnnnnnnnnnnnnnnnnnnnnnnnnnnnnnnnnnnnnnnnnnnnnnnnnnnnnnnnnnnnnnnnnnnnnnnnnnnnnnnnnnnnnnnnnnnnnnnnnnnnnnnnnnnnnnnnnnnnnnnnnnnnnnnnnnnnnnnnnnnnnnnnnnnnnnnnnnnnnnnnnnnnnnnnnnnnnnnnnnnnnnnnnnnnnnnnnnnnnnnnnnnnnnnnnnnnnnnnnnnnnnnnnnnnnnnnnnnnnnnnnnnnnnnnnnnnnnnnnnnnnnnnnnnnnnnnnnnnnnnnnnnnnnnnnnnnnnnnnnnnnnnnnnnnnnnnnnnnnnnnnnnnnnnnnnnnnnnnnnnnnnnnnnnnnnnnnnnnnnnnnnnnnnnnnnnnnnnnnnnnnnnnnnnnnnnnnnnnnnnnnnnnnnnnnnnnnnnnnnnnnnnnnnnnnnnnnnnnnnnnnnnnnnnnnnnnnnnnnnnnnnnnnnnnnnnnnnnnnnnnnnnnnnnnnnnnnnnnnnnnnnnnnnnnnnnnnnnnnnnnnnnnnnnnnnnnnnnnnnnnnnnnnnnnnnnnnnnnnnnnnnnnnnnnnnnnnnnnnnnnnnnnnnnnnnnnnnnnnnnnnnnnnnnnnnnnnnnnnnnnnnnnnnnnnnnnnnnnnnnnnnnnnnnnnnnnnnnnnnnnnnnnnnnnnnnnnnnnnnnnnnnnnnnnnnnnnnnnnnnnnnnnnnnnnnnnnnnnnnnnnnnnnnnnnnnnnnnnnnnnnnnnnnnnnnnnnnnnnnnnnnnnnnnnnnnnnnnnnnnnnnnnnnnnnnnnnnnnnnnnnnnnnnnnnnnnnnnnnnnnnnnnnnnnnnnnnnnnnnnnnnnnnnnnnnnnnnnnnnnnnnnnnnnnnnnnnnnnnnnnnnnnnnnnnnnnnnnnnnnnnnnnnnnnnnnnnnnnnnnnnnnnnnnnnnnnnnnnnnnnnnnnnnnnnnnnnnnnnnnnnnnnnnnnnnnnnnnnnnnnnnnnnnnnnnnnnnnnnnnnnnnnnnnnnnnnnnnnnnnnnnnnnnnnnnnnnnnnnnnnnnnnnnnnnnnnnnnnnnnnnnnnnnnnnnnnnnnnnnnnnnnnnnnnnnnnnnnnnnnnnnnnnnnnnnnnnnnnnnnnnnnnnnnnnnnnnnnnnnnnnnnnnnnnnnnnnnnnnnnnnnnnnnnnnnnnnnnnnnnnnnnnnnnnnnnnnnnnnnnnnnnnnnnnnnnnnnnnnnnnnnnnnnnnnnnnnnnnnnnnnnnnnnnnnnnnnnnnnnnnnnnnnnnnnnnnnnnnnnnnnnnnnnnnnnnnnnnnnnnnnnnnnnnnnnnnnnnnnnnnnnnnnnnnnnnnnnnnnnnnnnnnnnnnnnnnnnnnnnnnnnnnnnnnnnnnnnnnnnnnnnnnnnnnnnnnnnnnnnnnnnnnnnnnnnnnnnnnnnnnnnnnnnnnnnnnnnnnnnnnnnnnnnnnnnnnnnnnnnnnnnnnnnnnnnnnnnnnnnnnnnnnnnnnnnnnnnnnnnnnnnnnnnnnnnnnnnnnnnnnnnnnnnnnnnnnnnnnnnnnnnnnnnnnnnnnnnnnnnnnnnnnnnnnnnnnnnnnnnnnnnnnnnnnnnnnnnnnnnnnnnnnnnnnnnnnnnnnnnnnnnnnnnnnnnnnnnnnnnnnnnnnnnnnnnnnnn

SEQ ID NO: 98 - DNA, 2959 bp, Mus musculus
cccccacgcgagtctgaaatcataatcgtagtattaaaggcagagatcgggagagacaatggggaggttggcgagggagccccgcgcaggcttagcaacacctcccggccccgcagaataatacggctcggcccctctgcgcgccctcccccgagcgcggccgggaggcggcggctgcgccgaggaggaggagaggccccgaggaggcggcggcggaggccgcgcggaggcggaggaggccgcgcgggaggaggaggccgcagcgcgcgagcaggaggccggcgggggagcggcatgagcggagcgcggcggccgtggctgctctcggccgcgctcggtgcccattgacagcggcggcggcggctcgctccaagatggccgcttggctcgcattcattttatgctgaacgacttttaactttcattgtcttttccgcccgctcagatcgcctcgcgccggccgctctttccgggatcttttatcaagcagaaatgcatcgaacaaccagaatcaagatcactgagctaaatccccacttaatgtgtgtcctgtgtggagggtacttcattgatgccactaccataatagaatgtctacattccttctgtaaaacatgtattgtacgttacttggagaccagcaagtattgtcctatttgtgatgtccaggttcacaaaaccagaccactcctgaacataaggtcagataaaactcttcaagatattgtatacaaattagtcccagggcttttcaaaaatgagatgaagagaagaagagatttttatgcagctcacccgtcagctgatgctgccaatggctccaatgaagaccgaggagaagttgcagatgaggagaagaggattataactgatgatgagataataagcttgtctattgagttctttgatcagagcagattggatcggaaagtaaataaagagaagcctaaggaagaggtgaatgataaaaggtacttacgatgcccagcagcaatgactgtgatgcacttgagaaagtttctcaggagtaaaatggacatacccaatactttccagattgacgtcatgtatgaagaggaacctttaaaggattactacacgctaatggacattgcctacatttatacctggagaagaaatggcccactacctttgaaatacagagttcggccaacttgcaaaagaatgaagatgagtcaccagagggatggactgacgaatgctggagagctggaaagtgactctgggagtgacaaggccaacagcccagccggaggtgttccctccacctcttcctgtttgcccagtcccagcactccagtgcagtctcctcacccacagttccctcacatttccagtaccatgaatggaaccagcaacagccccagtgctaaccaccaatcttcctttgccagtagacctcgaaaatcatcactaaatgggtcatcagcaacttcatctggttaggactgttaaggaaaagatttttcaaccccctgatttagttaccttcattcattacagctttatagatgcttaatacatgtgactgtcgtccagtttgcttccttttgtagtgactttaaatttggccataaatgatggactagatgtgatacttcatatggatgttaagtggaaagattgattctttctctaaagaattggattctgagaaggattctgtgttaggaaagatgtgaaatgatttctgtgaccactgtttggatctggaaatgttctacagtgggtagacattgggccatagtttgttaatctcaattaatgcctacattacattctctttgattgttcttgttattatgctgttctgtgaacctgtagaaaacaagtgctttttatcttgaaattcagcaaatggaaagaataagcatagaatactgcattctgtgcagccacgtcactgtgaataacaatttcttgcatatttagccattttaattcctgtttgatttttacttctctgttgctacacaaaatgatcaaaggaaacttgttttacaatctgtatgcctaaaaagcgggtactaccgtttattttactgacttgttgaaatgattcacttttgtaagaatcagatggcattatgcttgttgtacaatgccatattggtatatgacataacaggaaacagtattgtatgatatatttataaatactatgaaaatattgtgtttcatgcattcaaaaacagttgtaaacttctccaaatgggttcgacctttgcggatatcacagtgcacccaatgctgaggcttaccaccagcacagaatttgttttaatgttgataaccagtttcaaattcttttccacttagaagcaaatggcagatcttcatagttctggcttttctccaataagactttcaaaattaatattgcagtaaagaaaaattttaaccaaggcaaatatagtgtttaattttccattggttaaaatagaattaatgtttttaaattctgtttatcagtggaattctaaaatagattttaaagtcaaccagctaattgctgaagtaaagcattttatctacaattttattttagtgtatgtggcacaagtgtaatttcaaatttaagagttgttttcatagttaaaggaatctgccttcactgtaacgtctggaaacagaaacaatttgttatgatttctacagggatttttaatagagcaaacatgttgaatttaaaatatgaatgacccctccaagtctcagttttgctttggtcgaacttagcgtgtgtttatcagccatcagttatttgtgaggatgttaattccgtatgaatattgtttcatgtttgtatgggaaactgtagctaagcatttcattgtctgcagtctgcagaagaagcacaattgtattgctttgtcttgcttgtagccattaaatcattacttttacacacaaaaaaaaaaaaaaaaaaaaaaaaaaa

SEQ ID NO: 99 - DNA, 750 bp, Mus musculus
atgcatcgaacaaccagaatcaagatcactgagctaaatccccacttaatgtgtgtcctgtgtggagggtacttcattgatgccactaccataatagaatgtctacattccttctgtaaaacatgtattgtacgttacttggagaccagcaagtattgtcctatttgtgatgtccaggttcacaaaaccagaccactcctgaacataaggtcagataaaactcttcaagatattgtatacaaattagtcccagggcttttcaaaaatgagatgaagagaagaagagatttttatgcagctcacccgtcagctgatgctgccaatggctccaatgaagaccgaggagaagttgcagatgaggagaagaggattataactgatgatgagataataagcttgtctattgagttctttgatcagagcagattggatcggaaagtaaataaagagaagcctaaggaagaggtgaatgataaaaggtacttacgatgcccagcagcaatgactgtgatgcacttgagaaagtttctcaggagtaaaatggacatacccaatcatttccagattgacgtcatgtatgaagaggaacctttaaaggattactacacgctaatggacattgcctacatttatacctggagaagaaatggcccactacctttgaaatacagagttcggccaacttgcaaaagaatgaagatgaagtcaccagagggatggactgacgaatgctggagagctggaaagtga

SEQ ID NO: 100 - DNA, 24873 bp, Homo sapiens
  misc_feature (177)..(258): "n" at positions 177 to 258  can be any base
  misc_feature (3886)..(5552): "n" at positions 3886 to 5552  can be any base
  misc_feature (9179)..(9198): "n" at positions 9179 to 9198  can be any base
caaaagcaaaatccagttgcctgagatcggagcttcccgcaggattcgcgcagagcgaggagcggggaggacgccgtttgcgggaggcgggggccgggatcccgacaccgtccgcagtctccccggggtctctcagggaaccgagctggtggccgtcctaggtaagcgccgaaccannnnnnnnnnnnnnnnnnnnnnnnnnnnnnnnnnnnnnnnnnnnnnnnnnnnnnnnnnnnnnnnnnnnnnnnnnnnnnnnnncgccgccgccagccgccccgagccgcgtgcgcgcgcggccgcatcagctgagcgcgcggcgcgtgtcacgtggtgtgcgtgtcgaaggtcacggcgcgctcacaatggagctctcggagtctgtgcagaaaggcttccagatgctggcggatccccgctccttcgactccaacgccttcacgcttctcctccgggcggcattccagagtctgctggacgcccaggcggacgaggccgtgttaggtaagccgctcggctcggctcggagctggatccgccggggtggaggggcgctcggagaagaggagccggcggagcgagaaggggaaagccccgggaagaggaagtctccgggctttgcccttcgctccggacggagtgttggggacgtggctctgccaggactcggagcagactctgagcattgttttggccccacttggcacctgcatagagccaactccacgttcctggcccggtttccctcccagtctctttgttcttttgtaaagccggtgttcaagtcttgtttgtggcctaaacatctaaggtgtttagccttgtctgaggctgcggctgttttgacagttggacttcatctggggagctccctgcaattcaagcttccagggctaggctagcaaaggtttaagggtctgtttccgaagtaattactaggtcagacagtgttgacatttgccaacttagagcatacctcaagttgctatgatcactccagcgctctagttcagcatgtttacacaggttctacgcctagaaccttaaactatgatgcacaatactttgttccgccccagttaccaggatgcgagtgtcttttaagcgatccggtcagtgactgcggaggtgcagtgtcagtatggattgaagacatattttaagaccgatcgcttttagatgattttcttaaatataaatatcccaacaattcaaatttttgttttttttctgtagtttcatgaactaaacacttgtacaaaaagtatgaaagtggaagttcttaaacgaaaatagtaaccaccacctgggttaatctcaaaaaaaaaatgactgtcaaaccctgaaagtactaatataattttgaaatttgtatcttatattctgaactcatgccctaccttctacccccttgatgtatttgttcatggagccggttaccctaaactcatcatttttaggatggaagtttattctaaaattgacacaatgtaaaatatttatcttgtttttcctttgaatttactccagtgttagaatgaccattgcattgttatattttctttgggggctataatattttttaatagtaaaaatattaaggcaaaataagttaattgaagctagtaatagtagagttcttgttgtgttctttttattgtttttcacttgatcttgttgctcatctcatttacttataattgactgtccttatagttgatgtttttaatcttgttaaagggtttttaaacccaaattaaaatatcctttttggaacatgactgtaaagaatttattatcataggcatcactggaagttaatttattttagatcatccagacttgaaacatatcgacccagtggttttaaaacattgtcatgcagcagctgcaacttacatactagaggcaggaaagcaccgagctgacaagtcaactctaaggtacaggatttatttaaatatccatttattttcaaatactaccttaatgatttcaatttcagttttaaaaatggagacagaactttggctttttttttctttcttctagcacttatctagaagactgtaaatttgacagagagcgaatagaactgttttgcacggaatatcaggttacttactttaaaatttttaattaacagtactatttttcttttactttgtttgtaaagatgtttttttttctttctttcttgctttcttttttctctccagaataataagaattccctagaaatcctactgggaaggtaggtactgtataaggtgtcaagctgaggcacttttcacttgcaggtatgaatggagagtgttggtgtgaaacaagatcttcgggatcttgacccaaagaaaaggagccaaagggcatgtcaagcaattgaagttaagctcatgtttttaaagatcgtttattgagatgattttgaaatgctcctttaccattcataatttaaaaataaagtttaacaatggtttaaattcagaatggattaaaatggagttgggggtggaaagtagagccattcttagtaaatataaataactgaaaagttcttctgaggagactatgtacgaagttatcattgcatctttcagtataggcagatctctccctcatataacggatgtttcttggcgcttggaatatcagataaaggtaaagtttaagaaacttctctagcgggggatttagggaacttcttaaaacctagagttaaaagctgttgcgtgtttgttgtgttattttagaccaatcaacttcataggatgtacagacctgcatatttggtgaccttaagtgtacaggtatttatagataagtcttatccaataatgaaatttataatttcattgatttaaataaacagcgtttcttgttgcgtgttttttttcctgccctagaacactgattccccatcctatccagagattagttttagttgcagcatggaacaattacaggtacagtattaggatctataaatattcctgtctttttataaatgtttacttgagagttatactcttgggaagttcaaaagaaaattaatctaaccatttgtcagcagataatgaagattggttaaggatttaatgggaaaggggcatcaaaagtagtattttaagataggcttcacttgaaattaagatgttattaatagagaattggtctgtatttgctgttcttgctgattgaaataaacttctgtagtgtttagtgtaaatttcttctattcatgatgagtttggtccaataagataaacaaaattaagagcatggctttgaaaatgtctttgctttcagaaattgaattaaactgtcaaaattggattttgaaactttttaaatgactttataaagggggaagtatacataacattctaaaactgtttatattgcccatttaagactgggaaaattcaaaactacatttattagtggatatgacaacgaatttatttcatagtttttaaaaaatgaagctcattactggaaatttaagtgaaattgaatttttcaaaggcatcttctgcagagtcgttttaatgtaactatgaatcaaactttcaactttcagaaaatgtgtatacagcataacctttgttagataacttgagaaaattcagatgtatctgggcggttaaggatccggttagaaatcatgtttcagtgtgagggcaaataaccgatttgaacatgaggtatttccgaggaaacgctttttttgcccgatagtagtttgtcaaaagttaaaatcttgttgaattttaaacttgtttggaaggtgtgtcctgattttttttcttgcatctttcttgagcttggatacttctttccatgttttatcctaaaaacgtggtattgtatacacgtcttttaggannnnnnnnnnnnnnnnnnnnnnnnnnnnnnnnnnnnnnnnnnnnnnnnnnnnnnnnnnnnnnnnnnnnnnnnnnnnnnnnnnnnnnnnnnnnnnnnnnnnnnnnnnnnnnnnnnnnnnnnnnnnnnnnnnnnnnnnnnnnnnnnnnnnnnnnnnnnnnnnnnnnnnnnnnnnnnnnnnnnnnnnnnnnnnnnnnnnnnnnnnnnnnnnnnnnnnnnnnnnnnnnnnnnnnnnnnnnnnnnnnnnnnnnnnnnnnnnnnnnnnnnnnnnnnnnnnnnnnnnnnnnnnnnnnnnnnnnnnnnnnnnnnnnnnnnnnnnnnnnnnnnnnnnnnnnnnnnnnnnnnnnnnnnnnnnnnnnnnnnnnnnnnnnnnnnnnnnnnnnnnnnnnnnnnnnnnnnnnnnnnnnnnnnnnnnnnnnnnnnnnnnnnnnnnnnnnnnnnnnnnnnnnnnnnnnnnnnnnnnnnnnnnnnnnnnnnnnnnnnnnnnnnnnnnnnnnnnnnnnnnnnnnnnnnnnnnnnnnnnnnnnnnnnnnnnnnnnnnnnnnnnnnnnnnnnnnnnnnnnnnnnnnnnnnnnnnnnnnnnnnnnnnnnnnnnnnnnnnnnnnnnnnnnnnnnnnnnnnnnnnnnnnnnnnnnnnnnnnnnnnnnnnnnnnnnnnnnnnnnnnnnnnnnnnnnnnnnnnnnnnnnnnnnnnnnnnnnnnnnnnnnnnnnnnnnnnnnnnnnnnnnnnnnnnnnnnnnnnnnnnnnnnnnnnnnnnnnnnnnnnnnnnnnnnnnnnnnnnnnnnnnnnnnnnnnnnnnnnnnnnnnnnnnnnnnnnnnnnnnnnnnnnnnnnnnnnnnnnnnnnnnnnnnnnnnnnnnnnnnnnnnnnnnnnnnnnnnnnnnnnnnnnnnnnnnnnnnnnnnnnnnnnnnnnnnnnnnnnnnnnnnnnnnnnnnnnnnnnnnnnnnnnnnnnnnnnnnnnnnnnnnnnnnnnnnnnnnnnnnnnnnnnnnnnnnnnnnnnnnnnnnnnnnnnnnnnnnnnnnnnnnnnnnnnnnnnnnnnnnnnnnnnnnnnnnnnnnnnnnnnnnnnnnnnnnnnnnnnnnnnnnnnnnnnnnnnnnnnnnnnnnnnnnnnnnnnnnnnnnnnnnnnnnnnnnnnnnnnnnnnnnnnnnnnnnnnnnnnnnnnnnnnnnnnnnnnnnnnnnnnnnnnnnnnnnnnnnnnnnnnnnnnnnnnnnnnnnnnnnnnnnnnnnnnnnnnnnnnnnnnnnnnnnnnnnnnnnnnnnnnnnnnnnnnnnnnnnnnnnnnnnnnnnnnnnnnnnnnnnnnnnnnnnnnnnnnnnnnnnnnnnnnnnnnnnnnnnnnnnnnnnnnnnnnnnnnnnnnnnnnnnnnnnnnnnnnnnnnnnnnnnnnnnnnnnnnnnnnnnnnnnnnnnnnnnnnnnnnnnnnnnnnnnnnnnnnnnnnnnnnnnnnnnnnnnnnnnnnnnnnnnnnnnnnnnnnnnnnnnnnnnnnnnnnnnnnnnnnnnnnnnnnnnnnnnnnnnnnnnnnnnnnnnnnnnnnnnnnnnnnnnnnnnnnnnnnnnnnnnnnnnnnnnnnnnnnnnnnnnnnnnnnnnnnnnnnnnnnnnnnnnnnnnnnnnnnnnnnnnnnnnnnnnnnnnnnnnnnnnnnnnnnnnnnnnnnnnnnnnnnnnnnncgctcagccccggcgcgccgcgcgcggccccacgttttagttccccgctcccccgggcgcccctccgcaccctcgcgacgcacatggcccccgagaggagtactggtatttccagcctcggcggctctcccggccgcagcgccctttgttgagaggtagatttggatgaaacggggacgggttcctgaaatcgggagctgcttgggtcaagtggcttccctcctctcccgaagaaagggctctggaggggctccagcagccagagaacgcccccattttatagggacgggttgcgtggggggcggccatcccgccaaggtgggtgttaggctggagagagccccgacgaaaatgttattaacttaagttggggggacacttgtctgagattggatggctggtaagatggcggttcccagttgtttccaaggtctcctgcatttgtgtttaaaatgctgaagttttcaaggtggtgtgtgttgggagtcttggataagtgctctgaacatcgcttgggaggtgctccctgggaagtgggcatttcaaatttggagctttttgtggagtgaagatggtgactggacgttagctttgctggaggcttgctttctcactacttctttttctcctttttcttttttccccttttggagactgcaacttttctctcgacttctactaaaggatgcactcagcatcatgactccagtccactatcttttacaggttttgctaaatgtcagcataggtcatttggcaaagggatgctttagaaaagagcactaaaaagttgattgcatatgtttacgcagtcacttgggcttgacagtgatatggcatgatctttttcccagagatttacagttaataattggaagtaaacaagtagagagactttgatcattaccacttgcaataaaaggatttagtgggcttagtggtcacggttcaatatatgaaagagaagcatgtattaaccccttcccttaatgtgggcaaaattccgagcatatttatccaaatgcaagtgtaggttggtggtgtgtacaacgttatgagtagttcaacctatattttataggaaccttaactcccatgttctggaaacacattataagctacactaaacagttgatatttaaggatgcaaattattgacagtatataacaagttatgagactctatatgttaacatttgagttttaagtagaccgatcagaaatccctgggattgattttataaacaaaattataagtttttagatttgagttaattccatacatctaccccaaagtgtagtcagaagtgtttgaaataacctacttgtgtgagtcttatgcctagtaaaatatctttaaagccatatacaagtcactttgtatgcatgtatacacataaagcttttgtaagaaaattaagcatttaattgtacatgataaatccattaatactctatcactaacttcttggatgtatgttaagtgtgcagataggctttctccccaggagtcaaattaaccccaactttacccatgcttatgttgggctgtgaaccccaactggggctatggagttcatttgcatttcttagattgcagtaggcaagctgatggttaacataagaacttgcttctgttttccttcattttgacattcctggtgttaggcctccacctaaaaactgacagccccaactgagtgtgttacaatggcaagttttaacggttgagtatttttaccatgatatgtttggtgcatttttgtttgcttaactggcagtttctgggttggaacctggaaggttttcacttctgaggtggaagagattgtttctcaaatcttatcaagcacgtcaaacactttggaagtcttcattaggttgccactactttcaaagggcataaaaacataactgatttttatataagtaacagtggtatttattagcattataaatggtcacaggattgtggccaaattcttctgaactgaggtagaggaattgtgtgaattaagacttaagatgaatttgaaagacttttggtcaagtacatgtgacttaaatgctcaaagccaaccggtagataaccctccactgaggtttgattgttctccttgttaatacttgtctttgtgtggtgttggttttctgcaagctagaggagaaataaaggcagctatttttattggagccccttcatgaacttcgtgatcggtggttttttagtgcagtatgctttcacaggcaaacagaaatatcagcttgctatctttctaggaaagatcctgtggtttcacaaggagaattttctttaagcaccaagaaggctgttctttaatttaccaagtataatttgatttaaatattgctactctttagggtcattgctctacctacaactcctccgtgccccgcttagatttatgttaatatgttgacaatattctccaaaacaagtaatccagagataactgaggagtcagtcacacaagaagttttctggtagaggtcgccagttgccactgtggtcactttcataagagaggctttgttttgttttttaccattttctagaggttagctcttaatttcagccattgagctgtgttgattggtgtttccctttactgcattaatacaccttaggaattaaaaccgcaggtatatcttactgcaagtttcaaaaggtcctggatttccattcaaggaagatttgagaatgtacttcagtgaggtctggaagcttagtcttatatcaggttctgaaatgaatgaagaaggggggttgaagtttatttttcaagaatactacacgaagtatttgacttccctgactgtcggctggtgtattgttgctgacagttccccattgtgactttcctgtaatagaggtatctgttgggaatatcatttcatcgtatggggggttttacatttgtttttctctcctgtcgctgctttgggttgacaagctgttgatttagcgttggaaatgggctggtcacatggttctgtacatattgtcactattgtaccgattaaagtactttttcttgcccccagcatagtttgtccaaataaaacactgggctttgccctctcctcttcttgtaaaacagatttcagttttcagcctttccaaaactttgtatcgctcatttaatctacaggagagcgtcacattagagaaggaagttttaaagaggttcggttcaataaacatctctgcaatttgagccctgacggtttcgggctaagtgcacagttggcaattctcaaaaaatcccttcgtgaaatttctgaccgagtgattgcagacaggacagaccgagagagtcgagatctgaaaccagctctgcgcaccaagtcgacgtgaaaagaggcccccggagtgtccgaaatggccgggagtgcggtttgcattttcctttcgcgggcgctgccgcaggctccggggtccccgccgcccaggactgggtccccggtccccgatccccgctccccgctccccagcgctgtggcctcgtggggctgccccgcccccccggcgtcgccgcacccaccccgcccccgcgccggccccgcccccgcggcgcgccgcccctcccccgcccgcccgcccgnnnnnnnnnnnnnnnnnnnncccctcccccgcccgcccgcccgcccgccgccccgcacgcccgcccacgctcggggctcgggccgggctccgcgcggagttgcagcggtggccggatgccaagtgtaagtgtaagttgctatggaaaccccgaccgaggcgagttccgaatccggagcgagacggagccccgggcgccgccggatccgcccctcgcatcccggcccccgggcgtccgccgcgctcaggccccggcccaggccgactggaggtgctcctcctgcggccccagcacccggctccggaaatgccagggatgcagggagggcagaattgttttccctgcgcgtcgcgtaaaaacgtgccaggttctgcttgctggaaccgtctaaaacaaccggaaccccggattttcacttgcagattcttgaggaagttttataataaattcggagacctggaacaagccctagtggttggtaaatatccgcggggattgtgtggcgtctgcagcagccttggggctgctgggctggaggacaaatggaagaaagagaccctaatacgctcagctcccagcccccaccccagactttcttctacctacaggaatgatctgagagaccagaagtaatgttagttggatccttttgcatcagtttggtagaactgattccgatctgatgagtaaattccttctgtagaaacgttaggacagcccagctgtacagtgttaaatgagttttataaattcagtgtttcagggtttgtgattactagatgatctccattcttgttctgtgaattatggccattatttctgtgtcttgcaggattttttatcaagcagaaatgcatcgaacaacgagaatcaagatcactgagctaaatccccacctgatgtgtgtgctttgtggagggtacttcattgatgccacaaccataatagaatgtctacattcctgtaagtaccgagctttagctctcttttgtatcatgcgtatttcacagttcgacctggaatttgaaaactgttaatgattcctgcaatctgtggaaatgttggtacaaagtggtgaaggcattttcttctcttgcatctaatgactttttgttaatatgtattgattgtattacaagcatgcaatatatgtgttctcaggatatgaattagcttatttagttggaaatgcctttcaccatcttgttttctactagttctgggtttctaacaccaatgatttatccactcatttctaaacataaaaaaacttcacatgttctacttctagtctgtaaaacgtgtattgttcgttacctggagaccagcaagtattgtcctatttgtgatgtccaagttcacaagaccagaccactactgaatataaggtaggaaactgttgaaattccttgtttgtaattattattggagttgtataatttactgaaggcaaccctctttatttcttcacagaaaatttactcttgaatacataactaatatgtgtgtgctttgtggagggtagccgtttaatttcttgccatattaatggtgaccaagtttagacaaagtttagtagtattcaagtgattttaagatttttttttcctaactgtcctttaaaaactgagttagttcaccttttttgcattgctttatggacttcatgacaggcaggaataaatatttaaaagggcttccattcctctttattccctattcatattagctagtttagtaacttgaaaggcacacttcttttgacagagcaaatgtgaagaatttattagtgaatataaaatatttttctactgatttaaaaagtgctatatacagagaacttttattctcatagtttttatcttatcaataatagttatagacagcatcacaatcaagtaaaatattatagcacaaaagaagactatagaaacttatgaacatttttagttcttgccatctgaattcatagttttctattttaattatttttcaggtcagataaaactctccaagatattgtatacaaattagttccagggcttttcaaaagtgagtaacttgcttagaaaatgaatttaaagagattattcattagttctttgtgttatgccaaatgtttacatcttttttccccattcagatgaaatgaagagaagaagggatttttatgcagctcatccttctgctgatggtaaaccttttaggggagggaagacattttatatggggggagagcttatctaggaattaaaatgtattaaaattgactttaccacttccatcctcttatatataaaatttattaggcatctgatttttaaaaattacatttcactatatcgttatagctgccaatggctctaatgaagatagaggagaggttgcagatgaagataagagaattataactgatgatgagataataagcttatccattgaattctttgaccagaacaggtaaaatctttaggcaatttattttatgctaatgttttattagattgtttcactaataaattttctctttattagattggatcggaaagtaaacaaagacaaagagaaatctaaggaggaggtatgtttcatgttacaaaaacatatagaagaaacattgtttggaatccagattttatcagggattgtgttgccctttagaatattaggctgttaaatagaagaaaatggtcatgtttaatgtttaagaaaggtctacatgtgatatttaataattagaatttattttatatatgattgttagtcttacaaaatattttaagtagttcacagttaatactttggtatgcttgaagattatattaggaatctgttcatttagtatttgtaatgatagtaaactcagagtgtaattagttgagaggttggtcacctccaattttgtttgatactagtatcttttatattcaagcaatcaaattgaaactttcttcatatcttaaagtaactgaaaaagttacttttctaaatgtacttttaggtgaatgataaaagatacttacgatgcccagcagcaatgactgtgatgcacttaagaaagtttctcagaagtaaaatggacatacctaatactttccaggtatctacttttatattcttcttgcattttacatagattttacaattttaattacatttttcactttggattttgaacccaaaaaagcaatagaaaaaaaatgtgaagttagtgctaaagttgaaatttatcttaaaacatttggtatacattctcttttatgctatgaaaacaaatcccttaacactctctagaaataattttttctcatttgaagtttcaggagtctttctttgttaaaatgtttggagaatatgtttcttaaagcacttttggattatatttaaatgacaaaaaatgtacatttacctttgttcttttattacttaataaaaatatttttcactagattgatgtcatgtatgaggaggaacctttaaaggattattatacactaatggatattgcctacatttatacctggagaagggtaagtagcatatctgttgttagattatgatggtaaactatatttaaagaattaagagtaatttttttccttttaactttgtagaatggtccacttccattgaaatacagagttcgacctacttgtaaaagaatgaagatcagtcaccagagagatggactgacaaatgctggagaactggaaagtgactctgggagtgacaaggccaacagcccagcaggaggtattccctccacctcttcttgtttgcctagccccagtactccagtgcagtctcctcatccacagtttcctcacatttccagtactatgaatggaaccagcaacagccccagcggtaaccaccaatcttcttttgccaatagacctcgaaaatcatcagtaaatgggtcatcagcaacttcttctggttgatacctgagactgttaaggaaaaaaattttaaacccctgatttatatagatatcttcatgccattacagctttctagatgctaatacatgtgactatcgtccaatttgctttcttttgtagtgacattaaatttggctataaaagatggactacatgtgatactcctatggacgttaattgaaaagaaagattgttgttataaagaattggtttcttggaaagcaggcaagactttttctctgtgttaggaaagatgggaaatggtttctgtaaccattgtttggatttggaagtactctgcagtggacataagcattgggccatagtttgttaatctcaactaacgcctacattacattctccttgatcgttcttgttattacgctgttttgtgaacctgtagaaaacaagtgctttttatcttgaaattcaaccaacggaaagaatatgcatagaataatgcattctatgtagccatgtcactgtgaataacgatttcttgcatatttagccattttgattcctgtttgatttatacttctctgttgctacgcaaaaccgatcaaagaaaagtgaacttcagttttacaatctgtatgcctaaaagcgggtactaccgtttattttactgacttgtttaaatgattcgcttttgtaagaatcagatggcattatgcttgttgtacaatgccatattggtatatgacataacaggaaacagtattgtatgatatatttataaatgctataaagaaatattgtgtttcatgcattcagaaatgattgttaaaattctcccaactggttcgacctttgcagatacccataacctatgttgagccttgcttaccagcaaagaatatttttaatgtggatatctaattctaaagtctgttccattagaagcaattggcacatctttctatactttatatacttttctccagtaatacatgtttactttaaaaattgttgcagtgaagaaaaacctttaactgagaaatatggaaaccgtcttaattttccattggctatgatggaattaatattgtattttaaaaatgcatattgatcactataattctaaaacaattttttaaataaaccagcaggttgctaaaagaaggcattttatctaaagttattttaataggtggtatagcagtaattttaaatttaagagttgcttttacagttaacaatggaatatgccttctctgctatgtctgaaaatagaagctatttattatgagcttctacaggtatttttaaatagagcaagcatgttgaatttaaaatatgaataaccccacccaacaattttcagtttattttttgctttggtcgaacttggtgtgtgttcatcacccatcagttatttgtgagggtgtttattctatatgaatattgtttcatgtttgtatgggaaaattgtagctaaacatttcattgtccccagtctgcaaaagaagcacaattctattgctttgtcttgcttatagtcattaaatcattacttttacatatattgctgttacttctgctttctttaaaaatatagtaaaggatgttttatgaagtcacaagatacatatatttttattttgacctaaatttgtacagtcccattgtaagtgttgtttctaattatagatgtaaaatgaaatttcatttgtaattggaaaaaatccaataaaaaggatattcatttagaaaatagctaagatctttaataaaaatttgatatgaaaagcacaatgtgcagaagttatggaaaacctatagaggattacaacaggtaaacgttaaagagaatacattgctgacttatagtgatgtggctaagaagtacatgctttgttgtaaaattgcttgaaagcccattgaaagatgtatctgtttatttacagtctttgaagtaaaagttaccaatgtttgccaattttggtgaatttaactcattttctaggcttaagtttttcatgatgtttaagacaaagaaaagttaatggaagtgtcaagtgatatttttaccttggatgatcatttgtataaagaatgaaaaaatatttttaaaaggctaaaaactttaaatgctagtggactgtcatttgacttacataaaaccaagttatcaacatggaattcaaattttacatctcaatctctttatgatgaatttatttttgaaattgcttattaatcagatactgcagttatggcttacttagcactaaccatatgtgaaaatgtttccatttatttgaaaaatgattttttttcctcctcaattagaaaatggcataagcttaaaagcatatttcagccaaaattttttctgttaatgaaagattataatgttttgtattcttaaataagcagctattacagtttgacaattgagattaaaaacctttgctaaattaccatgttagaaattttcaaccttatgaaaacccatatcaaaagctgctaactttgtaacttttagtagtcaaagcagggtacaggaaaagtcagctttaagtttgacttttgcttctgaaaatattctagaacacaaagttagtgctaacaaaatatttcagagaaaatgcctaaattgattttacagatttttagcttaaatgcaaagagaaaaatgaggctggttgctgttgtgtaaatagtgatctatcttgctttacacatgcataccattttacaagtactttttgcttttaaaattgccggccgttaattgcactgcattgaaaaaacaactgcccttcagttgtctcaaccttccaaccatattgctatttccatatccatacgtgataatatttggacctctggagggaaaatgcaacaggcagagtaagctggtaggaactttccttcatcctttcctcttttccgaatattttgaaggtgcagttaatttgtgaagtcttgttacactcattgtatgggcctattaaggttttgttatgaaaacaataggaacttaaatacccatgtgaaatgcgccttgcattgaccaacacgaaaggaggacgtttggtattttaaaatagtttattttatggtatcttttgaggggataggatttacttttagaaacaatctacacatggaatccagtctcttaaaatcctggggtgaagcaattgttaatttttccatttctctttgtattttaaaggtttgataaatgatttagatctttttcttcctaatacacgaagaatgatagttggaaattctgatttagtttagtacttagtcagaatggaggccccataagatttttaaaatactttggctgttttccccacacagtcttcattgcattttatccaaaacaaaaaggtcttgatcaaattacatgaaaaacgactagacatcattttagatctgtgctgcatctaacagtatactaattaaaacctttcaaaaaccgtctatgcctctaagacactaatttggtgcaaagatcactgaacccagctccaacttaaagctcttgagatacatgatttcactttaggatgtttcttcatgtacaaaatgaacacaaacacaggtgataatttctaaggttgctctaaaaaaattgactcctcaaaaaaaagcccttgaactaaattaggaccacaaacttcaaagcgaggagccgagttctttacaaggaatagaaggagatatccatatattccagccttgcagagaatcagatttgcaaatacccaccgcgaagaccttgagccagccgatctccctgcaaatctcaagatcgcccagttttgattatgaaagtcttcgaaaatgtttacacagttgagtgtttcctgtttccgcagttaattttttttaacgtttttttcttcttttggttcttgaaacggatttcctttatttgcaccagtttctttttcttagtgtgcaatttctagaggtctcacatgaagaacttcactatcaactctgtcttcatcaagtcgacgacatcagaagtcatgttatatttatcactggaaagactccgctgtagcactcttgtgagaagagttctggagaagttcaagtggaaaactcattcggaagtcgctttagccctccaaataaatagtaagcgctcaataaaaacttccaacaaaggagttagaactactctcattcttcagcccctagcctttaaaaatgtcccttccgggactatccgaagtcactttcataaatagcaggtgttgttccctacatttcagtaaaatgctacttcttgctctgattgtcaggtcatcatggaatgcaaacttcaccgtggacgtgatttcaacgttggtgcggatttggagatgtccaactctgtcctcaattagccagaactcaagttgagataagagacttgggaggctgcagacccaggtgatagggaagcgcgtcggaaagtgggatgccaggaatgggatggtggccgagaccgacaccgaggttagtgcaggtggagaagtaggtccaaaagcccaagtcacaggtccgaagtcctcaggagcggaagatcttccaactaagccggagagcggggcgcaccgcacggcgtggagcataacgcccgggcgagggtgattggggtgggaaactccactgctttccaaaaaacaggtttcttaggttctagtgcccggtggaaagggcacagtacaccggcctgggggaaatcacctgacttctcctttggtaaaggcccccttaccaacgctgcctctctggtaagggggtcctttaccaaaagacaccttaaagaagaaacagcctctctccttttccttattttctaattagcatcttacagaggagtggaaacagctacagcccagtcccctgctcaaaactgcgccaccccagttcggccctgctgggcgcgcgagccaaggccgcggggcaccgggaggccattttgcgcgtgcgctgctcgcctcgcgccgccctcggctctgcggactcggatcccgccaaatttgaacgcgagattgtcaggccctgaggggcttgaggggcgggggaacgacgccgctctccaaagttggaccccgtggcgagcggcggcgacagccgggtgctcgctgcctcccgaggtgctcccttttcccgccgaagccctccacagcggcaggccgaggcgcagcgacgtgtccctgtaccccgagttcagcgcgggcgggaaaacgacctgcacccggggaggcagcggcttcgcgggcagagcccacgggagcgcgccctgctaggagccaggccggataatcgcctttctttgtcctcctccctcttcgagtccaatcaatgccctttctccttaatgaacgaggtgtccttggagtttgaggttttgttggatgattttaaataaaattattaagttataaagtggccaccctgaaggttcccgaaggcgacttcatgtctgtgactggaaaggcctagaggagagggtcctcccgctgggctcgtttaatagaacgcgctcgaatcccctgggaaagagccttgactgggtgacagggctgaggaggggtggctgcgcggcgggaatctcaagatctgggcaaaggctcgcgtctcgggacgcgaagtcgacgccaaaatgggtccccggacaaggcgaccctgggagtgccggcgcccccggccgggcagaggagcgggtgggccgaggctgggacatcgcctccgaaagctgccgggacgcggcggcttcctgcagagcctgcgcctgccggatccccagaacacagaagcttctcggacatgggagctccccgtgcgccctaaaaccaggagaggaagggacgacttgggaaaagggactggggaaacagcggagaagtgaaagcggcctaaaatgggcgacggcgggcgagtcctctttatcagtgcagcaggctgccggagccgccatttggtggcggatctcggtagttcagtagcacgttgtgctgaacgtcacaactggcttgtctacgtggcatcgtcatttcttaaccgcggttttacgaaatgcaaatttccccctggccttcctcctccgcggccgtcgacccccctcggcgctccgggtggacggctccggggcgcggctcgtccctcgggtggtgcagcccccgcggcccgagacccggggagggccgggggtactttctgcgaggcgccttccccgcggcttctgcccgcgccaaagcctggtggaatccagcgcagacctaaagcacgcttgacaccccgatttttcgagactaggacgactctctgagccagcagctttcctctccctctcggggagaatctcatttccttggggtggtgagggtgacgggcactgtcttttggccccgcgtgtccgttccccggtctcccgcctcacccctctgcgaggtgaggaggggaaacggcgagcttaggcctggcgggaaggagcctacccgacgagagggctccgcggggagggtcggttggaatcccgccctagcgcctcctgctctgcccggtccccaccggggacggggaatgccagtcatttctgttgagtgctagcagggccggtgtcaccacctcgggtggccgaggcttcgaggttttcatgaaaagcccccgaagcgtgaggcgcccgcccagtggagaacaaagggccgagggccgaaggcgaggcgaggcagcgcgcgcggctcccttggctcgacctagctgggagtcgggggcgcgggcagggctcactcccggcctagaaactggagcccgccacccccgccccgcaggcgaccgcagggatcccattcttggagcccgagctgccatgttgccttcgcggaggccgccagtcacttgacgcttccgagacagcgaagcccccaacctgagagcccttcggccgtctttgccgcacagctgcagtcaaggcccggagggactgcgggacgcgggcgggagcgagagccctgtgggctgccaagccggcgcggccgcgccgcggcagccgcttcccttgccaccttcgttccaggggctgcggggctgcgcgctcggcagaggctcggttgccagtagcaaccacacgacggcgatttgcagccagggccgccgccgcagccgctggtacctctgcctcctcctacacctcgggctcgagcatttgaaaccctgggggttgccttcggtgacatctcccgcccccacctccagtcctcagtctccaaaatcctcagctctgctcaaaagccagcgcccccggctgggccctgcccccaccgcagacaataggagcggctgggagcgcacagggcggcgcgcgccgcgagcagcgggcacctgagcccccaaatccgggcgcgtcgctgagtctcagccccaggtgccctcttcgcggagttgatcagcaattctttttcagtggccaattagaaagcttttcttgacatcagaaataagggtggtgccaaagaaagaagtcaaacgcccactccctttctaataacatcgacacaaagaagagctcatggttgcgtctgcgcttggtaacagtggctttcctctgggttagagccacaggcacaagcacccgctgctatctttcttcttcgcctaccatgaatattttgcatgaaatccagaatgtaaccatttgcgttgacttaactgttgcatctggatactagttatttatcagtggatggaacacttttttttccatttcattggatgatccgcatcaacccttggcagtgtggactgcgtggtttgaaacataaagaaaacgactggtattaacccttgaggatctactttttctgtggctctagaacaccaatttaactttttttaacaagagaactcttgttaatgttttaagcaggttttattgaagaaaagtccttagagtatctagctaagtcttttatttagctactaggataactcgggaaatatgtgcattgccaaatttcttcgctcttaataattgtcccggctttgttagctgagtggtcttaatgggttaaaatttcttgtaaatcacaaatgtgctgaaatttccaagtttaaagctccctgaggataagcacctgccttattcatctttgtaagcgtcagagtcctttgaacataacaaatatttgtcggacttccagggaatttcagaagtctcaacaactcttattaggaaaaaaactaacttactgataactagcagaaagcttggatatctttaatgaactcaatgaaaagctaaacaatttccaagctggtagcattatcagatattctcattcatgaatatttaacttaattatatttcaaatgccatagattgtatgttaaaatatctgacacatgttttcaggattctaaggagaatgacaaattgtacataagaacttgaaactgctaatttctcatctagtgtctaaaaatttggttaaatagccacaagtaaggtgcaactttaaagtgctttcatactttctgatagcacagacatgtcattaactgtctttacagctggacaggaatgcttaaggatctagcgttggatattgcaaatctactaagacaaggcaccttgaaatatcctctttaatttaaataagctttaaagcatactgaaaatagtatgtctcaatcacaagtgatggtaaactcaaattaatgcctcctgaaatgactcttaggtatattattaaaagaggttcacctttaagcttcacaaaatatcaagttcattaaataagacagtttacctaaaagaagaaagcactgcttggttcctagagggagcataacgacctgtagcttgccaaaccacccccatcagcaccttaaaaataggaaagcaaggctttagtgaaaagttccttgctacggtctttcaggaaagaaaagctccaacaacttgctttggaccaagttaaagagattatctccctttttcattacgactgtctttcaatgaattgaaggataagatcaaagtgcattcatattcatgtgaattatcgctattgacttgaataatgatggatttcattgttttatttaaactgaaaccaggaacgctgctgcttttgaggctacacccctaaggctgtagaatttcttctctgagaactcaaaagccaagcaattaggtctgacaaccacgtcatttccataatgtacttccgtacagaggactttttattggaatcggttacatttctatagaatcttattaccactcaatttttgacttctttccaaccttctcaacaaaactcctaagttcggcaagtacacttccaaaaaacttatgagtaaattgtactgagaagatacagtgatgtttcagaagcttttattaatagctgttcatgaatcagacaaattaatgttatcagtaattacctcaggagagtgtttttgttttgaacatgatacattacagtttttctagggtaactgaagaactcagttacagtaagcttgggaaaatgtgtttaccagctgtttctttctaaatatgcctcatgacaattttcttaagacattttcattggggttttcctcaaactgtcccatcattttctaaggagatggaagttactagattcagtggaactccccctcactttcaccaagtgatcactctgctcaaataattcttattacaatgcttatcagtttggagaacactttttaggaaattcattacaataaagtaagcttgtcattgaattctgcaagcaacctttaaaatagacttaggaaactgcattttcctgaactttaatatacacaatttatatagcctctctaaacctaaaaagagactctagtgcaacaaaagtctattacattatcatggtctgcagtgggttctgggaatatcctttcccagaaagagaactgattcagttacttggtttctctcttaaacttctgccatacatttaaggcattacacataaaccacattttaaaaaaaattcaatgtttttctattcagttgggctacaagagatctctattttcatttacccattgtgtgtttttagtattgcaagacactctttaagccaggaattattagtaaattgtttctctttgggatatgaccatatatatattgaaattatttgcatacgttcagctttacttgtaaatttctaagactgttacccttgacttataagtaaaatgataagcaattgcatattatttcactagggcaaaaaaaaaaagcattccttgaataaaaagcatttctttataattcaattccttaagaccagatttgtcttactgatgggaaaagtattagtattttcttcatataggcagttcatcttttatatcgttcatataggaacttttattttttcaccgtaaaaaaattaggtaatattggagtaggaggtaaagtaatccagctttagcaatatttagatgttttctctgaaatgtcaaaaagcaagggtccaaactgtagtgcaagcatctcctctgaaagaatgagatgtagtgccaccgtgtcctcgaatttagcctacgttttagcggagctcactctcggctcagataatctctggggaaaaaacggacagatagagtggttaaacaggaaacactatttttttttttcaaacgtttgagaaaacttgaaaaccatctctcggtacttttgcagtaatttccaggagtcagaacatacagtccattattcttcagagtaaccaacgcacaagacattttggcttgggacttgatatcgcgaaatgacgtcaaaaaattaaaaaaaaaaacgaagctcgcacatgcgcaatgaggtacagctgctttttatttttttgtctgtatcagctattggctcctatccccgcctctgggatccggcctgcgccgcggggtcctagggggccagcagctgtaaagcggtacgggattccgcaccctactccagcaagaaagagcctgaagcccctccccacctttcccggccagggcgctcttctacgtcccgcgcgcggacagccggggcgaagtaggccgaccggcgcggccgcagcgagttttctggcagcgctagcgccgcggggcctgggttcccgggttccggtctccgccggctccgggctcgcccccgcgagttggccgcaccgttcccccgcccgcggggcagccgctcctccgggaggctccggcagggaccttcgccccggcccccgagcggcagtgcggctccagctggaggcctggcccgggaagcaaagtgaaaggacagaggcctccttcctcgccagccgcccgccgcgcctttcccagctcaggccggcggcccgcggcgcggagggagcgaaagagtcggggcctgccccctccaccgcccgcatctcggccgccgcacccgggtccgccccgggaggccccgcgggagggaacccccggcccgctgggcgcttccgcactgacgccttggggccgcgcgcccccgccctttcctcccgctacacccgctgggcccccgcccgcgctcccggcctgctcccagcgccgcctcccccgttagaaacttcgcagacaccgcgaagctgctctttggagttggagaaacttaggaagaatgggaaaagccgaggaagtcggggaggaccacgttcttcccttgccctcggcccgacactcctgtccacattggacgcggcagcctgccagcgcccaggagagccgacccggtggaca

SEQ ID NO: 101 - DNA, 3203 bp, Homo sapiens
gagaggcagagatcggggcgagacaatggggatgtgggcgcgggagccccgttccggcttagcagcacctcccagccccgcagaataaaaccgatcgcgccccctccgcgcgcgccctcccccgagtgcggagcgggaggaggcggcggcggccgaggaggaggaggaggaggccccggaggaggaggcgttggaggtcgaggcggaggcggaggaggaggaggccgaggcgccggaggaggccgaggcgccggagcaggaggaggccggccggaggcggcatgagacgagcgtggcggccgcggctgctcggggccgcgctggttgcccattgacagcggcgtctgcagctcgcttcaagatggccgcttggctcgcattcattttctgctgaacgacttttaactttcattgtcttttccgcccgcttcgatcgcctcgcgccggctgctctttccgggattttttatcaagcagaaatgcatcgaacaacgagaatcaagatcactgagctaaatccccacctgatgtgtgtgctttgtggagggtacttcattgatgccacaaccataatagaatgtctacattccttctgtaaaacttgtattgttcgttacctggagaccagcaagtattgtcctatttgtgatgtccaagttcacaagaccagaccactactgaatataaggtcagataaaactctccaagatattgtatacaaattagttccagggcttttcaaaaatgaaatgaagagaagaagggatttttatgcagctcatccttctgctgatgctgccaatggctctaatgaagatagaggagaggttgcagatgaagataagagaattataactgatgatgagataataagcttatccattgaattctttgaccagaacagattggatcggaaagtaaacaaagacaaagagaaatctaaggaggaggtgaatgataaaagatacttacgatgcccagcagcaatgactgtgatgcacttaagaaagtttctcagaagtaaaatggacatacctaatactttccagattgatgtcatgtatgaggaggaacctttaaaggattattatacactaatggatattgcctacatttatacctggagaaggaatggtccacttccattgaaatacagagttcgacctacttgtaaaagaatgaagatcagtcaccagagagatggactgacaaatgctggagaactggaaagtgactctgggagtgacaaggccaacagcccagcaggaggagttccctccacctcttcttgtttgcctagccccagtactccagtgcagtctcctcatccacagtttcctcacatttccagtactatgaatggaaccagcaacagccccagcggtaaccaccaatcttcttttgccaatagacctcgaaaatcatcagtaaatgggtcatcagcaacttcttctggttgatacctgagactgttaaggaaaaaaattttaaacccctgatttatatagatatcttcagccattacgactttctagagctaatacatgtgactatcgtccaatttgctttcttttgtagtgacattaaatttggctataaaagatggactacatgtgatactcctgtccgtcttggttcaaaagaaagattgttgttataaagaattggtttcttggaaagcaggcaagactttttctctgtgttaggaaagatgggaaatggtttctgtaaccattgtttggatttggaagtactctgcagtggacataagcattgggccatagtttgttaatctcaactaacgcctacattacattctccttgatcgttcttgttattacgctgttttgtgaacctgtagaaaaacaagtgctttttatcttgaaattcaaccaacggaaagaatatgcatagaataatgcattctatgatgccatgtcactgtgaataacgatttcttgcagctatttagccattttgattgctgtttgatttatacttctctgttgctacgcaaaaccgatcaaagaaaagtgaacttcagttttacaatctgtatgcctaaaagcgggtactaccgtttattttactgacttgtttaaatgattcgcttttgtaagaatcagatggcattatgcttgttgtacaatgccatattggtatatgacataacaggaaacagtattgtatgatatatctataaatgctataaagaaatattgtgtttcatgcattcagaaatgattgttaaaattctcccaactggttcgacctttgcagatacccataacctatgttgagccttgcttaccagcaaagaatatttttaatgtggatatctaattctaaagtctgttccattagaagcaattggcacatctttctatactttatatacttttctccagtaatacatgtttactttaaaaattgttgcagtgaagaaaaacctttaactgagaaatatggaaaccgtcttaattttccattggctatgatggaattaatattgtattttaaaaatgcatattgatcactataattctaaaacaattttttaaataaaccagcaggttgctaaaagaaggcattttatctaaagttattttaataggtggtatagcagtaattttaaatttaagagttgcttttacagttaacaatggaatatgccttctctgctatgtctgaaaatagaagctatttattatgagcttctacaggtatttttaaatagagcaagcatgttgaatttaaaatatgaataaccccacccaacaattttcagtttattttttgctttggtcgaacttggtgtgtgttcatcagttatttgtgagggtgtttattctatatgaatattgtttcatgtttgtagggaaattgtagctaaacatttcattgtccccagtctgcaaaagaagcacaattctattgctttgtcttgcttatagtcattaaatcattacttttacatatattgctgttacttctgctttctttaaaaatatagtaaaggatgttttatgaagtcacaagatacatatatttttattttgacctaaatttgtacagtcccattgtaagtgttgtttctaattatagatgtaaaatgaaatttcatttgtaattggaaaaaatccaataaaaaggatattcatttagaaaatagctaagatctttaataaaaatttgatatgaaa

SEQ ID NO: 102 - DNA, 981 bp, Homo sapiens
atgcatcgaacaacgagaatcaagatcactgagctaaatccccacctgatgtgtgtgctttgtggagggtacttcattgatgccacaaccataatagaatgtctacattccttctgtaaaacttgtattgttcgttacctggagaccagcaagtattgtcctatttgtgatgtccaagttcacaagaccagaccactactgaatataaggtcagataaaactctccaagatattgtatacaaattagttccagggcttttcaaaaatgaaatgaagagaagaagggatttttatgcagctcatccttctgctgatgctgccaatggctctaatgaagatagaggagaggttgcagatgaagataagagaattataactgatgatgagataataagcttatccattgaattctttgaccagaacagattggatcggaaagtaaacaaagacaaagagaaatctaaggaggaggtgaatgataaaagatacttacgatgcccagcagcaatgactgtgatgcacttaagaaagtttctcagaagtaaaatggacatacctaatactttccagattgatgtcatgtatgaggaggaacctttaaaggattattatacactaatggatattgcctacatttatacctggagaaggaatggtccacttccattgaaatacagagttcgacctacttgtaaaagaatgaagatcagtcaccagagagatggactgacaaatgctggagaactggaaagtgactctgggagtgacaaggccaacagcccagcaggaggagttccctccacctcttcttgtttgcctagccccagtactccagtgcagtctcctcatccacagtttcctcacatttccagtactatgaatggaaccagcaacagccccagcggtaaccaccaatcttcttttgccaatagacctcgaaaatcatcagtaaatgggtcatcagcaacttcttctggttga

SEQ ID NO: 103 - DNA, 96597 bp, Mus musculus
  misc_feature (1)..(1119): "n" at positions 1 to 1119  can be any base
  misc_feature (3198)..(3392): "n" at positions 3198 to 3392  can be any base
  misc_feature (5213)..(6798): "n" at positions 5213 to 6798  can be any base
  misc_feature (22501)..(22528): "n" at positions 22501 to 22528  can be any base
  misc_feature (58897)..(59240): "n" at positions 58897 to 59240  can be any base
  misc_feature (63007)..(63085): "n" at positions 63007 to 63085  can be any base
  misc_feature (75913)..(75966): "n" at positions 75913 to 75966  can be any base
  misc_feature (85888)..(85907): "n" at positions 85888 to 85907  can be any base
  misc_feature (94748)..(94767): "n" at positions 94748 to 94767  can be any base
nnnnnnnnnnnnnnnnnnnnnnnnnnnnnnnnnnnnnnnnnnnnnnnnnnnnnnnnnnnnnnnnnnnnnnnnnnnnnnnnnnnnnnnnnnnnnnnnnnnnnnnnnnnnnnnnnnnnnnnnnnnnnnnnnnnnnnnnnnnnnnnnnnnnnnnnnnnnnnnnnnnnnnnnnnnnnnnnnnnnnnnnnnnnnnnnnnnnnnnnnnnnnnnnnnnnnnnnnnnnnnnnnnnnnnnnnnnnnnnnnnnnnnnnnnnnnnnnnnnnnnnnnnnnnnnnnnnnnnnnnnnnnnnnnnnnnnnnnnnnnnnnnnnnnnnnnnnnnnnnnnnnnnnnnnnnnnnnnnnnnnnnnnnnnnnnnnnnnnnnnnnnnnnnnnnnnnnnnnnnnnnnnnnnnnnnnnnnnnnnnnnnnnnnnnnnnnnnnnnnnnnnnnnnnnnnnnnnnnnnnnnnnnnnnnnnnnnnnnnnnnnnnnnnnnnnnnnnnnnnnnnnnnnnnnnnnnnnnnnnnnnnnnnnnnnnnnnnnnnnnnnnnnnnnnnnnnnnnnnnnnnnnnnnnnnnnnnnnnnnnnnnnnnnnnnnnnnnnnnnnnnnnnnnnnnnnnnnnnnnnnnnnnnnnnnnnnnnnnnnnnnnnnnnnnnnnnnnnnnnnnnnnnnnnnnnnnnnnnnnnnnnnnnnnnnnnnnnnnnnnnnnnnnnnnnnnnnnnnnnnnnnnnnnnnnnnnnnnnnnnnnnnnnnnnnnnnnnnnnnnnnnnnnnnnnnnnnnnnnnnnnnnnnnnnnnnnnnnnnnnnnnnnnnnnnnnnnnnnnnnnnnnnnnnnnnnnnnnnnnnnnnnnnnnnnnnnnnnnnnnnnnnnnnnnnnnnnnnnnnnnnnnnnnnnnnnnnnnnnnnnnnnnnnnnnnnnnnnnnnnnnnnnnnnnnnnnnnnnnnnnnnnnnnnnnnnnnnnnnnnnnnnnnnnnnnnnnnnnnnnnnnnnnnnnnnnnnnnnnnnnnnnnnnnnnnnnnnnnnnnnnnnnnnnnnnnnnnnnnnnnnnnnnnnnnnnnnnnnnnnnnnnnnnnnnnnnnnnnnnnnnnnnnnnnnnnnnnnnnnnnnnnnnnnnnnnnnnnnnnnnnnnnnnnnnnnnnnnnnctctctctctcttatacaccgacttctgtcttcttcagtctcgatcaacagctggcttcattccagccccaggcagaaaaacttaccatttttaaccgtctcctttggctacattgtagcaactaggatcaactctgcttgctgactggagtccaactgaatagcaaccttaactactgtaaaaagccctccgtctgttaactgttctacaaccagctcatatgggttcctctccctcactgttctgtttagaatggacaatcttaagagtctattttaggattcttcctcatattcttgcttctgcttcctaagttgctggcagagtaattgaatctctcctggttgaggataaatgggggtgtggaaaggggccaaggattgcatactgaggaatgttgttctacatagaaacctgaagccaggggaaggtggcctcttaccaacctcaccctccatcattccaatgctgagacaccaagtatagttcaaaggtcatctgggagacatggagaccatgatgaagtattaggataatccatgagagggaatctaacctgagcaagaaagctgacacatcccctccgcaatcagaacagggagggtgctccatagtcctgcagcacagagctgaagagctggccctgggttctgggtatgtagagatgcaaggttagcagaagcctgctagaaggactggtgtagaaaagctgtgggaatcccttgtcagggtatattcgtaagaaatctgacaagaggtcagagaattagccctggagtgggagcaattgggatgggcatgggaagaggagagaaatcataacaaccaatgctaaaaaaaaactactcagaggacttagcaacaaaaggaagggagacacaagtaagtccatgggttcgaattcagagacttggtgtaactacaatgaaagcggcagcggcaaagccagcttgacatgcaggacacaattctcaagtgttctctctctctctctctctctctctctctctctctctctctctctctctctctctctctctctctctcccctccagtcacctatacacttttggtggactaaatttctaaattacccactcggctaggctgtatccttggatgtagtggaacccattgtcttcatattgaggttcagtcctctcagcttatgtgagataccacaccccaccctccaactcagtctctactggcaatggcacagtgacctgaattacaagtgcctagctttgctctctacgatcctcctccctggagcacctttgtccagctcacctcagcctctctagccccttctctgggattcagaaggtagaagctctattcatcttctaagtcaaggacacatcacctgtgttagcaccaaaacctcttctaagcatccccaggtgctgctgccccgtcctcccttgtcccttccctcttgttctctggaccatgcacacatgcttgccagtagccatgataccccatttgctgtctgttatttgtcctctgtcaccaataagcctagaaccctgacacataaggaccattctaggaaggctgggagaaagaaaatcaaatatttcatgctctcagagaatctaggagttaccatttggaaagactaaaggtcagaaaagactaaaagcctattatagattttaaaatctctcaaccaaatagcgattgcctgtccaaacactctcggtgacaagaaataactacaggatagaaattctacatatctgagattcccacatgaagaatttttgagattttttttttgacaaaatatctctgcatagccctggctgtcctggaactcactctgtagaccaggctggcctcgaactcagaaatctgcctgcctctgcctcccaagtgctggaattacaagaaatgaggaggaaagaggggaaagaggacatactaacagttaaatttttctcaaagctgtcaattgtacctaagaagaaacatagttggtccatgcctgtggctgtgcatgggcttgtgtatgtgtgtgagtgtgtataccagtgcctgtgtgtgcacgtgtgcatgtgtacatgtgnnnnnnnnnnnnnnnnnnnnnnnnnnnnnnnnnnnnnnnnnnnnnnnnnnnnnnnnnnnnnnnnnnnnnnnnnnnnnnnnnnnnnnnnnnnnnnnnnnnnnnnnnnnnnnnnnnnnnnnnnnnnnnnnnnnnnnnnnnnnnnnnnnnnnnnnnnnnnnnnnnnnnnnnnnnnnnnnnnnnnnnnnnnnnnnnnnntgtgtgtatgtgtgtgtactcacatctgcatggggtatgtgtggtgtgggggtgaatgtgcatgtctgtgcatacttgtgcctgtgtgtgcacactaaatctgcatgtgtacatgtgcgttcatgtgtgtccacaggcaagtttcctaagctccctaaaggggaggctcctggcctataaaatgggagtgactataggattcccaggattaagcagggagacaattcaatcactgctggttctatgatggcatacagtgggcaaggaagggagatcatgtcctatctagcttccattaatgagtatgtagcctctcgtctctctccaagccccagggtggcatcttccccagctcctggaggtggaaatcccttcataattccacaggtttgcctttatctataagtgtctgttcactgagttcagccagtttccctgtgtcctcaagctgatgtcacccaagcgcagaaagttcttcacagtaacacacagtcctctccaagcacagtcgcttttgccacgttggcttttctctaagaattgtcgaagtattaagtgtatacatagagatctgcgctccattctgcttttccaaccactcagcctgagatggagaggtgtctctgggtctcaagagagaatgtccagggggttggctctaccaggtctctggaataaatttacctgtcctagtcagtcctactgggtcagtctgttaggtccaatgctcaccagttagaaccaagcttgccttaacttctgagtccatttgttatttcttacctcatcttaccttaataattagtgcaaatcgttctgtccctactgtgttcaaaaaaaggaaactttatggagcttttttatgcccttgtaaaccaagatcttttaaaaattattttaaggttgttccttggaggccacacatttaagtccctcagtctgtcattagaaggcaaccctgtggaagcctttcctattttatttgctcttttttgcttttgcaaaaaatatatgactgtggagctgcaaaccttgacctcctgcctatttaaacagcgtctggaaatctgaagtaattagctctcttcttcttcctcttcttcttcttcctcttcctcttcctcttcctcttcctcttcctcttcctcttcctcttcttcttcttcttcttcttcttcttcttcttcttcttcttcttcttcttcttcttcttcttcttcttcttcttcacaacatcgttgataagccgtcttgtcctgctatggaatgtgactacccaaatcctaaggcattgagaccgaccatgtgcccttactgtcactgggtgctgaccactgtcagtgtacaaagctaaggaagggtaatttctaactcacattatctgtaaatactcaagggaatgagcacagttttggtgtgggcttccctgtaccttagaagcagcagactgcagggaggaaagtgtcttcctgggatcttagcatatgctgatgatttccaacaatatttaaggctgtgacatttcaagaacgagtggtgtcaatgtaaacaaactgctttcctagctgaaaagaggaagggagagggaggggagggaggagggaaccaaccaagggggaggtgtttctgaaatgatctaccactagaggaaagcaattggaacacagaagcaccaggtaatctcttttagaaaatgtattctgaattgtttatttggataaatactggctttaaggaaataaattgttggaatgatactcagatttttttttctccttgtgcttagcctctgccatgttactgattttaaaaccattttgnnnnnnnnnnnnnnnnnnnnnnnnnnnnnnnnnnnnnnnnnnnnnnnnnnnnnnnnnnnnnnnnnnnnnnnnnnnnnnnnnnnnnnnnnnnnnnnnnnnnnnnnnnnnnnnnnnnnnnnnnnnnnnnnnnnnnnnnnnnnnnnnnnnnnnnnnnnnnnnnnnnnnnnnnnnnnnnnnnnnnnnnnnnnnnnnnnnnnnnnnnnnnnnnnnnnnnnnnnnnnnnnnnnnnnnnnnnnnnnnnnnnnnnnnnnnnnnnnnnnnnnnnnnnnnnnnnnnnnnnnnnnnnnnnnnnnnnnnnnnnnnnnnnnnnnnnnnnnnnnnnnnnnnnnnnnnnnnnnnnnnnnnnnnnnnnnnnnnnnnnnnnnnnnnnnnnnnnnnnnnnnnnnnnnnnnnnnnnnnnnnnnnnnnnnnnnnnnnnnnnnnnnnnnnnnnnnnnnnnnnnnnnnnnnnnnnnnnnnnnnnnnnnnnnnnnnnnnnnnnnnnnnnnnnnnnnnnnnnnnnnnnnnnnnnnnnnnnnnnnnnnnnnnnnnnnnnnnnnnnnnnnnnnnnnnnnnnnnnnnnnnnnnnnnnnnnnnnnnnnnnnnnnnnnnnnnnnnnnnnnnnnnnnnnnnnnnnnnnnnnnnnnnnnnnnnnnnnnnnnnnnnnnnnnnnnnnnnnnnnnnnnnnnnnnnnnnnnnnnnnnnnnnnnnnnnnnnnnnnnnnnnnnnnnnnnnnnnnnnnnnnnnnnnnnnnnnnnnnnnnnnnnnnnnnnnnnnnnnnnnnnnnnnnnnnnnnnnnnnnnnnnnnnnnnnnnnnnnnnnnnnnnnnnnnnnnnnnnnnnnnnnnnnnnnnnnnnnnnnnnnnnnnnnnnnnnnnnnnnnnnnnnnnnnnnnnnnnnnnnnnnnnnnnnnnnnnnnnnnnnnnnnnnnnnnnnnnnnnnnnnnnnnnnnnnnnnnnnnnnnnnnnnnnnnnnnnnnnnnnnnnnnnnnnnnnnnnnnnnnnnnnnnnnnnnnnnnnnnnnnnnnnnnnnnnnnnnnnnnnnnnnnnnnnnnnnnnnnnnnnnnnnnnnnnnnnnnnnnnnnnnnnnnnnnnnnnnnnnnnnnnnnnnnnnnnnnnnnnnnnnnnnnnnnnnnnnnnnnnnnnnnnnnnnnnnnnnnnnnnnnnnnnnnnnnnnnnnnnnnnnnnnnnnnnnnnnnnnnnnnnnnnnnnnnnnnnnnnnnnnnnnnnnnnnnnnnnnnnnnnnnnnnnnnnnnnnnnnnnnnnnnnnnnnnnnnnnnnnnnnnnnnnnnnnnnnnnnnnnnnnnnnnnnnnnnnnnnnnnnnnnnnnnnnnnnnnnnnnnnnnnnnnnnnnnnnnnnnnnnnnnnnnnnnnnnnnnnnnnnnnnnnnnnnnnnnnnnnnnnnnnnnnnnnnnnnnnnnnnnnnnnnnnnnnnnnnnnnnnnnnnnnnnnnnnnnnnnnnnnnnnnnnnnnnnnnnnnnnnnnnnnnnnnnnnnnnnnnnnnnnnnnnnnnnnnnnnnnnnnnnnnnnnnnnnnnnnnnnnnnnnnnnnnnnnnnnnnnnnnnnnnnnnnnnnnnnnnnnnnnnnnnnnnnnnnnnnnnnnnnnnnnntattatatattttggagatgatttcatagaataagcacacaaaactttcagttttctgagaccacttacagttagccagtcacgtaaggatgtagaagaataagtcaataaaaccgctccgccctccattgaaatggttgcctgcctctcactgaaccaaacactacttttaaaattcatggtagaaagtccaaatcctgttgtgctcacttttaaacttccccagcaacaaatttgtcagactgtcacacagtagcagcttaaacaaatctttccctcgcagtttttttccttttttttttttaatcatgtaaattttagtgtcactctgggggaagcctggaagtgaaagttgtaaacctttcctttagctcttggtgaggcaagcgagagaaagtgtgcattgacagtgaaatgcgcactctgggtgggaaggaattcctcatttccctctcccgctgcaggacttgcatgaactctgtccaaagccgcaaggactgcgcgttcatggtgcccctcggtagagtcccagctgcgcgcttgctgattgctattttgcagcaaagacggggcgatgattttgtttgtctgtgtttttcaagtgcgtgtcaagtggctcagtgacaacccacacaggtccagggatgcccgaggccggatttttgcagtttttcgttgctttatcctgatcgagcttcgaactaactgagttactagcagtaactcagctgagcagcgctcaaggtgcgaaccttgaaagccaaacttggtgcctgtgttcatgtaactgtctttcctaggcttctgccagacagacaaccctaaactccatgcgcagtttgaggtttgaccccaacgcgattcctttaatcttttgaagggccagagagacaccctttcccctggagtcaaggtcgagcgttgtctctgccacactgttctgatgatgccctgtctcggttggtctgtgtggatgtgcttggctgtggctccaggagcactagatctgaagtcggctgctcagaaaatgcatttgaggggagtctagctagctatttgagggagtctcgcttccactggccatgaactctccagtaaatacggcacaccagaacctggctgcactaggaagctgtggccctggcaggggagcgcaggcagcgggattcgacccctgaattgggacttctttaagattcgttttaaaagaaaagcaaggaggaaaaaatgtcttcccaaagctccggatccccccaaacgccaggggagcactgagctttgccctgctgtcacgatctttgtgctgaaggaggaaagtcgggcccactcgggaaaatacagaaggctggagaagttgagccttcgctgacaatcgctggacacctgaggaactcatggtcctgaactagcataaggcggagcccaggcaaagaggctttgagaagagatgagaccctaatttgggtggatcacgacagtagagacccaccagccgggggattcccatgcaagctggaccggctggctaccaccggtctgagagacgggggcgctcaggtgggttctggtggccacttcctaatgtctgtccccaaactcacaagatcgaccctaaggacctccaggtgagactggtcctcgcgccgtcggggcgtgcccagtgccctgctccgcttcccaggacgcctaacgagggccgctgctgccccctggcgtccggtctgagccccgacatgaccgtgaaaggcctgcctgatcctccatgccgccagctcctacccgcctggggcaagagaagccaccccaaacttcagacaaggcctccgtgccgggacctccacagcttcttcctcttccacggaacccaggctgcgcagatgcgtgtggaaggaagacacacgcggggaccagccagggacccgagcacagatgaaagtggaggggttcggtcaatatgtggacagtagcgggctccatggagtgggtagtaagaagttccggaggaagcaaggcccaagagaagtaagggaccccggagcacaggccagctgctccggctggggacagtagccggcagcgagccaagcaggaaggagacccttaaagctcttcggcgaaaatgccctcggcgccgcggggacgaacaaggtgggggaggtgcccctacattgcttaagcggagtgggttcgttgcctgaaggagagctccggactcccgccggagctggagggtggattcgagctcatgagttcggggtggcctgagtcccccatgctttcaactttttttgtagtctagagttctttgaggccttggttagaaaactatctcctctccagccgctgcgcacactcagaacgcggcgcgctgcgtaatcaagccgcagcccagccgcagagaaaagacactaaataaagcaactctgcgaaggagaggatgcttaaaacccaaaacttctgcggtggagcagtggctggccttgtttaaatgactcggtgccacttctcctcagctgctagtctggcccagggaggcgctcagagcttcccccactcggccatcagccctccaaccctcttgcggccgaatcccaccctgtcctcccaggaccccaagccttggctcatggactgcagtgcaaggctgcctagggaccattcccggatgccagcccaggtccctgaagcctcgcggtggcagctttgtgtccagggagcacagggcgtctccctcccgctgatctccaggcccagggcttctccggacgcagccctcggtccccaagcccgaccggtctctcgattcctgtttcggggtctccaggaccgaggccaccagtggcgccgctgcgcccggcaaacccacccagggcgagtgcagcaccgcgcgtggctgcctggcgtgggatctgaacctgggcctggcttcgggcaaacatggcagcgtgtgcctgtgggtgcggggtcggcgtgggtgcgggagctggggacggtaggggctgccaccgagtcccgggccgggcagcgtacagtagcgcgcgggggcgcgcgggccaattccaggagcgcggcagccggccgcgcccaggctgataccggaaaggcctgtgattggccgtcggtctcctctatgcaaacgagctgagggaatggaattcctcgggtcgggcttacagtaaaagcacgttcatttccaggcactctcattcatagagccagcgggcgcgggcaggacgggcgccccgcggccggacccagccagggcaccacgctgcccggccccgcggctggcacttccatcctgagctccccgagacgcaagaaagtcaccctttgcggctctttctagatctgcgttggaccttcttgttttcctttcctttcctttttttttttttttaatttttatttttattttccctttcttacttttgaatgaaccggcttctaggctttggatgtttcaacttctaggctgtgaacttttctccgattgtttcttttgacaactgcgggagaaagtgttccggagttccaggcgagcggtgaagttgcgtgtgcgtggcagggtgcgtgggagtgagcgtgtgtaactcgagcctactggtctacggtgcctcctcccaggcccgctccacctgctgcggttacacggtgctcgctcgtgggtatttgtgcgccccagcagaaaaccagccaccgccgggcgacgttggaggaagatcatcttgccagactctgggctgactcactcaaccaatgtagacagtggctgacttccgaagagtgcgagtctgcctgtgtgtgtgacccaactgcggctcaactcccaccaaaccacaggatcagccacaaacttaaccagcgttcccaaaccagagtcctcagctgtgggaagctctaccctgagtgtcatcgagtttgacttttttttttttaagattagctacagatctttgtaaagcactgaccatttatttggccagaatttattgagtaatgacaagtgatcctatcccagccttccaactactgaagctgattttcaaggctacttaaaaaaaaaaaaactgcagcaaacattaatggatttctgttgtgtttaaattctctacagattgtattgtaaatattttatgaagtagatcatatgtatatatttatatatacgagcacatacattagtagcacaatcttttaaagttacggctcttgcttttgagaaacgaagtgagtttttcatggtaagaggggcgctctgtatggaagacactcctaagttttgtattttgttgagactctaaacaaaactgacccgcaagaaagaaaaacaaactgacaggcaactaactgctggaacttccaaatctagtttttgctggtcattttttggttgttgttgttgttctgcgcataaatattttaggacgcgtatgggaattttgcctccgggaccgtttgtaatagccaaagactgaacttcaactctcaaagcgaggctctgttgggcatttgactttgaattctggttgcccactttttaacgcactaagcggccagttgctaaccctgcttgggtgtgaggccgatccgtgtaactagatctcagtccgggactgatggtaatttagtctcctacccccacaaccctccggtagtaataaaggcttctgaacttgtatgttggtctcccgggagcagcttgcagaagatccgagcccctgtcgccgtctagtaggagctgttttcagggtccttactcaatcggcttgttgtgatgcgtatccccgtagatgccagcacgagccgccgcttcacgccgccttccaccgcgctgagccccggcaagatgagcgaggcgctgccgctgggcgccccggatggcggcgccgccctggccagcaagctgaggagcggcgaccgcagcatggtggaggtactagctgaccaccctggcgagctagtgcgcaccgacagccccaacttcctctgctccgtgctacccactcactggcgctgcaacaagaccctgcccatcgctttcaaggtactcctgcctgaagagggtggcgggaggagcaggtggaggtcagccgatggccagagtgagcctagggggcagaggctaaggcggcttctagagaagggtgctgcctgtagtagaagtctctggtccttctcactgagtttgggatggggggggggatgctgcgttaccgtggcgaccctcgggagggtcagcctcagaggtatccaagagggagtttttttaaaaaaaaatcaggataatttcagagcgcctaccaagggccttccttatctttgctacgaaatagaaaaagttagaaccttggatcgggccagtccatcttccttaaggttccccgaacctctggatgaacacccagaccgttttgtatctctcaaatgaaagcatcaggaaataaaataagagatgctttagtaccttcaggtcagaagaaaaaaataaataaataaaccaagggaaacagccagggatcacacacacacacacacacacacacacacacacacacacacacacgccccgccgccttttttttttttttttttttttaaatcgcgctataagattcagcgtgtccaaagtccgcggcaaggagtagttggttaagtttgccaaagtccggagtttttccgagcctgtagcctgctcctgccagaagccgcaagtattgaatcctgttgctttttctggaacctccagaatattatcgctggctcacctaaattaagccccaggcaagaaaggtgacaaggtgtctaccgacacccaaaaaggtccaatccagcagcttttctgtttgagcaaggggccttgtagacccggcaacttcaggtgggcagctcacgttggtcaggtcgcttttcaccctgatcttgccctagctttgtgttgcgtctaaaacttggctttcagaagctatatataaacaacctcgggcggtttaaaaaaaaaaagaataagaagaagaagaagaaagaaagaaccaccctacaactctggcagggagctggaggaatttagattctcttctttggtcttctcctgaggtgggttttaaaaggtacagctgagagcaaaaagactctgtcaagttgtgtttttaaaaggctaagaaggcgggacccgagctgaaaagggaagctgctctcctttttcttttttctttttttcaatttagctgaataattgtctcatttaggagggagattaatttaatttaagcttttcgtagttccaggcctcagctggatcttgatctaattacaatgaatagcgctcactttttgacaagtgctgtccggttccccttttcatgctaaaaagaccatccacattaaaaaaaaaaatcatagaagtagaatttgctgctgactctgtctgtagaattgccacctttaccactgttgtgaaagcaactttttaaaggggtagaggtggggttgagagtctgaaggggagccaggcactcgggttttccttcccttccaagtattggggaatccgtcccaattcctttagaaaaacaaatttagctggtgttgtcttctgtttaccctgagagggacctatctgggctcagccctaaggtcactttcagagaacagagagaaatcaaacttattgtagtcaaggaaagggccagttaaggtagatctccctgccagcctagctaaagggactgtggcttccttgagggaagaaattgggtcttttctgagctttgttgctgtggttgttgttgttgttattgttgtggttgtggttgttcttcttcgtcttagtctaccagggaatcccagtttatcaagacactaaataactgatttttaaaatggtcttcaggagttgacgtggtcccgtcttgagctaccacatggaaatgtttatttttcttttcaaaagaattaaagaccttacacattgcctttacaagccacgaaaaataattttttccttttaacaaaaataatcactgccgtagagattcccctttacaaatgattttggaaagacctcagtgtgtttccctgagtgacagccaggagccatgacaaaggtcacggtggacagggaagttgaaaaatcagacctctggattaatatctgtcaccacctatgctgtcccacagagggacggctgcttcaaggagctcaccagtcagtagatagaatttgcggagggaaaggagatttaaaggctgggtttaagaggaagctggacttggaaacagaccatcttccttgctgtattttctatgggccctggcccctctgtgtgccagctcctaccaaacacacagaagcagtttctaccaacagtctttacatttacatgtgaattaagattccggaatctctttaggggttaaccctgcaggacttatcctattccctgctgccgccaccacccccagataaaaatcggatgatgtgaagccctgttcagatcacttgtagaagagcatctcccggaaccttccggaatcttgttaagtcctccgctttaatcttcagaattatcaggagacttacaatcatgaagtcccttgaaaattgattaaaattatgctaattagtcctcccatcctccacccctctttccacctatagactgtttatctcagcatagaagaaacacttaatttcactgccgagaaactgggaaatctgctccatactacacaatatttgcagataccgtctacaaagttgtctaggtgacttgcagtagattttataatactgtaataaaagaatttgtttagcccctggtacaccagagcacaaaaatataaacatacctttatcagggaagttcaaagaccatgggtgctgatggaatatgctttccaataaataaataaataaataaataaataaataaataaataaataaaattctggccggaagaccatgatccctagctatgtgttaaatgtcatctcagataaattctacgttccattccacagcctctttgaaactctggaagattagagaatttgcagtaactaagttgttgctttaatttcaacctgtaaaattgttggaaaatgccagtttcaaactaagaataggctagccaagaacagtgctgggaagtcctcagagcagagaagacagctgacatttggcccaacttcctgatacttgaagaacaggagaagttcaacaaaatatgagctatcttgggccagcaagtcccttcttgtctgtttggtctgtactaaatgtaaatgtttctcttgccttacctattgtttatagctttttactgcagacactgctttgtatttctgtttgaagtttgatttcttttcattatttctatatcatctctcagtgacaaaaatctatatcaaattggaagacatcttagctttaaataaaacaacaacagtgctagtaacctagccctaagtgtgcttgtcattgttttaagtacagagttaaatgtccctggatttaattttgtctccttcccttctccatcaaaactctttggagataaatcaaaaagcccaagaagtagtaaccgagccactggatgcccccttcctgcttcctttagaaatgggggtgatgcaatttaaactcctaatttttagacttttgaattccaacatcaacaagcttttcttggccaccatggtcctcttgtgctgtagacgagggggcctcatgggtttgacctcttggtaatgagggatccctggaacaaccatggtaaactgaggcacggtggggcacagtgggaattcatgacttggcgtgcctttgggcgctctggaacaggatttattcattttggcctcttaggagatatgggccccaacagtcaggcattcagactggaagcccggatgtcgattcagtgccctcggagcccagtgggtgttgagatgaactggaaaggcctaggtctccacagggagatgaaggcaaggaagtgaagcattttcacagagggtatctcatccttgtgagcaaactgtgcagagggaaatgaaaacattgatgagagagatggggggaaaaatagacagaaaacagaatttacaggagtaacattttgtaggaatagaaagaaaagataataatgatcaattaaccgagcaggggaatttatttcaatgatgttctttgaaacaaaagagttgtcttattaccactcctaattaaaggcatcaaacatttgtggtgggatagaaacatctaattacatattgcttggagaataagcgtttttaaaatctcctttgtagaaaacacgtccaacagttgacatgaaagggttaaaagcagaggcaaggggccgcagggtccttgtttcacaaagcaagtgagtgaaaacagataaaaattaaagagatagcaagatacatacccagtcctagagagcagagtgtcctagtgatgtcctaggggtcccctctgtccatttctcagggtagctggggcaatttcctgacataggttctttagaacgcaggagatagagcagccacaatgaataaaatcgcccagatagccatctgcaggacatcgaacagcgggaaggagacatgactaagcacccagtaagaatggcgagcagagagaccagaccttgataccagattagcagatctgcggcggggttatttcatacagaatgagaaatatccctctgatagattgtgaagcagccagtgtacaaaaactgagaaaaacaaagtggcagtagaagaagagatgtttctgctgccatcccgggaaaacctgcccgaggatgaccacacaactgagataaataacagacatctcaccgaagactgacagcatgtgtctggaatggttggaacaaactgaactctcggggcatggcgatttgaaatcctgtggtcgctttgaatatggaacaaggcaaacataaccgatatcaagtcaaaactggaaactttagctgaagtcaaagaacggcaggcttggtggtgcacacctgtaaatcctgacctcgaaggctaagaggactgggagttcaaggccattctaggctccatcgtgaaaccatagctctctaaaacaaaaccaaaaggaccaaagagcagccaagcagtgggtaatgttttgtgaagcactttcaaggcttcagagtgttttaatctgaaattactactttttttggttttctggatataaagtaagctcatctacaagttgtctttccaaatatactaagcccttaccttttcagtggcagtaacggaatcccccagaacacagttcatacagatgccagacagcagtctggttctacctttgatttgaggagaatgaccacactggagcacccgtagtcactgaggtcatcccgcttgtaattaataataaagaagtggcccgtgtctagtttttctccttgggtgcaagagtttgctgctggtgagtgtccaagagcggcaggaagaggtgccagagattagctgcagacagacagtttaagtatttccgggtcatccttggaagctgcacactgggtggcacacacacctctaaccccagcactagcagagaagagaggaagatcgggggttcaagatcactcaagggttcaagatacagtgaggcgggggccagcctgggctatctgagaccctgcctcaaacaacaacaacaacaaccagtaacaaatttagagcagaactaaatttaaatactttcatccaggtttccttaggtgcaccaagaaggggccaagcaagtaaaaggtggggccagagagatggctcagtggttaccaacatgattcatgatacagagaatgggtctgattcctagaacctatgtcaggtggctcacatctgcctacaactccagtcccagggtaatttgctcctctggccttcatggcctgctctcaagaaaatgcccacccacatacacttaattcaaaatgccaagataaatctttttttgaagtggattagatcacaaatctacaaacacaagactttctgtctttcgaatatgaggtcttaagagataactgtaccaatgagaaacagtagtagcttttcagaattcctgtccccgcttgtcttgttcccactgtgtcctgtgaccttctgtggcttttctcctttaatctctgtgtcttccttatttgaaaatccacacctgtctctgcatcgcaggactcacagcaagctgtttctgtcacgatgatcaaatgatgacggacggctcttctataaactagaaagtgtcaccattaagcattaagtttaacatcagcgcaattgccagacaaatgacacagccaggtgcctgtgacagcactgatgtctgcatttgtcccttggttgacgtctaggtggtggcactgggggacgtcccggatggcactctggtcaccgtcatggcaggcaacgatgaaaactactcggcagaactgagaaatgctaccgcggccatgaagaaccaggtagcgagattcaacgacctcaggtttgtcgggcggagcggtagaggtgcgtatctgtcacggatgggtgtgaaattcgaacccgggttttccaaatagtagccgtttcttattattgatgcagcataatgatatttatttaaggtaatgtttatttgatacctaacaactggatattatcacgttttgatgactaaattggcttacaactgacttggaacgcacagcgtgtgatggacttggaacgcacagtgtgtgatgcgtgaattgtgaagttcaataaaacattccaccgttttcctaaactgagataagtgagcgaaccaccccagaatgaggactgagattgtataatgggtggtcactatgggataatcaaagccatgagcctttatcatatggtacttacgctccctcgaacatgcgacagggtttcagttggtcacatcaataattttgggggaacccttattgatatagttttaagtaagcttatattcctaggattaaaaaaaatggactcttactggtacatctgagagcagtgtgaccttcactatgcattctttgtgtatggtttggtgggagaagccaggctcacttaacatttagatactgctcatgtgagagaccaaattatttccttagcccagctggacatgcagttattatgcctcacctttaaccagttattaaactattggagtagaaagaggacctgctctcactgtaggcttgtctgctttccagttatcttccgaggtatgtgttctctcttcatttcaaggagctacggcacattttacaaacatcagcaggccgtgtgagagtctaggagcaaggtcttcgcttaaaccctcacctttgtaatgtagaattgaacgatcttagccgtaaatgatatctctagcttaatcaaagcggaatgacatatatctaagtcatacgatcagttctcagagaggggaagacacagggaggggctagtcgtgtccatcgctcagtggtagagccttccgtgtgaaaggcctttagtttgatccccagcaccaagcaagcaaaacaaagcaggtagactggcaacagacaagaaatgtcaagcaaagggattgttactactgattctgaaggcgttcagaacagtggaaattccgtgttcatagtgggaaagaggagagagttgagagtgtgagcctggacttctgtgtttgctcccctacccctgcccccagatgcccagggcattttcagaatgatgtcacagctggagaaaaaaatgtagagaacatataatgttattgaaaatatgtgttcgcgctactgtgctaataatagggtgattgaaagaagagtctacccacttatcgaaggcctgggagagcctgcgcccttaagtggatccacttggaatattgaaagtctgcctttcagcaaatggaattcgcattacggttcagaggcatgtgtttagaaaatatcagggaggtttcagatgagtcgctggccgagcgggtgggaagccaagaagaaaggaagaccccaacagccaggcccacgcccacctgcctagcaataagcttagttcgtaggatctagctgggttgccagagaacatgtccccatactcctaggcgtctaagtgggtctttttgtcatgtttggctatggaagtttcgaagactatttaatggactattccagtgacattttcccgtagggagttgcatggtggctttgtgacgaccgtggcagccagttgatgatgatcaagagtggggttctgaaagcagcgtgcctgcctaccttggtggtgctatgtgctggtcgcctatccctctttggccatttctgttttgagtgggtgactaagaggtgctggtgtttacctgaggaacaatggactgtttccccaaggcgtggagtgtttgcactctgctgtctgattcgtgccagtgtgcacttgagtttgcataaccgccccccccccccaggaaaacagcagcacccaaggcgaggctggtttcccataccctggaatgaaaaaaattaatcagatgcaaaaaattggattatatttgacttgagcaggctctcctcttcatgaggggtaacgagtaattaaaactcaggaggactaattgaccacttgacccagttatggtttctatatataatgttggtcttgagtttttatggtttaaatttttcatgtcaataccaagacaagtgagctgtcggtgtaataaacatggttttatctcataatttcactttgtagtcacaaaatatgattttattttgatttttcatgccatcaaagcctgctggatattccccagcccagcccaccccaccctctctcactctctttctctccttctctcttgcgatttgcttcccattagaaactgaagaaatgactctcactaattctcacaattagccctaatctccctggctgaaccttatcctttaaaagttgcattatgctttatggaacgatcttaagacccgactatttcatttttcatttttttaaatgtgcctaaaaatatgccctcagaggccacacactggcccagaaggtcctggccttccaacacatccacattccgtaaggtcagtttgggattctgtcagtgatggcttctcggaggggcctgggtactccgtgtgggataaagggtagagatgacatgaatggacaccctcctttcttgttaccagatgccagattttgaggattgtgaccctcacagaaactgccagttaaccaaggaaggatttttctctgttccaagaaatggatctgtctgggagctggctgatgctcagctctaacctcaggttcagcctgtgactgggaaaacctgcctgtctggcttctaagccctggctgcctgctggcccctgtgaaaacctggtgaaggcagaggaagctcctgcctgcttcctccatgaccatggcttccgcctgctctcctttagatcagctcgggtgtatctcctcataggaatgtttctccctttgattcccaatctgcatgttgattatctgaggggctctacaaaggaaggagagatagctgctcccggttgggagtttagggtggggtgaaaatcagaggggatcttgggagaccctctctgaagtccagagattaggagggcgctcaggaggctgcccagaacaatgcatgctttagtcacagggcctgagattatcagtcatctccgagttcagggtcaaaaagagatctctttcatgagggaggtcaattagctgagcctttttctcggtctgtaacttgctcccatgagctggggtgtgaggtgacaaacatttaagaaaccttggcagtgacatctgcaaacacccatttcctgctggggtgtttcaccagctgccgaagacttgatccatcagtgaacttagctttaacgatgcctgtcacagggaaacagatcacgcaactaccaaacatgacaacagccgtgtggcaaatgtgaggagggagaccagagccaatgctcacttgttccaagttggtgattctttaaatctctggaagctgtcatagataattctgaaaatccccccaaagatttcctaaggtccaaaaaaaaaaaatgcacacgggcccagatttctatagtgcagcttagtttcgggattgtttatggatcttcctgggacgtgctgatactaaaacgtgcgaatctggaacgtgtcttggactgctgagggtcagttcaatgccaagtcttaaacacagcccatactcagaagataaatatacatgaggacccacaaggttgacattttcctgtgcttctctgttgtgtggatggcggtgatatctgtagactcaggacctggttggtagagggtaggaaggtatagcaatttaaaaggccagggcaggcatccggtggaccactaggcatatggctggatgtaatcgtctgtgtgggagcgaagccaccattggcagagcagtctcttccctagtgactgtcagtcctggctgcagtgacatgcacgcacatccccagaagaccagtagtctgctgcttgccaggaacaggtctcctttcttagtggaatctgctgtttacgctgacatcctggcagctcagaacttgcccagtttgtgcttttctgaagtgaaattccttcctggannnnnnnnnnnnnnnnnnnnnnnnnnnnaatatttatcccgtcacagtctgggctccttcatatttgtgtagtgtcggtttctttaagcatttccattccgcttttacgtgatttggggtacagtgtgggatgttgtctctctcggctgagcggaaggctgtggtggagacgcgttgcgggaaggataaactgttctggcgctccaaaaagggagggccgccttggtgtgcggcttttccgggagagttggtcttagtgactcatgatgttatcacaggatccatatcattctctatttgatcacaaattcatagaggaagaagaaatccaactgccacccctagggatgtttctcggagagcagtccatgtaagcactagaaactgattgttgggtctcctagggagaacaagaagaaggaaaaggtgtgcgctatgttaaaatccaatgtccacttttcttccattttctttctgttttttttttggttcacggtttgtaatagcgcatgtagtaaaatctgttttcttcggatttaactacaaacaaacaaaaataaaatggtacaaaacaaaaataaaaactaagcaaaagccaacaaaactaagggaagcctgggcccctcagagaacaagccccggccggtcctagcaaacacttcctttccacagcaggccaacaagcttcaccccagaaccaacagcactgactcagaatctgcctgtaaggatcaggtttccccttctctttattccacaataagagggttagcaacactttcctcaagcaagcttctccctgtccagcttaaagcgtggggtggccggagcctcagcagggaccaggagctgcccgctggacgctgtccctgatggaaactgtagtgtcatgctctaccccagcgggctttacaaagtgccaggcatggcggcaggtagctttttgtagctgaggttatttgcatgcgcaggatttttcccatgtggggcagaagcagccctccagccctcctatggagccccctccatcccttccccagcagctaggctttccttatgagccagccctttttggtcaggactaaagactatcaatcagaaagtacctgtgagaggaataatggttgagtgacttttagaatttcctgtttgacagcatcatagacataaacagtgatccagctagccactcagtgagaatagttctaacaaatcaacctgctagctcgctctttcttcttcttcttcttcttcttcttcttcttcttcttcttcttcttcttcttcttcttcttcttcttcttcttctccttcttcttctccctcctcctcctccttctcctcttcctcccccttctcttcctcctcttcttccttctcttcctcctcttcctccttctcttcctcctcctcctcttcctcttcctcttcctcttcttcaccttctttttggtactggaagtaggctagttatagaagaatatattctgtttcaggattttttttttaaagaaaaattacttgttgaagcagagagatggtgtaatgtctggtgcgtgtctcctccctgctgttgattataaaacaagctgagaacagtagggggtgtttaagaatgactgcggagtcacgctcgatgtctatggaaggtcggtccagaaaccccctccattcaattcagacatctgcagctgctccagccacttatacaaaatggcacagccttagtaactaaccctcaggacaccctctaacataatttacatcacacctagattgcttatgaatctagctaacagaatatcgcttgcacattaatagttgctgtggtattgtttagggaatgataataaaaaaaaataaaaataaaagaagtccacatatatgttcagtacaaatggatttccccacagatatttgtgattgcaacttcttgaacccaggggacccatggacataggaccgactcatggagtggtgtgctgtttgtagactctgttgggccgttaggcagaggagcctctactttcattgagagagttcttggactaaaatgttcttgaagccccagtgcacatgaagccccagtcaagcaattaacaagaatgggtaagcaagctgtctgtgaaaatgtcccagcgtgccagccacctatcagggagcgggtgggtaacggtaatctagctgatcacttcatgcctgtgtttgtaaacatgcactagtgcgtttcaggcaacccctctatgtcctccgtgcctggctctgcaacgaatctcacatccacacatgtttggggctgtgtggagggtggagctaacagtaccgtccagttttactctgcactgcgttggggttccagcttacagcccagcctctattagcctatattggacagtctatccagtttgggaactctatttgctatgcccagacactctccagccagcgagccaggctacatgggtccccacgagtgtacagaaatcccagtggtctcctgtgacaggctcaggctgcagtgctggagccccagcacgttgcctctggcttcctaagccaaggaggaaacactcaggagccacgcaaactccacgcctctcagagaagatggaagtgaattggaggcaaattatctgactcatagtactccatgcttttagaaacttaagaccctcttcatgaacacatggacccaaaggtaccacctccccaacacctgatcccaggaggctcaggtccagagaatgggagggctggccagtgtcctctagagaactgtgtgcctctaatccagtcactttatgcaaaggaaggagttgtatggaattcatccgcatccgtatcggatctttgtggataagacaagaagggagggactgtctggaggtagaaaggactcttgtttgattacagtattggctgtgggtcttcacagacatttttatttctatttgagatgtctgtatggaatatattcagcctctatcagtttctgcctcttattaatgagaagctatctgagtctggatcattcataaggctctttgtctttttaaacgatgtctgcagaacctgcatgcagtaagggccccattttcatccttgtatttaaaccacccaagaggcaggtccccttccctcttctttcctaggtcagtgattgatcagttttgatgagcctcttgcttagtttgtctctgctgggatgagttttgacccctaagggacatttaatgaggtctgcagatgtttttgattgtcacccacggagcctgaggggtggtccctactatccagtggataaggcccaagatctgctaaacaccctattatgtgcagaatggcccctcccacccccaacaaagaacaattctaaaactttaatcgtgccaggactggagaaagccggacttgacccaacacttccagaagttgttagatatctatctcccttgctcctcctccttccactcttttccttccttgaaaaaaaaatccgcgaaaattttaattcatggtattcacactgagtcaaagaggaaacagacaggaggctcagaagttcaagatcacccttggctttgtgttgagttccaggccagcctggcgtataagaaactgtgtgtaaaaaacaaacaaacaaacaaacaaaaagaaatagtaaatgaataagaacgtgtccagaagcccagacgaatgagctttcgtgatatctcccccccccccccagagctgcccagtggtaccctcagtggacaattcctgcctggcaggtaggcactcactcactccttagatccctgcttaaatgttcaactctaggcgcttagcactgtttaacggctctaggctgtagaccttaccatcttcttaacagagagcagagaggatgtctcccattgacacttaagagcacccatttccttgaggatgcctttccatcaggggaaaattggagaatgcttgtgtcatgctttgttgaatgtttgacagcaacccccaccttcctcatggtgacaatctgaaatacctgcagactctatcaaccctcctcgcctgagggtggagaacttcagaacaacttccctctgtgcctgtcggctctctgccgcttttgcccaagggaggagaaggaggagccttgaggatcgatttcagagataaacgctggatactggttaggttatgccttccctgggtcagaacaagctggctcaagtctccatgctgggtcaggtctcagcagggacagtatccctagaggagacagggacattggcagggtcactgatagacctgtttcttgtggctccttgtggatttctgagagagaaagcctcctagcctacccttcctgcccaaccagcctcctggagctctgagggcccgaaagggttatattcagcgggcactgagattttagattagcaatgggagagaggaaattaaatatggactgtaatatgaagcactgtttttcatgggaaaagaagttctcccaacttagccagtccaactcttttgtccaaccgttaatagcatgcaaatatttatgaatcatacatgccccttctaattcccgtgtgtattttcacaataaacagtgcgtttcgacaatggggcagaataatccctttgtcccgtagcagagctgtgcaggctggcacccggcagcatcgcattcttcccgagtggtaactgctgtctccacccaagcttaggggaggtttatgtctgtgtgacccgggtggacgggctctggacggtcctccaggcagtgctccaggccaccccgtgttactagaagctattcttatctcattgtttttaataattttcaagggagtgctcacacttgggtcttctctggtggacacagagagttgatgtgcactgaggtttgctgccacctcttgctgcaccgttgacttctattctggccaaattcctggactccgggtcacactaaagccacctgattcctctgattcatcgcaattccacagaaacacgtatctcttcagaatgattcggcgggtctttggaaggcggtgtgagggaggctgagaagtgctcaggacgccctgagatgtgtgagccttggtttttcctcctgtgtagtgggcatggtggtgcctttcactcaggcctcacagggttgttgttaataataatagcaataataataataataataataataataataatagcaagatggtgtacttatgaggagacttaggagacgaggcatggcggctctttctactgaagggtgggattgttggaagagaagggaggagatgacaggaagttagggaaggaggtgcccctcctactgcctctcatccacgacaggggacttttatccctttgttctgctaaggacctgataaaacggaggcgtcacaattactcataaatcaatgcatgcataacagtaataaacaactaatcattttcagggcccagtctgggccctgtgtgttgtgcatatgcaacctacctcccttccctgtgtctgtttgcttaccccgtctcctaaaggcatttagggagagcatttcattcattcattcattcattcattcactcattcattcttctcttttgcttttttggaaacagagtgaacactgttcagcccaggctggcctggaattcacagtgatcctcctgcctcagcttgccatgtccccgttcatctatttcttgattcatcatcgcacatctgctgtgcacctattgtgtcggctagcactagaggaccgtgagtccgctgaagaggcgttctcaaggtcaagggttcatgaggggcgacagtgaagcaggccttcactgttctgtgtagacgtctctgtgacaaaggacaggtgcaacgggggcaaatacaagttgtgtgtaacctagcgaagggcagatggtttccccgggcaactcgtcgtctctcttgaaacctatgggaggcaacagagtgtgcatttggcgggggtgtgggggcgcgacttgtctgtcgaggaaccaagagatacaagggtggcctgctctggaggccttggcatacagggggctgaggatgctttaagggccttgacatccatcctgggcactaggtctgatgccagtgacctggcgagcagccaacagatccttggcagagacgtacatcgacacacaggtgtggtgcacaaacttagactgcagtgtgcagagtagggaacttgtttgggggttctggggtgctcagagaccagtcttactagtgtctcctctcaggcagcctcagatctgtgcatggagagctcgcaaatagccccatttagcattagcgcccacctcaggctggtgtccagctttcctctcttccattagcatccagtccacctgccctgcctcctttcagagcagcaaaggttcaagaagatgctgagcaggaactgcagaccccaacactcccctccctcctgaatgcccacacccatacccagactccctgctgctcctgcccaggttgctgtgggcatgatgctctaggccacaggtacaggcgggggattagtcaggcagccttgggaagccaccttaggctttttccctgcatggcccctacacaaggcagatagaccagcacagcctggggaatctgggcatctatcaacgaaagaagtcgctgagtggaaggacagaagagcacgcggccttaatctaaagagactcttgtgcaagtctgggctaaaaacaggctagtcatctgagataatgtggggctaggattccaagtgagtaagacaggagagaacatgcagcgtgaagaaagaaagcagagtccctgggactctcttggtgctttggtggggtgggcaagcgatataagtgtctgatccaattttaggatgtttcccaagatggcagaatctatagacatctccttaccttattaaaatgggcacaggtatagcatttgtgtgcaatcccctctctctcctcttctgtatctagtttgtgtcatctcagaatgactttaccctacctgtcgcacagcagatgccgtatctctgtcctgtatgtttgagcggtggtgggccggaccctcagagacagagacaggacccactgcgttcattttttccctaaggttgttttcaacccagcacatcaagtacagccatgcttcccaggcaggggcagccatcgctgaaagtcggcagaactcgttgattcactttttcaagcttgtatgtgtgtgtgcacatgtgtgtgcaggtgtgtatgtggaagcagcagctgctgtccacactctttcatcacttgggattttttttttttttgaggaaaggtctctgactgaacctggagttcaccatttcagttggcagcccccctcccccaaatccatttgtatcaacccccaggaatagggtataggtgcctactgcccactggcatttgacacaagtgctgggcgtccaaacacaggtcttcatgctagtgcagcaagcaccttatctactgagcatctcccagcccatcagccctcctttttttgttttgtttttgttgttgttgttgggttttttttttttttttggttttttgtttttttattttgtttgggtttggtttttggagctttctctgtgtaacattggctgccctggaactcactctgtagaccaggctgacctcaaactcacagagatctgcttgcctctgcctccctagtgctgggattaaagtggggtataagcgccctgctctatttaatttaaataacattagaacaaaagacacaaatagggtccaagcccagcccctgagctctactgagtcacttccagagaactccagagaatgtcacacatggctttcccattctccaagtggatggctcactctcaaactgctggtcactccgcacaaccaggcaaaggttgtttctatggagaactgagttctgtgcttcaagttttcagttaggctcttgaggcttggacgttggccaagagcagagactctggtctgcattctgcctacatggacacagacaggacagggtcaggccagctggacacaggggctcttcgcacgaatatcagtcagcctacagaagctgtgcaagtccaatgggttgtgtcctgcctataagtccctaagtaaattatgcaactctaccgtcaacagatcatggtggaaatagcaagaggaagggaaatggaacggacacacgtgtaagtgccggctgttaggaagcaccggtgggaaaataaggggggaaatgctaagtgcatgctgggaatatcctgcaaacacagaagttatccctggaatctgggggagagcattcatttccttggaaaaaaaaaagtccccaaccgtgtgtgtgtgtgtgtgtgtgtgtgtgtgtgtgtgtgtggttaggcttgcacatgtgtacacatgtgtggatctcagaggacaatttgtgggaaccagtctcccctttttcagtataggtgccagggactgaactcaggtggctgggcttggccgcaggcctccactcactgagccctgtcgctggcctgggtgcgtgcatttccatgctcagagttacttgtacccagaattggacatggcataatctacggtcccctgtaaccttggagaatcttcggggatttcctgagtttgtgaagagcagacctccctcccagcccttcctggctgttttgatttttcaaaggcaacattttaaaaagaaagtttccttccacttgctttggggtgcctaaagtagcaactgtgcagaaggttccctcagagagacacaaagagagggatgttaccggtactgcttaaggaaaatggctaccccacatcccccgggcagaagatcctttgcatgtgtaatcttccttttcgtgacaaagggcaagtttcacatccccagaaacagtccccaaaaggagaagatgactcatgtgtcccaacctacaccaaggagaatgagagttacggagccactgagaactgggggtggggggtggggatagagcagcccacccacaggccaagaagggcagcgggctcccagcaagagactggaggccaacgggcttggagggcggggcaggggtcaagctggaatgtagtgatgtttagagcctgggcaagcagtgatcttcagccacctatcttcttgcttactttttgcttcctgccctcagccctcctaggggaagccatatacagtgttatagtatcttgatcctgcagtttagtcatttgctacatgcaaagggaagcagtgtgtctcaggctagacagagaggcagggtcctgctgattctgtattagaccccagggctgtcagtgtccaccactgagtcctcccctgaggccctgggactgcctggccttgcaaagcatgccccacagccccagcaagtgtccaggaaggctcaccccgtgaccttctttccaactaaataaagcagttcgtattttgttctgccctttggatgggcagactggcgtcgaggaggacgccacatgttgctgtcttggcttgtttatatagtggatcagcccctcgctgtcatgccttaaagggtggccagctggtgatgcagccatgaaccgccaagttcaagtagaaatcagtctgagcagcaattctgacacctgttgagcgttcctcctcttccccaattcctcccccatcaggtgtccttgggcagctcacaaaagctgttaccactttgtattttgcagaagagaaagctagggctgtgagacagtaacaaagttgcccttgagtatgactgtacaggcaacgagtgggattcgaacacgggtatactgggttgctgagctctcacacttagccctctccctatgtacttccagctctggaatgttctgagcaagctttgtctctggatgcttggctgagtccagacttcccccttcttcccctggtctttcttttttgatgctccttcctcttgccttcagccctcttgtcactcctgtcaaatatcagtcctctgggatcacagccatccactgaagctgatgcggcgggttccttcagtaccaggagcagaataaagatttcgaggcttccccctctctgtcggccctctcactggctggatgattcagagcatcagtggcttaccgcttgcccctctaccaccaaaagcctctgcctccagccaatgcccctgatcagcaccaaagtgatctatgtcctggccagccagggtttctgggaaagtggggtctcccatcaggcaacagactaaaacatgaagtcttggacagcccagtctctctgccctgccttagaccctgaagatcccaggaaagcgagtgttattttgctgaccggtactcctctaggtcggtcccttgtgagtctctcctctcctggcggctgcaagttacggcggagaaaaacacttgagagtgtttcactctccacgcccatgtacttaaaataccaagcccataggtcattttaataagggaatttggctaacaacacatgtgcgctggaggccctagctcccacgtctgcaggtgctggccaagcagggctgtgtctgagcaaccacgggcctgggtgggtggagagcagagcttgcagcttctgtaattctgagcaccgagatgtgcctctggctacctggaagccgttgtcagggacgggcctaaacccagctggaaaaatacaaacaagaatggaggtcaggttagaaccagggtgacaaaaaagtcaccatggtctatagatcataagcagatgtccttgtactcaaagctcttaccaggactggggaggtggctcagttggcagaatcctggcagcacaagcaggaggtcccgagttctatccctagagcccaggttttaaatttttaaatttgtaatgcatgtttgaaatcccagttctggggaagtggagacagacacatccctggggctcactgctcagtggcctagctgaatccatgagttccagaccagtgagagatcctgtctcaaatcacaagatgggcagagcttgaggaatgatgtctaaggctgacctgtggcctccacataaaactgcacatgtgtgtttgtgcacacacatacacacacacatgcacacacgtcagctgcaacccgagcccatcgtggggattgccaccagtttatctcctcccaggtgaaccccattacagacatgcagtctccctaatctccctccctggtgggaatcactaagtggaattcctcgtattgacacattaaaggatgaccataaagtcataggaaccatggtgctgagcagtggccataccagttgggggtcacagctgtatttctttcctaagtcagctagtctctggctaagccgacactctcacagtcttacaccttctggaagcgccagtcagctccaggagagactgccgctgagtcctgaacttgttcgtaggcagctgcctagaacagcttgcacattagagtcacaggggcaattttcactttggaggatggtagttgggcagtgggtgggagatggggtgagtggaggctcctgagtttagattttgcacaggtggccatttatacgccaatggtggaagcacaaaggttgtgagtgtaaagtttagggtcattccctctgtggttaagtgaggtggttaatattttatgtctgtctgtctgtctgtctgtattatgtatttgtgtgtgtgtgtgttgtggcttatctatggaggttcaaggataacttgtgtgagtcagttctgtccttccactatttggatcccaagagtgaaacttgggttgtcccgtttggcagtaagtccctctgcccactgagccatcttgccaacctgagctgagtgatttttgaggatgcaaagtcacctgtttaagtctttgccttacactcttttaagaactggtaaaaatccatcttgctcatttcacgggtcttctctgacaaccaaatgaagtaacttccatcggaatgtgtcggaagcattggaaggtctgcatacacctaaacatgtctacattgtgaaaacgagattcctcattgtaggcagagttatgaaaggagccctggtgagaattgagctgttctagagtcgagaaacccttgcaatgctaagcccaggatgctctgtatttgtgccaggatgaagaatgtgcctggatggtctccacccacccaggatctctgaacatgttcttatttagaaaattcgccgatgctgtgaggttaaggccatgcatgaagaccttcatgtggagaccatatgtgttagccttcatgtggagctcacctatgatggccttcatgtggagctcatgcatgacagcttctaaggatggggagattcagagacaagggcatataaggaggcagcatacaaaggtagaagcagtaattggggcactgagaccacagcgcctccagaaggtcaatactgatgacaatcttaggaagtcaggagaaggagaaggaaggagccaaccacccccattgccacctaaggtgtcttacaggcaccttcatcttggccttgtggcctccagaacaagagactgagtctgtgtgcattaagccatagcactgtattacatcagccccaagattgcttgaactcagtgttcttgaagtctttgcacttccgaggctgaaagcaacagatgacatgattctgtgtgtggtgacagtgtgctagatagtcacaggtttggaagacatcattcgagaccttcatgacgcatttcaggcaagccatggctgaagccagcattggagaatgttagatgctacagtactccccaaccttgagctgttaccgagctacaagctcccatgtaggcatcttactgcctcgggctcagaagacactatcagaaaagatctgtgagctattccacaagtagctactcttgacctgggacccagattggcaaaaatgtgggagaatccaactcttcgaatgctctatatagaagcacctgatcttattgtctgttcactctcctcacactcgcgcatgtacacacacacatacacacacacacatacacacacacacatacacacacacacacacacacacaccaagggccagctcaggaccaagctatgtacctatcagtcactggtgtcttcaaggtcctttacctatttcccctttggctttacaatcttccattgcctgagagcctcttcctgttctcctttctcacttctgaggaatgcgaggctttggagaaatgggccctgcccccaccctcacccccacccccaggcagattaagcttggaccatcacaaatgctgtcaaagcagaaggcctaattaatcaaggtgaaaagtgatttatggggccaatcggaactagtcacaagcagactcttccttcggggaaggtcacctgggaagcaggtcagtgggagactcactgggccttgaagttgggaagacttgagagagtgaatctgggtggctggagaagtggggttgagtacagaagtcccagagtctggaggcactacttaaagagctgagctcatgagctgcagaaagagggacgggttctagggagaagattctggaaactggctctaggattccatgttgatgataccaaggtctcgcccgtccatcatgggtgcttggtgagaaaggaagacccattgtgaggtgtgcagggtgcttaccgtacagcagcaggctcggcactgcctttacacagtcaaaggctacagagaacgatgagcaacttcctcaggttacacatcagcacaccattcttaacatgcccaccctcagcctctgtggaccatccctccaagtctgctagatgctaaggtagaaaaccatatggaatatcccctgatggtgtatccgcaggtgtctgatgcaagtgccagagcctggcagccttcttcctggggaagctggggaaggattcaggtacaaagtctcttgggccgtagaaccccagtctccagaaaccactcctgtctggtccactgggcctctcaagatgcacaagaggcctcctcctgaaccttgcctgacactattgttctctttggcagagactagcagacagacttcagaggctctggggtctttgggaaactgtactcttgatagggagtgctgcttgctctggttataggttgtattcttgggaaatgtctcagtggccttccactttcagctggaagtggtatggtttttctaaggaggttaggcgggtaagcagggttttgcagtagccagtgccttttggacacagtttgttcccatttcccttgagtttcattgtgtactacgtaagaggagagattgtactagctaaggaactaatatttaggtagaagacttaatattgcacccggccaaatacgggcattccatacagagctctgagacggggagaggtgcgtgcgtgcatgtgagccttcggacccccatgggcagacaccattacaatgctttacctcatttatctttctctcgggcccaaaaggtagaaatttgggaaaattgcctataccaattttcaggcaagaacaccgagcctgaacaagaacacagagaagtctagatctagtggcttgtctgtcaagcatctggaatttaaaccagaatccaccccctgaagcctgctctgtctgtcctgtctatgtcccttgctctgtcctatcccagccatgctttcgtagcatctagtcattgggtatttataaatactatttagcatcaagcatcaatttctaataggtacagagaataacatctaatttagcatgtgctgtgttaataaaaagatagagaataagaatatgttctatggaggtgtggtgaggtatgggggtagaggcatcccctccccctgaagtaccagccacatgacggtataacatagaatagagtttattcaggccatgggaaggggagttaagagggtagcagagacagaaacgcagagagagggagagagtagagaagtagaggctgaccatgaccacgtggaaagagggggcagggaaaggggaaggaggggggaagggaagagcccaagagggcaaaagagaagcaagggagcatgagaacaagagagagaggaggggacaagcaaccccttttatagtgggtcaggcctacctggctattgtcaggtaactgtggggtggagtttagacagaatgctaacagcatgttttcacacttagaaactcagtgtttgttgatttggttggcctgctcatttgttttgagacagagtctcatgcagccgaggctaacctcacactcactgagtagctgagggtgactttgaacttttgatcctcctgcctccgttacctgagtgctgggattacaggtgtgcagcctggcacgcagtgtatacaatgctggcatagatccttgggcttcatgcttgctagaccaccaccctaaccgctgacctacccctggccccagaaagtcagtcttctctaatcctcggaagtacagagtaaagagagaaatgtgtgacggtgtcttttcttattcttttgcctggattttacaaatatgcagggaagacagagggaggttagcagtagataggtatgagtcccagctgtcaattcccaaagtcctgatatgggagtaaattctgatctcctggatcttattggtaattaatgattgacttatagctatgtgactatgcactatgccccacctggtgaaccctctgtgtgcattacagatcagaaataactggtgaacccactgtgtgcattacatggtgaacccactgtgtgcattccagattggaaacaaaacctaggtgtaccaggagaacaagtcctcctgccccagctctgttgcctttcaagcttgagggctggacagcatagactgacataaggtagagaggctcagaccacccctcaatatgttctgttctgtttcctgtctccacaggcaagagcttcactctgaccatcaccgtctttacaaatccgccacaagttgccacctaccatagagccatcaaaatcacagtggacggcccccgagaaccccgaagtaagtgagcccccttggggctggtaactgtctgggctggtgtacacaaagacccaccaggtctcacaatgtatctgtggcttcagcctctttcctgaagagatgtcaggcccctgaagacaggagaagtttccaggtcaactctctcacctctcaaacgttgtttgtgtgaactgggttctttctaaagctttggcttacacgtcaaagggaaattaggccaactcagatgagttaagaacactttgggtttgtttttgttttctgaggcaaggagtagacccccacatatacagcaatgttcagtgtgctcagacacaagcagtggatagacaattggccaagtacagggtgtgacaatgaagacctgaaggtcacggtggacaagaagagatggcttaccatccatgcttgtgttaatttgttaaggccagagatgaaatctgtgaaaatcatcctctctttttcccttgaagggatcttattctaggattgtttaaaatagagcctgggccgggcgaagagtactgggggaaaccagtaaatatagaaagatagcctccaaaataccccgaaactcctgtgaggagagtgtttaaaaaggagtggggttgtttagtctgaaggaaagatgtcttcagagtgacttaaggactatcttggagtaaacacaggagtgacactcttacagggccacaccccggcccaggagctgcagctgggccacagtccaattctgtaggcagatgagcccggaacgaagagcagctcacctccaaaccatgtcaggggcccctgggaagtgataccctcagaggctgggatgcgaaaacatggggtccctcctgcacccagaagctatggtgcagagagattatttgataagaatgaaggtactgagaacaggggccctagaacagtctcagagcctcccagaaccccagtttcttgtagaaaatgtatgtaaaggtgacagccgcattgtgaaacttaactagatgaagccaggtgcccggtgcagggcatgcgcttacagaatgtcaggaatctccgtggagcttccttgcctcgacccctcgtttcagtgtggtggttccattgagcctgctgaggtagttccctcaacaggcagccctgtccacacaggcatctcatctgggctctgaggtagtagcccttgggaatttggctctctgaggctattcagtggtcactctggctatggcagcgtctcctgcaatcatggtcatgacttctggtatctggaccacccttggaaccagtcacctctctgcctccatttccccaattttccctgaagcagtaatacacagagaacagctgcagtcaccagcaataccacagggcagagtgttcaccctggctgtgcttccctcccctccctgggctgggcagctccctccactctgcccaccctgttcccatttttattccctaccaaaacctgttgagcttttccttgttaacgtccttgagatttcctagctgtggtcaggttcagggaactctggggcttgtgctggatagcatgccctactcctttagagtgtgaacagcagaccaaggtagcacacagtcctcacacagcccaggaaacctcttggcactccctggtttcccagagtagacagtcatgacagaacacccgagggccatggcccagtgcaggggactggagaggaagcaagccgaggtgatgacttagcacagggccaggagagggggcgaggtgtaggaagactgatgctgagagtgaccgtgctcataggatggctcctttaggtgtccgtggctctctaaagcagctgctgcctccaggacagattatacaatggctgtgcacgaggaaacagctgaaaatggggacccatgagaagccttctattttccttattcttccacacctaagagagacaggctttcaccttgtgtgtattttttttcctggaacattccagagaagtgaggggggagctgagccttagaaaaagcaaacggcaggggaaagggaaacggcccccatattggggcccctgcttgcctgatgtgtatagatcaagtactcagataaagcacttgccgcctctgctattttataacttgtaagaacagtggaccattagtggttaattgtactattatcgtcctattcttttttatttatttttgtgctttgagttgagagacaggctctcactatgctgtcccggtcggccggaacttgctatgtaagccaagctgactttgaactcctgcctccccagaccctgagtgctggggttacagcgtgtgccaccacatctcataccggttctcatagcacacggatcatttccactggcactctgcccatcaccacttttggatgcagtgagaagtgaggaccccgtgtgcccgtcagggtggccagactggcacagccgtggagatttaggagcgctgtcccacccctcattaaggaaggatcatagattctggatgagtctggcccaagaaccctagtgtttgccacactgagcaacatcgctcagttctcccactttagcaaatcaaagactcagagagaaagaacctctctgatccttccaagaaaaggaaaatcagccctagagaagggaagcaaccttaggtttaaacaagatgatgaagccacagggtggagggggagtttttcactgtctgactttggtgtctgactttggaacacacatctgtccatctgtccatccataccatgctgtctgcacttcacatcctatgagttctctctcctgcctttggaatttttgtgtttaattgtggactggctttcatgatttctcatgtgggacccagctctgaggctgccccatagggcacaaggtaacctcgacgctgacatggttgtcaggactgaagctgtatcgtagtaggttgtgtgctccagggactccccagccttttgcagttcagatggttactggccggtcccagaaaccctctgcccccgagtaagtcaaaacttgcttttcacacagtccatgggatccttctacatctccagccaatacagaaatctgtgagcttgggggaattcagttccttagaggggaagagtgccaccggaaggtttttgttttcaggcagtaaatagaccatttgatgacttgttaacatactggaagatagtgtggtagaagatatactaaaagggtggtggtatatgtgtgtgaggggtacatatgggtgtgtgtgtagtataagtgtgtgtgtttatgggttcatgtggaggtcaggggtcagaggtcagcatcaaccatcatcgtcttcaactctacttgttctttaacacagggtctctctgtgaacctgtagctcatctgctgagcgatgctaactagccagtaagctgcaaggacctgtatgtgtctattctccaacactggggttagtgcagacataccaaatcacccagccaattacactcgaggtagggatggggacatgagtcctcatacctgggtggcagacactctactgactgagcaatctccttagcaccagcccctgctccataaaagggttttctcttcacaaacagaattttaagagtgggtttatgttgctttgatatttctagaaacatgtaaaactccatctctcaacccactcgtgatgagtcttgggaagtctggtacctgtgacttggggaatagacttcattaaaattcaaaaaggtcaagaaaccaatgctggctgtgtctgcgacagcttctgccctctggtaaagctgtccttggcagtcactgttcaagctctgagattcacagtgacgagaacaagatagagctgttccttagaactcagagccatcaggatgcaggtctcagtgtcttagttggggtttactgctgtgaacagacaccatgaccaaaaggacatttaataggggctggcttacagcttaggtccaagcctcaaatcctttgcatgaccctttcagtcctgggctgtcaactgcaactgaggctgcaccttcaccaatgacctaacatggcctctcacagtgccaaacctctgctgctcttcatgcccccttcatgccttcaacaccaataccacctgactgactcttacacattaccaagtaccactgcagcatgaggcacaaccttggctatctctggaacacagcttctttgtactctcagaaaacacttctcagaagatttcacctcagtgatgctggtctcttcttaatcactgctaattttgtagctccagctcacgagcatccattttcccagtagccccttctattcttgactctaaagcttgagcccaaactgctgagttctgctgcttgctggtgctggaacatggcccccttgttctattacattatcagtgctgggattaaaggtgtgtaccaccacacctggacttaagcttttcttcaccaagagcttgctctggtcccaggctggccttgaactctgagatcttcttggctttatctccaaggatagccccatgcctggatctaaatttagctgagtaggatcttgccccaaagtcctactcccttaatccgatatctcctagaacatgggagttggctccattctgcttcctggtgcccctttactatttaaaccatatattttacatttttcctttctaagcttgctatgcttgcttaaaatgctcttcatgagactcaaccagagaacaaagtctctgctgggtgtttctggacttcctttgccattgcaattaatctgagtctcttctccttagcctcaggcagactcttctgacaagggctaaagccacccatattcttcatcaaaataccataaaaacagcctccaggccatgtactgaaattcttttccactgaaacttcttgagccaggtctgcacagttcaaatcactctcagcaaagaagtcttccatattcctaataggatggcccattgagccctagttaaagcattccactgctttccaaatccaaagtcccaaaatctacattttttccctaacaaaagtatggtaaggcctattacagcaataccccattccctggtaccaacttttatcttaggcttttactgctgtgaacagacaccaagaccaagccgggtgtggtggcgcacgcctttaatcccagcactttcgaggcagaggcaggcagatttctgagttcgaggccagcctggtctacaaagtgagttccaggacagtcagggctatacagagaaaccctgtctggaaaaaaacaacaaaagagcaaaacaaaacaaacagacaccatgaccaaagcaactcttattaggacagcatttaattggaactggcttataggttcagaggcagtccattatcatcaagccaggaacatggcagcatccaggcagacatggtgcaggaggagctgagttctacatcttcttctgaaggctattaagagaatactagcttccaggcaggtaggataagggtcttaaagcctacacccacagtgacacacctactctgactgggccacaccttctaatagtgccactccctgggccaaatatatccaaaccatcacattcaccaactgatcgtttctagatgaaagtatccttagaatggatcaactcaagggcctgtcagccaactgctttttagagagttttgttgaagtcgtcctgggagtaaatgcacgtgcttctgtatgtgtgtgtgcatgcatgtacacatgtgtgagatgtgggacacgcatgtttatgcaggtgtgcctacagtgtgttcccacgtggaagctagaggttgatgtcacgtgtcttcgtccttcgctctccttctgccctttcgtttgtctgagtcagggtctctcactgaacctggaacctactgagcttgaaattctggctagattggctgatagtgagtctccaggattcttgtatgttgacctcaccagtgctagggttataggtatgcgctgccacacccggcttttagacagggatgctgaggatctaaattcagttcctcatacttgtgcaacaaacaccttactgactgaactgtgtcccagcctcatgaatttattttcttctttgattttgaagggacatagcagacaataaacaaacaaacaaacaaacacaaataaataaataaaatcttacatgtgtatgtatgcatgtatgtatattaaacagaacctttatatttgatgaataatttctaatgaaaaagcaaaatgcatgaaagacatctgtaaacattcggtgataatggactcaaaatcgagactgttagaaaagagtgaactgggtgtttgtggctttatttcttaacattgaaagcagtgcagatctttttcaagatattcttttctctggataagaagagttactaataatagtggctgacattatatagcactcattatttgcccagcacctttcaaagtgctgcaggcatattaatttataaaatcttgggagaaacagttaaggtagttgaagcaaaagctaattaagaaccctacccaaggtcacccagctaatcagccagaatggaagctgtggaatccagatgttgcacacctaggtctgcttctgagcactaaggtatttgggcctcgctgcattgtgatgctgtatctttgataaggaaggcttatcacttgggtgtgactcacatgtggttttcctatagctttgaagctgccccagacgtttgactggagtcagtcttcctaccggtgggtgtactgagttacccacgtgcttcccagggagttcccaatgctgcctgctgccacgtgtgctaacgattggctctgagggtcactgaggtctgcttgaggacatggtggcaatgggacgtaaaccagggataatgcaaaaacctatatgtttcccaaagagaagagtacgacagtgaccgactggagcagccctgagggcaggtgtctaaacggggatcccctttagcaaagggtcccaggtaaagcttggacactcagtgtgtgctcttggggttgccatggctagtcatggtgctcacagggaaccgtgccacgtggctcccaggtccttggagtgttcagatatcaggcgtgtccatcagttcaaggcagaatcatggtgcataaaggaaaatggagagtttttccttccttccttccacccagatggaaagcaaaagatagagcgtcaagagcagtgctctgtatgcctgctcttcccctctgaaggcatttcaggttaagcagaagattctggggggcttcacccaagtattttagttcccactctgctaatctctctaactacctagagacttagggaagcagttcttaaaagcattaataataactgtgcctaagtgtttctaaggaatgttagaatctcttcctgtttattattttagttattggacactagacctagaagagttttgtgagcatcaagatttccctgaattcaggctaaggcctagaagtttctctggggcaactgaggatgtgggagaaaagatcatacttctgtctttgtgaacagcagcagtccttcatgacactacccatgaacagcagtccatcatgacactgcctgtgaacaagagtctatcatgacactacccatgaacagcagtccatcatgacactgcctatgaacaagagtctatcatgacactacccatgaacagcagtccatcatgacactgcctgtgaacaagagtctatcatgacactacccatgaacagcagtccatcatgacactgcctgtgaacaagagtctatcatgacactacccatgaacagcagtccatcatgacactgcctgtgaacaagagtctatcatgacactacccatgaacagcagtccatcatgacactgcctgtgaacaagagtctatcatgacactacccatgaacagcagtccatcatgacactgcctatgaacaagtctatcatgacactacccatgaacccagcagtccatcatgacactacccatgaacagcagtccatcatgacactaccccatgagcaacagttcactatgatactacccatgaacaacagcctaccttgatactaccccagtgagtttttagtcagtgccccccttctgtgcagaagttgttaaagtttaggtggctcttgctgcctgaagcaggttcttcccaggtaccaggaagactatacaggcataagcaagacacctcctcagtttggcgcctggaaaagagagaagaaacatataatgaatggaagctaaaccatttctttgaatgtatttctttgagttagagcactgcaaaatcatattgctacttagaataccatcccagtgaaactggggtctacgctgatacactgtccttgttaggaatgattgtacgaagcgcagaaagagagaaaagaacccaacaatgtaatactgtctctggtgaggcttccgttcttaatcttaaaatgtgtaaaaagatttcaggatccttaactccgggacctaggctttcaccctggcgccatcgggcctgtgggtgtgaacttgggcaattatcttaagtactttttagtccttggtttcctcttgggtcaaactaggcaatgagacgagataatctctaaattagttcccactcgagctggggtaacaaaatcttgtcagcaaaacagaggtatagcttcttcacaaacagggcccctttacaggccacaaccctgagctgaggtgatcatccttcatgtcctcaaccagggcttccacagtggttttcagattctccctctccctgtccctctctcttcccctccctcctccttcccctctccctttctctctcctctttttcccttcccctaccctctctctgttcttgaatgggctttgtacttcatcttcagtttctctagctataagtaacaagcctaatgtccgaacagccctgatctgatgcctctgccactcagcttgggatgctgcacgtcatgcttgccctgcttagctttgggatgctgatacctggctctctgtccaacagagacaatggccatccatatcagtgtcatggggtccctgggaaccttccctgggacacagtatacatttagaagacgtcggctattgtttgtatttaccttggagtcttgtgggaaatgagaaaggacttttgacagaaacaacaaagggatctgtgaattcctaaatttaaaaattcatgaagtggccttaatgttgcgtttttttgagatgtaattaaacatttatgcattttgattttttttatttcagatttttttttatttaggcccagtaaatttcttttctggcatattatggccccttaaaatattctgggcactgttcctaagtccctcacggttccaaaagacttgtccccaagtgtcgtactttgtgaacaacttgaagaaaacttatgtcctggtaacaaagaagctcacacctgacactcgggcctcagtgtatgcacgagacagctgatggagagtcttcacattgttctagaaaagaacagaatccccccgccccccatctgcccttgctgaccttagggcatttgttccaggaaccaacacctcagatatctgccacacggaagcccctgatatcaaatggcagattatttgtagataacttgtgagcatcttcctgtagactgtcagtcacctccgggttactgaagtactggagacaaggctggataaatgaatacctgtgagactgtgttgttagggaagtccgtgtgtgctcagtgcggcactttttcttcctcaagtattttcagcctggatttggttgaatccggttgtatcagctgcagatgtggagggatgaaagatgacagacagacagtactgggatcatcactccagggtgcctgtagactctagcaagacctgtacgcggtgcacacacagaaagcacctagcctagacaggtttctgaagggctccctcccattgtgtgtatgagagagagaggagggggctctcctgctacctgtggatgttgctctgggagactcagctgttgtgcatcttccgtggggacaaatgacctcccagctagctgaaggtctgtggcagacagcccctgttgtcagagcacactaccatgcctacctctcccctttccctttccgaggcaatttcaattctttcaaggcctaaccactttcccttttccgttttgaaggaactcgggagttttcccgagggtttaggttttcctgtaaagctgtgtgctgggaaaggccattaggaaaagcctggtacacagtgtctcaaaggacccggccactgacacacacacacacacacacacacacacacacacacacacacacacacaaggatttttttcccccaaagctttgatcatataagtaaacttcatgctcctcattttagatctgcgtctaagttcactgtagctaatttgaatctgcctctttttttcgtgtcttgcgtcggaaaaccttttgtaaggtgtcccgccttggggctctggcagcattagatcgtgcccttaggaagggggtaaattaactccaatctacctgtgagtgtttctgctgtcctcagacccgggaaagcaccggctattagccaggtgccaaatgccctcttagtggctcagttttcgtcaaggtcaatcttaaggttttccctgggagaacttgcaagtgtatcaaactttctcagtctctgtccatagtgaaagccaaggttagaaaaaatatttaagcacccaaagggaagtccttttcctgtgggttcccccacacacactgccaccaaccccccgcccccacgccacccttaaagcaacacagtggaattaatctgcaactccccaggcccttgtgaagtccattaatggtgatgcattaattttgtgctcctaggaattccatatgcccaggttccattaaagcaagtattgactaaaaccctctctgttactgaaaaaaaagtccagcgtacttgcctgccctgaaatgccgaacagtgggcattttatttgcttgctggatctttttacttttgtacgccgtggctggtaagtcatattctagtcatttgaggcaaaaatgtaaacatttgaaataagtcacttcgtaagttcaggatgacttaatggtcccttttggaattctgacccgagtatctcagccttacttgcctgtggggtggcttcacggcgtttctggtccactcattttataatgctacgagcaaacgtacaggagggacatttttactcctgatctgaccttgttcctggggccccagtcccaaatttcagaaaagaatcagagggttcgacagggagtaagagagggaattggagtcagacctctgatacatactggctgtgtgcctgtttttccctctgtagaaggggtttccagatgcccaccttccaaaggggaagatagaccaggtgggcgccattgctctgaggctagctgcctgactccagctcccgaactgtcttggctctgataacaaaccttcgtcacagggattgcaagaccatgcatggagacttccatgtgagggtgcttcacatagccctgcacatagcaccctgtaacatttaaagcacaaaccaggaacacaggcaagtcagtctccttcatccccaaccttgtatttaccaaaggaatcacatggaattctgccgaagtgttcaccaaatatttaccaataccaagttatttaaagatgagggggaaacctggcaaattggttccacaggactcagcacttggagccttttctctttcaacttgacctcacggtcactttaaatcccgaagcaccagaaaccaaacccaagccttaccaaggcaccaccttgtgaaacctgcatcgcgcctgcctcttcagagaacaggcaggtgggtccagatagaggctttatctgtcatatgtagctctgtttcccagcagaacattgggcatccatgttgctgtcacctaccaaagctcctagcatctagaaaattctactgggtcagctatgagtaccatgggaggggagtctctctactgtatagggtttcgtcttatttgagtggtatatatcaaagtgtggcttatcaactaagtaagagaaatagcctatccactaagtaataggaatacaatagatgtgaatgagatatttgcaaacaaagcaacctgaaaaccgactgctaatgttttacaggtattgggcaagatccttagtgatcttaaggaaaataatgattgttctcttaaagataattttggttttgttagacttgcttgttttatattttgtgcatgagtgttttgcctgcttgtatgtttgtgtaccacgtgcatgcctggtgccctggaggccagaagaggtccttccatcccttcaaactggaattacagttggttctgagctgccatgtcggtgctgggaaccaaactctggtcttctagaagagcaacacgtgctcttaactgcagaactatctctctgcctgaaagataggttccgtctcgtctcgtcagattggtgagaatgcaggagaagtccgcatttaaattagccacccctgttaagctggacttggagaggcttttccctcctcgtttgcctccctccagaaactttttaaggcacttggaaacaaaggaagcagcctttatccacagttcagagttttgcttaaattcattttcttttccaggaccaaatagtttttcttctgcatacggctctcatggcggcaaaaccataggagagaacagcgtagcctgctgcttctgagtctatatttcctgtgtgtgtgtgtgtgtatgtgtgtgtgtgtgtgtgtgtgtgtgtgtggtgtatgtatgtatgtatgtatgtaagtatctgtgtgtctatgtatatctgtgagggtgtatgggtgagagacagtgtgagagtgtacgtctgtgtctgtgtctctgtatgtgtattcatgtctatgtgtgtctgtgtatgtttatgtgtgtctgtgtgtgtctatgtgtgtgtctatgtatgtttatgtgtgtctgtgtgtgtctgtgtgtgcctgtttgtatgtgtatgaatgtgtgttagagagtgtgtgtgtctatgtctatgagtgtgtctgtgtgtgagtgtgtgtctgtgtgtgtctgtgagtgtgtgtctatgtgagagtgtgtgtttgtgagtgtgtatgtctgtctgtgtatgtgtatttatgtctgtgtgtgtacgtctgtgagtgtgtgtctgagtgtgtatgtctgtttgtctgtgtatgtgtatttatgtctgtttgtgtatgtctgtgtgtatctgtgagtgtatatgtctgtttgtgtatgtctgtgtgtgtctgtgagtgtatatgtctgtgtatgtgtatttatgtctgtgtgtgtgtttgtgtatgtctgtgagtgtgtatgtctgtctgtgtatgcatatttatgtctgtttgtgtgtttgtctgtgtgtgtgtgcctgtttgtatatgtgtgagtatgtgtataaatgtgtgtgttacagtgtgtgtgtgtgtgtgtgtgtgtgtgtgtgtatctgtgtctctgtgtgtgcctgagattcagtttctgggaggtgaaccgatccaccctgtgccccgtgcctgcctcaaacccttcagctacttgatgctgaggctctggaggccactgggtagtccgtgcatctgccaacacactggctgggggcaggatcagagaatcttttctgctctgagagtgattcagccattctcaaaataaataagtagcagagtgcagagaggaagaagtggaaaacattgaaatctgagtctggagggcggagttcttctcagcagggctcctcaggggcagtgcccaatggaaagccctcaggccctgccacctggctctgtgcaattctcagcttctgctggaacttcagttttgtcatctacaaagttgggaggagggtgtagtgagggctaaggcactgatgaactcaacgcttgattcaatgtttccaggagcagttgaacttgcaaggcatcctcttccagcctctagcaggtgacctgctctgaggagtgtgtccaaagggggatggagaagagatggccactgggggtgtggggggaggggctagtgaggagcaagatggagtagggccagagggaggatcgacccatccagcccaagctgctgcaaagggacaggaataaatgcagagtggagtggcttaagcaggggaaatcatcaaaactatatttcccatgactttggcagccttagaaaaaaaaaaagaagaaaggggaaaaaaatctgtaaacacacaaagtgctcaattgtccgagcctaatggccaacttcccaaagctggccggccagagaccttggtgttaattcctcagccaactggaaaaaaaaagatggtgtgagttctgttgacttaattgccagagcgttgctgagtgaggctgcaccccccccccttgcgtatgctaggcctttcctcattacctgccctacctatctccacaatctagccacaaacagctttggttgaccacaccacttccctattgaaagttaatactgtttgactcattcggtgctgcttaacccgaagccaaagaaaacaaggcagagaatagctggcttgtatggagtctggaaagccctgctcggccctgctttcaaagtcctatacagtagccttactatacctcagctgcagctgcacagaaaatggaggaagcagaggtgaccctctgtgtgtgtgtgtgtgtgttggcgagggaggtgggggtgggggacggagaagagaacaggaagggaatggggtgccccccctggggggctggaagagacaacagagcaatctgcccagttccgggattctctttctgggctccaaagtgtatcctaacagacagcagtttctgggctgaacagatacactaaaaagaaagactcaaaaacccattggaaaaagcgattttcctatagaagacagcagagagaggggagttggatctcacctgaccagcttcccataggacagtccctaggtgaccagggacaaggcccaccactgccaaatgtgggaaggactcagaggcagaaggttgtcttgggttgatagggaggtagccacactgctccctactccttgcctgagatgaggtcaccaggggggcaaatgggggtgaggggtggggtgtgcttccaaatttggaatgagtagaactctccctttgtaagtgaccaggccggtgctctgcaggtacatggccgcttgctgatgggtacttgtgactggtagacaagattctgctcactcggccattcctggattgtagctgccgcccctcctcctccccagtcacacaccccagtggctgagagacagagtcacccccaaacaacttgaaagtaaccttttcttgagtgtggcactcagccagtgctttgctaaaacacaactgtgaactcacaggtgctcagcgtctgccctgtgctgtctctttggtcccttttccttgaggccagcctagagctccaattggctctttttttcctcttcaggtttagggattgatggagccttttctttacccccttttcctaagcacggagggagaaagatcgttgttgatgctgcgagccgagaaccccagagaaggacatccaatcaatcactcactcgctcgctttctcactcctccgtccagccaggttttacagggacatcactcagcctcctccaagaggcctctgtttatctggactctgtgcaaacatactcagcaccactgccaatcacatgtagcatggcaggaacaggagaaggacagctcattaggagaagtgagagatgcaggattgctcagacccagcgctgagcatggagatggaggtgggggcctctgagtgtcttctccttcctcccaggcccgtgcaacctagggcttgccctgctgaaggcccgagtccaggtgcatttcagagactagagagctctcctgcctctgcctgtgtcctgcagtcctcccatggctgtcttccctgaagtctatccgtgtcagagctgctccggtagatggataagaacagttacatcagcttactttttaattacactttacagagggggggtcctgagaccgtgctttcaggagagttagataacagttgagattacaggctggcaaaggagcaggtcttgccgtgtgagttccctgcagttctcccacaggcagccacccccacggaggaccactgcgggtcaggagcacaagataaccagacggcttctgctctaagctacaattacctccttagtcaccagacaaagcaggaggtgagggagggtgatgaccacagagacaaacccctctactctcaggacaccagggtcccatgggagccaccacacctgaagtctgtcactcaaggcccagaatggagaatgactgatagagactgctgctttttttttctccctgaatcctggggctcaaagagggagagaggagtcctggggcctcagggagcaggagaggcggggcctgtcagcctgttgtctgtgactgtcaggcttggtctggatttggcctccgctggctttactgttccgtgtgtggatcaaggaatagtttgtgtctgattgagaaatgtgaatgtgtatgtgtgcatgggtggatcacacacaggtacacacacacacaaatatatgacaaatgcatacatatatgtgtgacttatatgtgtgtgtgatagatataatacatatatagaacatgttatatgtatatgtgatataaacacattgtatgtacatataacatatatatgtgctatcgtgtatatgtgtgtagtagacatgtgctacatacatgtgtgtagtatatataaacacattacatatatattacatatatgtatgatatgatagaagtatgtactgtataccagcatggtgaagatatgagttgataggaatatatagacatgcacatgtgtgagtatgtggtacgtgtgtatgtagatgcatgcaatgcacatggtataagcatgtggcatatgcatgtgtggcatcagcatgtgtgtgaacacacacacgtgcatcagagaaaagcagaatccactctggctgctgactcatgccagtgtgctgtgcttggctctgcacaaggctcatgccagtgtgctgtgcttggctctgcacaagggacttgtcttacttttccgcatgatgaaaagaatggtttggtgacagatttgactctgacaggacagttcttcagggagccacactgcccagcctgagactttgcctcagcaggtatcttcacagcagtcatactatgtccacacagcagtcacactgctcacacacttagttctggattcctttgccccaaatgaattaattctactttcctctagtcttgggaaggaagggtggatggtgctgatcaagaatatctgtttgctgggttaaagctggttgtttagtcagcatttagccttagccggatgtgtgcccggagccttaggtactaaggagacagcaggattcatgtctccatagactcaaggttcagcaggcacagacacaccacagtgacacaatggtgctgtggaaaaagccagatgctgagggtgaagccagtgggtagagttcatgcttagaatgcataaagcctggagtttaatccctagcaatgtgtaaacttggtatagtgtagatacatgtctctgcagtactcagaaagatcaggagttcaaggtcatcttacatagtggtttcaagacgagcctggattacatggcagcctgacacacacacacacacacacacacacacacacacacacacacacacacacacacagagagagagagagagagagagagagagagagagagagagagagagagagtcagagctctaaagactgtcttaatggttaggttggggacaagctctaaagaccaggtatttgcctaaaagaaacactaaggaaatcgagccaaggcatcccatgaagttgttaagaagcagcaagcttagagccatccagtcagccccagccgaggagatgcgggcggtcgggcggcagacgtaattgccatgggtgcccttgggaggaatccaccttagtcctttaattccagacttgcagataaggagcccacagaagagtctgcaggaagcacagacttagaacaaggggtgccagatgggtagtggtgtctcctagtgagggccgcctcagcggggaggagtcagaggctgcattgacaccctggccctcaggggcactctgagctctgacctgctacatgtcctaaatagaacaataagctctgtatgagcaccatggtccctgctgtgctcacactccctctgacagtaaggcaggtcccacttctcccgcaagaattctgaggagtctctaactccatgctactcaacctatgggttgcaatcccgctggcaaccgtctagctccaaaaatatttacattatgattcataacagtagtaaaaaggtagcaatgaaaaacaatgttgcagttggggttcaccacaacgtgaggagctgtattaaagggccgcagcgttaggaaagctgagaaccactgttgtcaccaaggccatctagccacagcaggagatatgacaatcagcaggaagagcctctctgcatatacctaacaacggtttaaaaacagaccaaaggatcgccagtcttcacaccgaatggggccatcacaaagtggccatgaacttagagtacagccagtcttcagtaaatatgagccctgcacgtgccaattcattcaacaatgaacagaaatgttcttcttagaacaaacaaacaaacaaacacatgtctattaagtgggaagacttttcttcttgttgttccccaaaagatacaatgtaaaaaaaaatctgagtttcagaagatggaaagaattcaggaagacatgcgtgggttgtaggtacaaatatggggccgtttagatcagaagcttgaatgccaccggcttggtagtatacagaaatcaagcagtcacccacatatactgaggtagggattgtaagtggtattttattctccagctctctgcaaagcagaagtctgtaggagaagggaagtcatggtgctcatgggaaattcacgggccaggagggggagcccctcccccctcctctcacacatatacctggcaccagcaatagcggcagcacacagatcttcctagaaactgaagttatacaggtctttactctagacttcctagcaagagtttccaagtgctccgggtatagagatccctcagagggctgcagaccactgtgcccctctggccctcctcacccatgggtcatactggggacagaagtgggacaaagaggagtgcatgacctgtgatctaaactcaatttggttgtgtctctgtatttcttcacttaggcagggagggggtcaccaaaatcaaaacaactcattctgggtgctctgggtgtcggatgggaggactggggcactgagggtgggttgggacccgtattcttcctccatctggctgcgtgagatgggcaaaacgttagaacctctctgaacttggcttgtcatctgtcattttaaaagatatggctgatttctctggcccttttctagttcttcggtgtaacagctgtgtcctgttttctttgcatgatggcacgagaggaaatgaagagacgagatgaaaccatctaagttcacataacatcagacaatctgtaaaaacatacatatataaaatgtattagggtatatattagcatacatcatataatatcattgcatgttttaggtatagtacgtggattaatttaaatgtagtttaattaatttaaatgtttgctaaactgaatttctctctctctctctctcttcccccttttacgatgctagcactgagacttggggcctcgtgaatgtttggaagcagtttctcactgagctacatgcccagtgctttgtaatatgtgaataatatgcaataggagacagtatttctcaacatttaattagctgggagatagccggtttgctggttggaaggcttgtcttactgcaagacagttcaaggaagggacagagctgagttcagtgcagttagccactgactgggacacaaagaagggggaggggttctctacactgcccttccatagacataaaactgccccaannnnnnnnnnnnnnnnnnnnnnnnnnnnnnnnnnnnnnnnnnnnnnnnnnnnnnnnnnnnnnnnnnnnnnnnnnnnnnnnnnnnnnnnnnnnnnnnnnnnnnnnnnnnnnnnnnnnnnnnnnnnnnnnnnnnnnnnnnnnnnnnnnnnnnnnnnnnnnnnnnnnnnnnnnnnnnnnnnnnnnnnnnnnnnnnnnnnnnnnnnnnnnnnnnnnnnnnnnnnnnnnnnnnnnnnnnnnnnnnnnnnnnnnnnnnnnnnnnnnnnnnnnnnnnnnnnnnnnnnnnnnnnnnnnnnnnnnnnnnnnnnnnnnnnnnnnnnnnnnnnnnnnnnnnnnnnnnnnnnnnnntatatgccatgtgatctatccaagaaaaccagaaaaactgcggtcagaaataggagctgacaggttggctaatcaaaggtttccaggaaaatctggcaattccacctcattgccttgatagagaagcagatgctctatttcagtcatttacagccgcagaccacagtggtgccctggcaaaggcagctgaggtggtagtgagttgtgcatgctattctgctctgtttttaacagaaagaagatggcaactgaccttattatctaccataaaatacaataacgcttaggggtgctctgatgggcagccacctcagggaaatagagagacctgtctgggatggagccactgggcagagtagcatgagtttactttattatatctttctcttcccattttttgttgttttctaggctgtgtgtttataataacattctgagcagtgttttctcgaaatatgtaaaaataataatagaatatctgggacctcctttcagctctgtgtgagcttcagaaagatgcacccagtaccttgtggtcacagcttgaagccccactctggaaaccttcacgatggactcgcagtgaacttgaaagcccaggttaccagaatgtgtgtgtttagtctatgttacagtcctccggtggtttgatccagtgttgaattccctgttaccctccagagcccagtaatcagtaagagtgaagcagggatttcagagtgggcactttccatactcctgcatttaaaattcagggggcaaattgatattttaatagcatacagatccaggaaactaaagacataaagcattcattttcccccagcctgagagtttccatcggaagctcctatgttccatgcaaaatattgctgtttggcacacaaagcccaatggtttcagaagagaattaggtgctcttgattctaaatgcacttggggccacgccttgaacatgatgatgccctgcgttccctgggtgtcctggtgttgcaactctctaacaccctgtggatgtggggttcaagctttctctcaggcagaacctctcctaaagactcccagaatgcacacggagagagcatggaatgaagtattccctaatccagagcactagacccagctcgggactttctagactcatggggcttaggaagcagctctgagaagccaggcccaggcattcctgccagagcaggcagtcatcagttaatctctgtaaatgactacgattctggcaggtgtcagctgctacgaaaacagatcacatattaggagtccttttttttttttttaactgagtaacgagggaagagaaataaaaataatatgtcacgtgtgttggccacataggggcttgtccacttgccacaaacagcttattcctgtttgagttctcagtgatcaagtccccaaattcacagagccagatactcagatagccattcttcaaaggctggccagagacaccaccattaactgatgctctgactttagaatgatcatgcacacaagtgagggggctcatgcgcacgcgcgcacacacagacacacacacagacacacacacacacacacacacacacacacacgcattcccttcctatggctacacactgtccttcacggtgttcttccaaaatgccactgggtgcctcaggaatgcgaggctgcgacacagacaaagcctgctgcaagctcttgctgacccacattctttctgagaccatacaagctatccagcgtcatgtttcccaccttcctcttccttgactggcatgagagaccacggcagacacttaaaaggggccgcatcacgctttaaatggctttagagctcagattgtttttctgtgagaaagcctgaggtttctcaggtgggatgaggagtggggactgattgggtcgcaaagaaaagaagagggaggatccagagagggctgcacaccgaactacatatactaagactgagcaaggtagaaggctctagaaaaagaagtttttgtacttctgctggtaaaaggctggagggggtggctcgggaacttggcctcttttgtccatagagctttaaatactccggctacaagaggcctctcccatgcgccccggccgagcctgcgtgactcagggtgtttgtgtttgagtccagtgttgtgagctctgaatgacagtccagatttgccgtggcgatacgtggaaagagcgagcgctgcatgtgaactacacaaatattatgcttaagctttttttttttcctccatttggagccaaacaggtcttgtcagtgataaaaattgctgcaatatagtgggccctttttctggcctggaatctgagaccgtgtcggcagtgccaaggaggcccatagcaggaagaaatagcaagccgcggggatttgaaaccataacacaacttctacgacataattttataattgtagcaatcgggaactaggtggtgggcggggtagccttgtaaccactcctgtgctggaagaatggtccagggtcctccgtgtagctctgggctgggctggggtagcagcaacagcatttctatgggcagaagccaacggcttcccctgtcttgttgtgaggctgtgtacaggaggatgattgtggctcaggctgtgtaaccattgacaggagaatggccctggctcagtcaacggttctagtcaaacaaaccttgagaacgaggaggaaacaacaaagtcggcctcttaaaaggaggaatggatctctactgtgactgtgtgggaggctgggctcctctacaatctctagtctgcataatactttgaaggggatggagaggaaaaaaaaaaaaaagcgggaggcccagccctcctgactggcccacgtggatgcccctacttgctgtttcctggtaacagagacacctaccacccttacaagacagcaagcatcccaccttgcttttcattccgagggaaaatcagcagaccagctggccacgccctctgagctcccaagggcctggcctactaggaatattggaacagacccacgctgcacctttctgcctacttcctcctagggatccgcccagggagtgggcttcagggaagtaaggatgcttctgaggagcctgtacgaaggaggaaggggcctgggtgtgtgagggcagagagggatgccctgtgcctgcctgcgtgtaacaggaaatctcactcctccgctgtgggtttgcagctgcacccaatttcctgttgaagggacacgctgctacgttccagggcccactctggcacctctcagacctgctgctcgggttttcaggaaggcagggcattcttgaccccgggagggcacctttcttggctgccacagttctgttcccagcctgaggcccacagccaacaagcaacgggcttcttacccggggccaccatcagcagttccgctcactagtgtctgcccacccgaggggatgtgcggagagctgtgggcaccgagtcccagactgaggcaacagccagggaccagtgggctgaaggaacctcagcgggctatcagaaggatagccctggttcccacaggcagccagcccaaggggcaatgtccaacaagctcaccttgggggtgaagggagagggaggggaaagataagaaaagtcccctccacaacacgttttctgatctcttccctccctccttaccctgcctccctctcctcctcctcctcccttccctacccggtccctacactaggacacggcagaaactagatgatcagaccannnnnnnnnnnnnnnnnnnnnnnnnnnnnnnnnnnnnnnnnnnnnnnnnnnnnnnnnnnnnnnnnnnnnnnnnnnnnnncgcagaaagcaccggggctgccaggcctttctgggtgctctaagggaactgttgaaaccccgcagcatcagctgggagcttaatgaggagaacgctgttccatctgcagagtatctctactctgagaagtgtggctgctgagcatgggagggaatcgtgactgtggaagccatatgtgtacatggctacacgcgtgtatctctcttggtacccttgcagttatcggttccaggtatcaaactccacaggagttcaatatgtcctagtacttgcctaggcctgtggacatcatcctggagactgtaatccgttctgcggctagcatctaacacgctattcatgctatgttgacaatcaccaagttatattacgtagggaatcctgacgaaaatacatttcaatatgtgtacatttaaaaagctgtattatcaacccaccttcggtttaatctttagctatagagccttcagatacaaatagcctcctgtatagaagctgacgagaggtttttgtaagacttgttttctactatgttgttttcttatctacccattagtcttgaagccacgatacacacagttgcttgcatgtatgtatgtatgtatgtatgtgttgtgtatacatgtataaacacacatacacatacaaatccagcaaggggtttttaagttcttgttgcctttagattttatgctaagttttcatttaatatctcttctttcaaaatatgaaagaggcatgcgtgtgtatgtatgtggtgtgggctgtatcaggcagaacattttcagatcagtagcgtgagttctggtcactctgtgggccagtcaccagtggcaaacacgctgtaagatgtaataactgcacataccctctgtgccaagttagataatgctcactgcatttccccagtcggacggctgacgtcggaatctgtttgttcagtgatataccattataataaccaaaaggcagttttctctgggacaggtgggacacagctattaatatggcatgcttacagcaatactcctgcagagatgcaggcctgggcaactcaaatgaagggatgagcagcccatacaaagaaaggggcagaggatgggcagcaggagtggggctctgcccttcagagaaagcaaagactagtgtcctctgagcttcacaggagaaaagggggcatctacttgataaggtttttatctgagccgattgctgtctctggggagaaacacatgcagggctcacaaataggcccacattttccagaatgtaatatagaaagcctatacccccaggcatggtattacagtcaagttatcatagtacttgcaggatggagacagcagaatcaagagttcaaggccagccatggctacgtagccagcttgaagccaaccagagatacatgagaccgtgttagcacagcacagcgcctctcttttatatgaacagacacaaaaattaggctttcttcctaggtatgtttagaaaaaggccacaccaaaatccttaggtgtttgtgtgtgtgtgtgtgtgtgtgtgtgtgtgtgtgtgtgtgtgtaatagtgacgaataatcactcaaaatacccacactaattttccaaggtcccacagtgcagctcggtggtgaattgaggcaaatgacacactttaggtgagatggatggactgtgggagaaggagatatccaaggacatttttctgccttctgtttactctcacttaagttcacacacgttttctccgggatcccatgtctaaaacccaaagaaaaggctgttctcttgccctctcctggctgccccgagcgcccgtgagctgagaaggaggctggtcttttacttacagtcaaaccaaaactggtaagcgtctttaaagccagtgccaaaccatgcaggagcaaattcagatggttgcctctgcctgcctcatgaacccggactgcttcagtttgccgtcttacatacctcgtccctagaaactgcagagggtgggtgggctcaagggagccctgggcctttggaaccacccacctgtgcacagaggcatggtcatggacaggtggctgcgcatcggtgactctccagaacactgcacttgctcttagagtgtcctaggggcttggttggtactctgagaagatgtgtggactatattgtggattttttttcctctccagtatataaatttgataagcagggatttactggcctccaggcagacacgcggtttcaaaccccattgaagatactgcatataaaaccaatttctctttcttgtgttctctctcccaccttctgggtttctctcctctcttctttcttccttctcccttctccggctcttctctggtatctcttcttataagaaagtgctattttatacaaatctagttttgagtgaactcctgattttttttcacccttgaaatgtaaacattaacagggatagtgtaacaggcaagttcttcacattgttcctggcgttgcgggcagttactgcctggtcctagccgtagagcacacgtgcctacttaaggtgggaatttaagcgatgcaccatgggactgtggctctctgaaatggcagtcacagttttaagaaaactatcccagaagtagccagggcggtgtcccctggacaccacagagacacaggaatgattgtcagctttagaggtgtcagtcactgcaggggagcgtctgtggagcagcagaagactgcaggctggagccaccccttggctctgccagcagaggatcatgggtatagaatatcacatttccttatcttaccaaatagacacctcgagtgatctgcactggggttcagatggagagggaagacagttaccatgccaccaaaccactgttttgtttgttgaggttttaactttaaaacagccgaggttaatttcgacttcctatttgagcaagtctttgagtggaatagaaagctgttttgtcatggctgcctgtttacgcaagtcaggacaccattgttaagtcctgccaaatttcagggcttttctccgttccttttacagcaggagtagagcagattacagagttctggggtagccgggcctggtccctcacacctcccttttaggaatggctccaagcaacacacatgggtcattttaggtcttgggctctgatttccctgggaaccatcatgaaggtgtcctgacttctgcctgggggagggggggagatgcagataaggtgtaaagatgctgattccgaaatccttcagaccaaataagtactctaagcctcttgctgtaaagtttaactttccttggattcgttgtgatgaagctgagcttagacttcgaggtctacactgttctttttgctcggtaatctctggtgtgacttctagacagaaacacagtctccccaacttcttccagctttgttacggggtggatatgaagtcaaatccagacctctctgaaggcacaggcaggaaggtggtgtggaaggacacacttgtgctcctggctcagggactggtgtgctactaggccgacaggcatggagaggagttgggctagccacttgtgtagaagatgtggactgaatgtgtttggttgtaattggaggttgatgctgctgtcgacgttgataataacatcagactgtgtgctggatgtcttgctaagtcatgtttcggggcattttatttttaaagatgggtagaaaagaaagccaatcagaatactgaaattctgagcatgccctaagggggatcatggggtaaggggacttccagcaactctttcttggggtaatcccacacacatttatgagtctctctcctgtggccttttataactaaagccttcttcccaagtaccatgagatcagcctagatgagagcagatgcccccatctgaagctccacgtgaccgaggaaggccacgtgctctcaggtggcccccagatttccagttttctaatggattgtcttaggctccttccaagtccctttgaaaaagttatattcgctactgtctgtgaggttcttagaggtagggttaccatgtcagggcaattccctccaccctcagaatgtacgaagggaaggaagcatttccaccttccagagtaaggagcaaactcctgcatccagagagccaggccacaagagcatgtgaaaaaggcttgtcctgcccaccaccaactcacatagcataactagcataagcagggggagagaaagggacctgcgagcccttgccgccctggggtaaagcatgggactgctcagcttcgctgcctgcttttctctgcatttctgcctccccccccatcccccaatctgtggtgtgtgtgtgtgtgtgtgtgtgtgtgtgtgtgtgtgcatgcgtgcctgcacgcacgcatgcgctaccttttgtgtttgtctctgtctttctttgtcatatgcctgtctccacccctagtcacatacatatttaaagccagcgtgggatgggcctgttgatttcctaggccatttcctttgaaatggccatttcatgcacacagcgtaaagtactaaaaattaacccttgcagcttgcttatagcactaagtaactttcccttcaaaataactcctgtctgtggcaggcactaaacccgaagagctgcaggaccggagttgtacacgcacaacacgccagaatcagatgttcacacaataaacagggcagtggggaggggaagggagaaagaagaagtggataagagaaaaccctgaaaaaaaaagagtgcagactacagagcccctgctacatggtgtgtgcttccctgcccctgtcctgtggtatgtgttgccacgcctctgtcacatggtatgtgctgccccgcccctgccacgtggtgtgtgctcccctcttctcaccccacagtgagaagacagaaggagtagtccaagtttatagaaagagaagcgcttctaggcaggaactgaggatgccctgtcatgtgcatatatattcttagctggtgcaacacaaactctatgtctaaagaaagtatgaatgtgcgggctaaagaactgtaccatagacattcaggagaagagaaagatgggtgtcagggaggaagcgccagcaggccttggtgttctccctgtttgggcccctcatctattgagcgtgaggtactaacataacctgccaccttaaggatgggcacaggtgccagcaccttgggccctaaaactgttcagtgtcacaaccctggtgtattatgtattaaccttacccccaaacacttaatcagcccttcaaagaatcacttaccacttaaactgacactacctttgtaacccaaaaccacagtttaataggacctggtttccaaagcggttcatgactgttgctcaaagaggtctgcccatgttctcaggatcctgttagtccctcgtggataccttttctgatgacaagggaaaagtcacttactatgggacttggtctctatgatcaaatcgtccttctgacgcttcgaacttctccctaaggctaatgactctaaaccttgtcctcagggcctttcagtggtcttttgtgtatttgctgaatggtgatgttaaatattcgaggcttcaaaaggaaccagtccttagctgctaaggcgggaagagtacaatcacaaactggcccaaactggctacggcatatactctaagatttttagcaagaagtttaacctcttaaagcctctgtcttcccatctacaaaatgggaatggtaattgttcttgtcggaatgtcctttgagcggtcactgttataatccttgtcgacaacaccaacttggctagttttcctgtggctgacacaacatacggaccacagatttagtgacttaaaacaatgagagtttattctctcaaaattggaggctacaagtcccaacattaaggtgacaagaggtggcactcccattgaaggcctaagagaaggactctctggcctcctctaacccttgccagctccaggcactcattggtccatggctgcatcctccccaccccctctcttctgacagctcttctctgttccatctctccttcttcttctttaaaggtctcatgttactggatctagacctaggctactcaagacagcgtcaggcccttcacttagctgtgtgtgtgagagaccagaccctttgtcagtgagatcctcgtcacaatctaatggtcagaatatggccctggcctttctggtgccaccgttcagtgccagagattaaaacctgttacattgatgtcatcggaacattagccggtggatcccggtcagtccaacgagccccttcccatctgtccctcagagtagacctagtgtccagataaatgtgatgtcatgcctgtgtgaccctgtcttgtcatctgcacttcagcatctcagcccttcatttgccagagccatgtcctgattcttccattccccaggtcagagaatagagtttcttttttttttcctgggcaagatcagctatttccgagtgtttctagagcacccatacagatgaagccaaagggtcaatggtggtgggaaaggggggcttccatccccctaccccaatacctagggtgtaatgtcagaacacaggaggcttggagcctccagaatcctgtggccacatagacagcagcgagcagagaaacaaaacttgccctgatgcccaaagccagccagttgggaggtactcaagaattcgacctccagatgaagccaggccagaggcaggcatgttgttgttttgtaggaccaagcagcaggcgttagcacagagtcttgtcaaccagattcccatgccaaaaggaccatggtttgctttgggccccggtcatgccaagccacagatcacagatcacagatagcctttcaagtctggaggagggagagaatttttaacggcagctgtgaagctttatcaaagtttaccaaaagtttggcccgagagaatagtgtcaggctgaaagggccacctaggcattctcccagtgctgggctttgtaagtgcagcccaaaggcttcatcactctgtcttgtcttgtttccccctggctccaggacaccccattctaactctaggggaccatgaactaaggcacttggtgtcccttatcttccagacaatagccacctagtaccgagtctctgccctgttaccacacttcttggccccacacagactctatattcatattaaacaattgatcgcagagccgcagagcagccaattgttgtggagattaaaggtagggatcgcggaaagcctgcagacgcactgtttactgacaagcctcccatctctccacagagtttcctcccataatccctttctggcaggacattttatgtgtcaatgccgggcgattcggttacccaggcacagtcaatatgacaaactaataaggagaaaaatagagtagaactcaccctgaaaacaaacacagatcagtcatgtgcctctctgtgcatgcctgagaacagagcaagaaagaagtgggacagggactgtgctgtttccttgttctgttgatctctgtaaccaggtgatggagggtcttcaggctgagtcctagctgagcctggctcctttgagcagtgcttaccactttaaaagtagcattttcagaacaaacagaaccatgtttcctgagctagaatgagcctctaagccactggtagtagaggctggccagaagggacccttacttctgactcaggttgaaaggtcacagaacctgggcctccctcattgctcagtgtctccctcgggctcatgcaaggcttagaaccttccagacatatttgcaagatttgaaccatcactgatggttcaaattctgatctccatggatcataaccttatcctttttagaaagctggtgtcttagttagggttttgctgctgtgaacagacaccatgaccaaggcaagtcttataaagaacagcatttaattggggctggcttacagcttcagaggttccatccattgtcatcaaggtgggaacatggcagagtgcagacaggcatggtgcaggaggagctgagagttctacatgaagagtagaactgagagtgccacctgaatgctgctagcagaatagtgacttccaggtagctagggtgagtgagggtcttaaacccatgcccacagtgacatgcctactctgacagggccacactttctaatagtgccactctctgagccaagcatatacaaactatcacaggtgggtattcattttaaacacaaaactgcagccctttcctctaagaggggattatgtgggtggaatctctgctgtatcagatgggaagacaccttccatgtcatccaacaactatgggatgccgtctgaggacaccaagtctgtccctggttccttcctgtcccatcttaattcttacacagtttcacttgttgagtcactgaatttggggttccaggatgtagcacagttaaactcatcaaggcttgggcaccgtggtgacgagtcagccctgggagtttggcaggggatgtgctagaaccatgctgctctggaatgaagagacaccactgatagattaaagtagaacttccccaggacaggaaggtctatgaactagtcttctcgtgggtgggatggttcacccattaggactgtctccagcttcatggcaggtcctctccccatgaggcgttccaggaccagatctgaggctcagagctaaatcttcactatttcctctccacacactttgaagggctgcttcgggtggctttgagagaatatcttcagacaaaaaggggcagaggactaatgagactgaggactgctcgccttagagttgctgctcacacaagggaaatgaacacgatggctttatggtgtctcctgggacgacggcgctgcctcggccactctccttccattagcacatctctctgcacatatcagatggcaaattacagaacgatagggttattaaaatatctgtaaaagtcagcccaggctcaagggcttgacttggccctcctgcccgttcggcggtttatttacatctcccaaggtcagctcgccagcatctgtattttgcggtaaaccgcccactccgcagaccaaccagaacagcccacttttgaagatgcgcttccgttggttttccagtaaggcactggcactcttaagagtgagcccagagctcttcagacctaatcctactgtcgccccccacccaattttaaaacttcagggtaggagcgtgaccgtgtctgcagccagattatcaccagagtagttgaggcaagaaaaactatcataatgatattgttgggttcacacatttaccaaaggcaattatataaagccttcgtagttcatgttgacagaacagattgcgagtggtctggtgaggtcacaggcagaggaaataccctctagaaggttcaggtgggccactccttctttttcatagtgcctgacactccccatccccccatacatctttctccagggggcggggggggggaggtgggggggatgcatatgggtgagcacacacacacatgtactcctgaaagtcggaggacagcctcaggtgtgggaggacggtctcaaatgtcagcctccaataactgccacatttgcttgagacagggcctcttattagccttttgctttgctcagtggttaggctagaaggccagccaactccagaagtctgcctgtctgtatctcccatcttgctgtaatccttgaggtaaccgccatatgctgccacaccctgtccttgggatgaaactgagggcctcatatttgtgaggagagagcttcactgactgaatctccccctgcctggcactgctctctacagtttcctaggccttgctctcaggcaagtgagtcactgcttggtcctaaacattctgtaattgtgggcacagtatcttgaagggattagagtcacccctaacaccctcagggaaaccaacctccatgccctagagcccccaccccaccctgctgcttctgattggcagacttttgtggtggtggtggtggtggtggtggggtgatactttttgctgtgtgatcaagcttagagaggctaagagccaccatatgttgccaaatgagagaagccactgcccagacatggatctgtctgatttaatatgattttccataactgacaaagcaggggtttgaaattgaatttgtgtaaaattacagatagccagctcaggtggaaggggaaggaagccttgctattcatgttcccgtggcttttcccggtttccccatttgagtccttcacgccttgggggaggggagactcggtggagggcctacggagggtagctcttgcagtcagactttctccctggccagtcatggcttcctctgaggaggactccagaacctggagatgttggggcgaaaggacaaatcctctgtccatccatccatccatccatccatccctcccatcatccagcacagaactcatcttcacacctggtcatcagaggggctccaggataaacttggggagagggggtacctagaaaagcctaattcattaggacggcctcatgccaatccagaatgctttggggctcagactccgactttgtccactttctagttgtaggtccttgaaggaaggaagcactcaggtccctgtgccacactgttgccatctgtaaaatgggcacgctcataatgcctgactcatgagatggtcttgaagacgaagtcagcatgattatagtattgggtggtcagcatgctgtgtcttggtatggttgtgtcttgttcactcctgcagaaacccctcactgaggctgagatgcgatcctgggatgtgtagagcacagcgcccagcgtgtctaaagttctcgagactgctcccgccgtctgtgtaaccataactgccattcctgctacagctcttgctgccggctctccggctgacatgaggcctgtcctgcgaggctcacagccactctgtgacaatggcctttagagttttggtgatttgagtttggggtccttgggtaaactccagcgggaccatccatagtcactatccacatctttgcctagcgcctctcccctgccccaccaccccaccccaccccagccaacaccctgaaggtccaggcgccctccataactgagctctcccaggctgtcctcttgtactgaagtcggtcatatggggaacggctcatttccccagcgctggcttagccttactcagccttttccctgtaatgggattttggctctgggagagggcaggatttagtttcttatggtcccttttcttttcttcgcttaatgttgaattttatttttaaaacgttttttttagaaggaataattaaaataatatattttaaaatggggttgtttttttgttttaaataaacaaggccatacacgctttctcatcctcttcagttcacagcaagcactcccagactgctaacagctgtagtgagctaacaggtcacttcctgaaaccagcggccctgactgggcagcgttcagggggtggtccctccccctctccgttgctttcttgaattagactcaccatatatgagtggcctgactcttctgtgtttttaatgttaccgtctactaaagggtttctttgaatgaggtctcatctccctgactgattttaagtcaatacctccctctgccaaatccaccactctaagcctgctctcagctgcagcccaggctgtcagacccagaagaggacaacaaacagtgtgggaggtgacacagccacagctgtgggaaggacagccactcagggcaggccctaggctgggacaggggggaggtgccgagtgacagtcccctcgaccagttcagaatggtcctgccagacttatgtcattactcccagaagactgcatgcatgagccgagacctgtatccagccagaggtgcccctgttacagccaagtctttgccatgaattcagagtcagggccttgaatgggtagatcagagactgttttggaatttgtaagattagccaccactttcttccccccccccccccgcccccctcccaagctaccagggaacaggatcctgcatagctggtggcttctggctcccttccttaactgagagacagaggactccagcatcctggctcttaagtgatatttacttaatagttaactgggtttcaaaagagaatggggacttgactcccttcactaattagccctgccggctggcttgtcatctccaccttcaccacccacggagtgtgctcttgacaagtcatgacccgaactcccaggggacttgcactctgggcttgcctcctccactgtctgagaaacacaagtctctaaagaagataaggctagagcaatgaagggcattctgggaaaacgtaaaggatcccgccccccctccccagatcccagaggagcaatggcagcctggaggggaaagtgacttgccacaggtggcatacactgttatccgagtgcttggctgtcttctccggttcggtcgctggacacattcctggtatttggaagtagcacagggagccttcctgaggagtcccttccaaacaccatccaggcgaacgaggggctgttgggacaagatagggcagacccaggtgtgcctgtgcacagggctccacccaatttctcatccttatattttatacgtgtgtgtgtgtgtgtgtgtgtgtgtgtgtctcagtctcaaataacccaaacaggcagggtactgatactgcagacagtctgcaggcacctgcccaagannnnnnnnnnnnnnnnnnnnnnnnnnnnnnnnnnnnnnnnnnnnnnnnnnnnnnggaagtcctaggtcagccaatgcttgaattcttttcctttcctgtcccctcctccctgcccactcccatcccccccccaatttaataaatttatatttagaaactaaatatagtttctaaccaacagcagccctgttatgaagaacatcttgcagcataaggagagagatctcttagaaaatcaatttccatctgtagagacgtgggataaggaagggaatgtaacctttagcccaccaccactcaactctggaacctgagcccatccccgtcacaactcatggttgtgtctcttctcgttctttctttcctctgctgacatgagaaagggaatcactcactggtgaggtaccagacatcacgctacagtccagcctgcttctcccacaaggagaggcagactactgagctggctatgggcagccccacctgtaaactctgcaaagccagccccttgccccaaggctctgacagcaatagatagagcccaggttggctcccctcagggttggtgtccctgaagggggattggtcagccatgaactcatcctcacagaattgtataggggaggctcaaaacaagggttctgcaaactatcccaggcattctgtgatgtaagagcccacgatatggaggccatgtaggaacccttggtgcttctcttcccctcaaccccccaccatgttgccaccatgcctcagggactcagaaaactcagcagtctcccagtgagctggcagcttaggtgcctgtggccatctttctcagagctacaaagagctcccttacacaccaagctcatctctgagcactacagggaaggcaaacactgttagctcatgggcaactgaggactgaggagacttgaagttccttgaacttcacgttcttcttgtagcataagtcattgttgctcggccatcttgcgtcagccatcttgcatcagccatcttgcgtcggccatcttgtgtgtctatgtggatatcagtggacaggaacagcttttcagacacggcagaatggccacaaagtacaggaataatgacgcctctgacctcagtgtgccttctgctgctatgactcttgagtggcaatgtaagtgaggatcctgcagcttccccttggctcctttgccttcaggtgaccattataaacccccctaggccctgtgcgtccacctggtctgatcatgtagccttcaaaggccatgcccacggccgaagaagctattaatgcctttcaagccaactgaaggccaaagacttggcgcacagagctcttttcgctgcccatcaaattcccttctcgagcaatgcctccattcctgtggtgttccaggctctccctggctccctagtccatccaagctctgaaatcactctcagccaatcacaggagcaggatggaggcagggagtctggggaaggtaccaagtggatgtgaggttagcttacctgtcttcctctctggctagtcctgttccctcctcaccctgttcccacactctcccatatttcagcaatcctcacatgtcccttcctacaaggaccaaactgagtcctctcccagttcctagacaagcctgacagtccctctcactgtaacatctccccatgtctgctctctggttatacttgagaggtggtggggccaagtgccttttccttcactgtcctgagtgaggcgtcatcctgcccagttaacaaccgcagcctgctaaccggaggactgaatctatgtgctccagcatggccttccccacacatctgggctctgagacccacagaagggtcagcagagtcccaagtacccttgaacactccttcacttctctgggtcctcaggaatacaggccacgaggtacagaaaccagtcagtccctgtagaagcattttttcttctgatcttaggaacacaggtcaaagtgggacactggtgggtgtgaaccccatttcaaagttccaggcaggaaacaatgcagtgactgggaggtccctttgcctcttgacattatggcccataatgttgtggccttggatacccgcccctccccaccatgctgtttccagacccacaccaaatactcctcccatgacaccctgccttccttcctctgcagacagctcagcctcacctgaggcagacttccacatatttgaacctgctttgcatgcttaattagagacctaggccctgaaataagctgtcttagttacccacaacttcctagggatcccagcccctaccacagcacaatactgcctccaccagccaggttcctgcttcctgcccttcaggggtgtgtgtgtgtctgctgcttccttctcagacccacatttctagattctttttcaaatccatccttcgaaactctttatttagcgctctctctctctctctctctctctctctctctctctctctctctctctccccacacacaccttttcaccttaataaagccttgccctggggccagggctggagctcagctgggagagtgctttcctagggctgtgaaccctaaattctatccccagcacttggcacccaccgacatctgtaccacctggattccagcattcaggaggtggaggcaggaggattagaagtttatggtcattctcagctctcacgtatataagttcaaggctagtctgaccacaagaaatcttttctttaaaaataattgatccactgccaagtcagggggcttcagggccccgtccccagcttctggggactttacctagtatgactcctaccacgcaggaaagtcaggcttgtcttcctctcattgtccttctctggtcacaggatggtgctcggacagccagccagacgctctctctcatccacctgtctccttacccaccatttgtgtgaaagagtgtcagattgtggccccaaacaggaagccctctggccctctggcccgctaatcccctttgggaggaaccttcactaggtactcttagagggtcttctgttcaaatcaaggggaaagtggtttgaatgagctgtgttttgttttgttttgttttgttttgtttttaaagaagacaggaagttcctgttttttagaaaggctgttcattttcaaagaaccaacttacagagccaatcgaccataggattgctgctggatttttttcccccaatgtggtacacaatacatgcgaaaaagaaagcggggagccccaccaatgagagatagtcagtaacacaaagggagatattataatcggcttttgttggtgcttgcgtcttcttgttgaaaaccagaaagcccctgaggtgctgaagtgcggacagaagctgatgttatcggcccccagaaatcctgcctggagtccagtggcaggcaggatccgaagctcccaagaccacagcaactggccctgctcagtacaaacggtgctttcagtctctggtaaacagcctgtgccccagggctcaaatccttcaaaagtttgcctaggtaattgcgtttcattgctgtctggcctgcgctcgtcagtctaatctggaggttcagacagccaggccaaagcttgcgagtctggaggggaacaagcccatgaatctaatccacttgaaagacagactaatacaagtgcagctaactcattattttaagtgatttgaacagaaggagtatggcactctctataaaagggtttcaagtcagtgcagtgcagtgtttggcagcttaaagccattagaggaactgcaaagggtgacagtgtgactccccgtcgccgtcctcattttatgaagcctggttcctccctgtgaccaccctaaaatggttttttcctgtcctgcccttggtttttgagttatttgtgaattattatagtaaaagactccaacttttgtctttgatccaggcgtgggtacgaaaggagacacaaatgtaaagacagaattctgagggacccctcggagctctgaatacccccagatctgaaaataggaagagctaccctcttcaaagccccaacaccctcagcagttagagtttttgaaggttaagccttcccattttgccggtatgatcattaggtaggaggaggggtgctttatggaagtaaaccttcatcctaccaccaacctgtgtgaggaacagagaccgtcccttcatcttgcactccagctttctctgagttggagctggcacaggtagcctctggggctgcttcctgccccatcattccatgagtctttggaacaagacctcagaactgttgacaacaatctgcaccattatctagttacatgtgactcatgcccagaaagcccaggagaagcaagtgctggcctgtcccttccaaggtagcaaagccagtggtcaactcaggggcaagcttattggccatttacacctgtggctcccccggggctggattcagccagtgccaagtctgcgtgtcagactgagactgtgagaaagcagtttctgcaaacaccgatgtggagacgaggttctccttaggcgctgcctagccatggttgcccccacctcagcccctcagttcatgtgtcttccacccaggccaccgtgctagattacatctctcgaaatcagagcagcctctagaagtcacatgctctgcttccatgttgaagttggctgaactaccctattggtgtgacgttccctgggtcagtcttcccttgtcattttagtttcccttgactgtgggagctgaaccattcttttacgggaacttcttatgcacttaacagctaccagacagcacccctggtctctacccactcaatgtctctggctctcccgactctaatcaagagtagtcctgtttcctgacattactaaaagtcctctagaagagagttccctactggtttagaccagcctgggaaaggcagaagtgtttagtccatgcgtataagatgtcaatgtgcaaaactgagttgattgggtgtctgtctgcagatcacttcggcctctgggtctctggcacctccttcctccactggccagtcccactcactgtgtgatcaaatgtgtcggtatgtcccacaatctcaacctgtacatagctttttttcttccatctgcgtccaagtcactgaaaacctatcgcttctgtatgaaaggctgccttgaccttgtaaatcaaaggcgttctctggagggagctctcccactgctgggctccgttcggtatcatctttctcagggtgacctcatctattcaagtgtgaaggttgtatttgaaatgtcatttactttccctagtcaataaatgaagccatggatctttagatcatcagaggcctgcttattaccgagagtctctacgctgtatgggtatgtgtcttttgagatctgtgttagagtttaaaagaattctgtcagacttccgtttgcctctctgaatcagagcacggggtggaattcctctgtgagtggagggtgcccccaaatgagtctgcctttattagtttgtgtcctttgttcagagcaccagggattactttatgaaagcacgcgtgactcttatcttcaaaggtctcccctgcatggcagactctacctcaccaacctgtgttactaatccattgccatcccaattagttcagatcaaggtcagttacttggggtgtgcaaaggggccgcaaatgtaagtgagtgagtccccctcctgtggttctcccacgaaaatgagagattacaggcggggaaacatagaagcgagaactgtctggtgcctcagtgtttgagagtgaagtgaagacctcagggaaccctaaacaagccaatgcttgagtagaaatacacgacccctgctgcggggaagtttcttggccccgtctccccaccctattgctgatggcaagcatctgagaaatttaggagcctcggacacagagttgggtctgagaacatttgctgggtccacgtggaggaggaaccttgtgtttatggcgcgtgataagcaccgagcctccaaaaggcacatctatggaaaagaggctggagtttggtaggtccataggatggctcatgataattcctagccacccatcccactgtcatcttgaggtcatcagcagagggatggtaaggtatgtgagggttacatctttctaggtggacaacaagacctatgagaatacacttctctgatctaccattgtttctagtactgtggggaggccatggaagatcaaatggaagtgcagtgattaatgtccattgcatggacagtcagacaggacagttcttgtgaaagatgtgttagaacaacccagataggaacagccaggaatcatgaaaggctgaccaccccccacccccaagcaggaaaaccctagacttatttattagattcttctgatgcagagagagacctgtgcatagcctggctagaggatgggagagggagttccccgcccccaccccacagctctctgaggtgcttctcttgggctttgctttggggaattgattctaagaggacaagtctggtgtgtaggaaaggaaaacacagcagtgtcccaggttcaggccagagagaacagacatttaagaccagaccagaactctgaacctacccctccacacacacacacacacacacacacacacacacacaacgcacgaggagaagaacatgggggcagacactgactggatctctcttgcaaacatttaccaaagggggctaggcatttcacctctgcggaatttttctatttcccctgtgtcagaatgttcttctgtgagttgagagtgtggaatgaaggctcttaaagaaagaacaaccctttgacatgactcacacctcagaagacaaagaacaatgaatccctggcttgcaattcagctttcagaccctgtgtcctggcaggcacagcgccaccctgccatgaacctgcgttctgcagagcgggtacggactccctctggagctgtggtgttcagggaagagacgctccctcatgctgcgtctccgcgctggcacttagccaccggaaccacacacgcatggttgtgggaaccacggtttgcaccctggaactctggctggctgggacaagtcctattcctggtagccttgcggtgtctctgctatgtggagcaccggcagtgaggataaagagtctgtgctggacaagcccaagcagtcctcactctggacatcactaccattccctgaaagggtagcaaggggagactctcttgccttttcatactacaactgaactgctaatggtcaggccaagatactatctcaccctaacagtacctcacaggctgatgcaatgacccctcctcacaggaggggagtatgcccacttgcctcaacagtaagaggcaaactggtgtctcctttgcaacctctcagactggagagtcatgcccttgctctcttgttgcctgagcactgttggtccgggaatagggaacagtggagcggtacccagatactagagatgcctggagccagtacaagccacagcacaaccggcatcatctgttctgttttggggaatattctagaggatattgcattggatcttcttttctgtccccatgaatatgaatttctcttaatactctgcggaagaatgaacgctgtgatctctgcttaataccctggtcagaggaacacaggggacagggcctgagttctgtccattaagccaccttagaaattcccaagaagttctaacatttaacaaagtgagtagtacaatgctagactacaaggttgagcacgcacaggccatggggctggggtagaggtgacctctgctctcccaccagggtcccgagtgtaggctcagtgacagcccttggcacagagatctgggagctgcacaggtagcggtgacccccaaaggaaacaaagccacctagtggcttgatagagcctggattaggtcggacttcaatctaggctgggccctgattgacattgtacaggtaataatagatccatcatcaccaccctctgcaattccaaagaagaatagccactcctttcttggtgcctaccatcaccctaaggcatgttaaggaccctcataaagtctcagctgttcacttaatgtgaccgcccaagggccagctcttactgcatccagttttcaaaagacagttggtgctcccctgaagacccagcagcagcccagagcaagctggacagaacaagccaccttctgcaggcagcccggaccaacatctccaacatcccctgacctgagccacacgaatagagcctgcagtgtgtgctactgtcagtacattccactctgtaagacacccagaggcatgaggtcctcccgctcgctcgcagcttcccacaggaggtgtcaacagcttctgtatgagtgacggtcttgtccctccatacaaagggctgagcccaagctcccaaactaaactacctggggcctcggacccctgacactgaatttctcctcaccttattcaagggaggagtaaggacgaatatgaggctggagaagaaccactgggggctggggacaggaagtcatctttaccctcagcctttcgagactctatagaggagaaagcaatggaggagaggatgattcagcaggcgctcctaggatggcacctgccacatggtggctgagcctgactacaggcctagaaaacataagtggacgtcagaggtgcaggcagctcgtgcaatgcggtgaggagtcggggtggggcttctttaacaaagttcggcgaaataagttatctgcaggaaaggacactgcagagaccagacggggcctttggtgccctcagaagcacagttctgtctggacgccaaaggccactctgtctggaggagagacggtgccaacagagaatgagaggtgttatgaaaacagcgtgttttctagaagcgggtgacttatccctgaacccttgcacagggaggactctgcctaaatacagtgccctttccagacctgtctcagactgatctggctgagaggagcggcctccctcgtggcgagggctgagctatttcccctgggaactgtctggcagctctaatgaggaatagcactttgcatttatagagagcctttcatctgtggatctcaaagctgtaccacaaacattaattaactctcacacctgggaggcaggtgagtctggttaccccccaaccccatttttaaaaaatgaggaaacagagatttgggaggaaaaggattctggggcgagccaccggggttaggagtgtccctgatgttgggaataagcgtttcagatttgtagcatcctgaccacaaagtcaggaggcctccccgggatgagtgaggaatttgggtaccggaacaggagatgaagccacacaattccttcttccctttctcaggtggcctgtcacctcctgggtctatagatgtcatttagaatgggtccctcagaccccgaaggcctttgaaacagccttaccaggcaggtctccatcctggctcactctggatgcctcccttcaaagtaaccgttggaacagtgaccgcagccgagacgcacatgactaaccaaaatgtctgcagccagtgggagacaaatgcttggcaaatcccagggctctttcacaaccctcttttcttccaggatccagaactggtgggaactgactcctgttatcactggttctcactggtgtgcttaggcgatgctaatccagtgctggctacctggggagtgggggttgggggaaggagctctggggtgactcccgtctgttctgacttctggagctgttgtgggtttactgcccaccgcagaagccaaaggaaacactgctcaaaaccaccagaggcaagcagcctttcagttgggtcacctgcccaacaccagggctgtgaaagctgacattgcagagtggggggtgggggtggggnnnnnnnnnnnnnnnnnnnncctgactcacatcctgttgtgttctctgaggcatccgagagggcattacaccagctacccatgactgagctgcactgggagggcgccctgaggatgactctgccttctgccttgcagaaagagggggagtcttctaaggaaaaacccagaacaggccccttgggtttatccattctcagagcagattttgcgcgttaagaagcaagtggccctgcattgcatggcccactgtttattttcaatggatcgagggtgaacggcttgttgttttagagatgcccgccaaatactcaaggaacagagccccgactacagcagagccccaacgtcctgacccagaaaacccaggctgtgaggtcaggtgccagggccaccaaaggctcaagtgaactaggctgatgtccccgcgtgtcctttccttggacagggagggagggcacaaggctgaatcgggatgctttgagttttcgaaacaggaacatttatttactcttctgattggagtcagcttcatcgaccactttagatacggctacttctctttgcctcgggtgtggggcattctttccccctcctcatcccatacgcagtagttactggcgttctggctttcctttcaaatatgttttccgaaccagaaatttcccttccaaagctgcctcttctccaggccctaaatgttggtgttttcattttcattaagtgactggcagtcgacatatcttttcagatctcttatttggtggctatggcatctccagataatctccaatttttgaagatttctaagtaatagttctgttaccggtttttgttgttgttgttttgttttgtttttcggggggaggggagagtgttgtttggttttagtttaagtccttgtggcctaaggaaatactttgtatgattatgccttcaaacccaagcagtcttctgtggcctcaagtgtagtctgccttagcgagtgatctgtgtgcctcagaagaaaggagcggcctaccggtgttctgtaggccaaactgatactgtccaggtcagccgagtctgaatttctgcttgcatggtctatcggtgactggaagagggtgctaaagtctcctgccgtaaggatgggtttgtctgcttttccttgtattgcagttagtgagaccctttgttcacgggacacctgtgaaggaaaatgtatatttggttttccgtactatcataacgtaacttatctcttatccctgaaaagctccatcttcaatcggctttgtagaaaacttgatacagcaactcaggctttccttggattggtgttagcacagcttctccacccttttatgcttgccctatctgaatctacatttaaatgagccatttgtatgcgtcaggtagttaagttttatttgtagcttgttctgacaacctctgtggtagatttagacaattcacctttatagatacagttggattatgatctgccatggtctaacttttatgcctgttgcacctggttcttagtcccacccccggctttcctgcctcctctgaatggaatgaaacattttatgtgacttcattttagcttgtttattgcctatcgggtaggaaaatgatttttttttttaaatagttttgtgggagctagagagctgggtcagacattaaagcactgaatgctcatccagtggacctgggtttgattcctagtaaccactagtggctaaaggcggtctgttaactccaatcccagggaaatccaacacacgattaaggtctccctaggcactacaagcatgaggtacacagatatgatgcaagtaatacaacactcatatgcattaaacaataaataaataaataaataaataaataaatattttaaaattgcttcaataattgctgtagagtttaaaaactaagcccacaatcaaataatgttattccttaattgttatatgttacttatatttaaacttttgtttacatttttaaatttagtgtctctctctgtgtatatgtgtgtgcctctccctctcctcttcctcctccctccctccctccctcccctccccttctctctgtgtgtgtgtatgtgtgtttgtgcgtgtatgtgtctgtttctctctctttgtgtgtgtgtatgtgtgcatgtgtgtatatggtgtgtatatgtgtctgtctctctgtgtgtacatgtctgtctgtctgtctctcttttatgtatgtgtctgctgtctctctttgtgtatatatgtatatgattctgtctctctctatgtatatgtctgtttgtctctatgtctgtgtatgtatgtatgtatgtatgtatgtatgtatgtatgtatgtgtatgtgcctgtctctgtgtgtgtgctgtctgtctgtctatctctctctctctgtctctgtgtgtgtacatgtgtatgtgcctgtctgtgtgtgtgtgtgtgtgtgtgtgtgtgtgtgtgtgctgtgctgtacatatggaggtcaaaggacaactcacaagaattagtggtttccttccactatgtgggtcctgaggatcaagctcgtgtattggacaagcgccactctgctgagatgtatcacttctttcttatctgtcattattgccaattattttcttgatctttatgctgtaactgtccaacaaattgtggctgttatcacttctaacagttaactttcagatccgttatgaatagaaaatgggttttattttatttgattcacttcttctgggatgacctccttttcacccaagatctaagtttctggtccatttcattttctttctgtctgaggccctttaaacatgtctgttggtgatcattgatttccatttcatcagaagatgtactgcttttccctttgcattggaagaatagttttgctgggtataaaactctgggttggtttcactttgttcccttcagacctttggtgtgagttttctgtgatcgtccagttgggttcaatgattacaaagctatagttgacaaaggcatgtagttcccccagtgtctttgttacttcctcccttgttgtctttgagtttcccatgaactctgctttagtctatgcttaaagctctttggttggcagtctaccataagatgggaaaccatgagaactcagttgagttcctgggccacaaacatgtttctcctggacagtactatagctctccagacttgtattctcattatcagtctatattcagcctccagcaacttgtgacatctccatgttgtacttccatgagcttctgtttctaatcaacagaccttgggttggttttacatgcttgcctgcctcccaggacttgggtggtgccctgctttcctgctagaattctgtgggagatacaggaaagtcacagattttctgttctacttttttccttgttcttaggacaagaatggtaactccaaaactctttacattttagtgctaaaaaaggaagaagcaggccactctggtatgaattatttggcagcgtcatggtggactctaaagatgttttgatgttggtacctttaagacattcttttcctgagtgaaatatgtcatggtgctttgtactgtctccctacctttccccttatctttgacctccatttcaaatggaagggaatggggttcagggatgtaaaaggagcccctcttatctattatttgtaatggcctggtcatgtaatctcatcaaaaccatttgtcctgaaaacaaaaacaaccagcatacagaaggctcaacttttctggtgcttttaaaaacagaagcatggattgattaaaacaccgaattcctgctttctctgtgtcacgaaattccagagtccttactcattcagcatctaatccccagagcctacctcttctcaagatactcagctccaagcactccagtagtacctgagtcccaccccagttcaagtgtgtgttgccttaccagataagtctcttggcaggactgaatttcctttagcaatgcaatcatggaaatcactcagattaattaaccatttttgatggccacatattgtgacaggtctttttcctgttgcttgcttgtttcttgatgttactcttgctagtcagaagaatgtaagtcttgcctgaagctaatttatggtggaggcaagagtcaaccccaaatctggttgacttacatcctaatgctttcctgccctgctcctcccctctgcagaacataagcatgtcacaaaagtcactgctgcccttgcctctaccttggaagcagacatttgcaagtccaaattagtcatgtgatttagcagccagcctccattcaacctttacatcatcccgtgtctgtaagtcttacaaagtaaagaccataaaaccatttgctagtgaatccctaccactagggcctgggtgaagcaaaactatttgtgggaacatgaatgagggaacaagtaaataatttccccagcctatgaatatacaagtgtttgaatgagtgaatgggtgaatgaatgcatgcatgaatgaatgcatgaatgaatgaatgaatgaatgaatgaagcaactcttagtgtgctgacatgtgcatgaggaaggaacctttccaagcatcacaaagttagaagcctttccctgatgagccaaggcaggggccatgtggctcctagtcaccactatcactggccacatttcctgtgcctggcacacggtatatgtttaaccaactcttgttcacttggatgaattggcttaccagaggcaactccttcaagactagtacacctgcactttgccgaatgcctaacggtgactctctcagcctgtggcctgttctggatagctcccagtttaatccctccttgtggcatttcccagaaggcacacagttacgattttaagtacctacacctcgcctcccatcccctacacgactcttccctgactctagcaacatatagcaaagatgagttggactaatttgaacggggagcctcccctgttgccactggatggctttagagatcatctctctgccgagagagaagtatggaggtttggtctagggcaactggccctctcagcaaaccgatgggcctagagctcctttttctgataggcaatcaacaatatggttgttatgattctaactttcctgtgttcctagccccacctcccctcccatcctaacaacgatagaacctctcccacaaacgcagaatgcactgtatttccctgcctcttgtggtttgtttttgtttttaatagagcattaaaaagctgaaaacaacccaaattacaagaagaggctcaccaccaccacctactggcccacccctggcaaaggacccaagtaggttcctggtgctggcggaaatgatggttgatgggccgtggcgtcagtgacccactcaatactgtggtgggaagtaagatgatgccaaatctataacctgtgtttaaaaaaaaaaaaaagaagaaggcgcagattctgagcctgaatcataaaggccgttccaccgaagcgaggctgtgaaatattacgcaacgttcgcacggtttaattacgagtttagaaaggcctagcctgagtttttcactacagtaaaacatgacagagcatgaaccctggcaccacactttatgcttagtgtggttttagacacagggctggggtgctaggctgtctacacaacaaggcatggattacaataccgcaattcacaccccgggggccttcatgacaattacagaacctcctttgtttgctttttaagtgattaaaatatttgaatagtatatgtccatttgctaagtgtgtatattgaaagcactggcatgtcttgtggaaaacatctgagagtgtgagctttgggctccccgcacacacacaatggagcaagatccttacagtgatgtgggatgcaggacggtgttgtttctacacacctccgggcctcaggaacagtcggctgtaaaaccgcacaaggctccacctgcatcgcagcacttgtctgatgagtttagtgtgtgccagctcccttgtctgtgccgtcccttcagacaaactctccaccattgggaggatgtcaggagatctcttcaccgggagattctaagttaaaatgttggcccaggaacaagcaggtctgtggtccttacattgtcgggtttgtggttatcgttgtgttctattttcccggacattaaaaccaaactgagtgagagaaaggaacaaggcttattgagccccgaagtcaagtgcacaagagacatttgcttcaactcccggctctgtccctgctctttcttggtgacaatctataaaatacattctcaaagttttgcccttcaaaaacaccactggccccaagagtccatgctacctggtttggtctgttgtgaagcagcctcattagtgtgcctgtgttttggtcgttcaccatgtttgcactgtctgtctgtctgtatctctctctctctctctagtctctctctctctagtctctctctctctagtctctctctctccctctctctctctctctctctctgtgtacgggggagagttatctttttactatcgctctcgctattgtttctatggcatttgaggaatggcatttgctgaagtagaaaacatacacatgcccgtggacatttcctcagggtcccccacgctccagacccccttacatcctttgtgcttcctgaacaaggtggccatctgagccgatacaatgtttctggtgatgataactgtaattgctggccaggatgaatgtgttatcctgaatgtgtcacttagagtgatccagtactaccagagtccattcccaacagtattagtgtgaaaaaaaaaatgtatatatatgctatatatattatagataggtagatagatagatagatagatagatagatagatagatagatagatggaaggaagagttagcaaataaaactccccctaaatccatgaactgtacttcagtatctttaatgggccttcatacaacagagtcatcaaatacttgggctctagtggtctcattagacacaagtgaacaagctgtgtaaacacatgtataatcatttaaataatggttaatagctatcatgatgagaacttttcgtcttaaaacccctgccccaccccatccatgaccaacatccttgtctccctgcagatgccaggcagatccagccatccccaccgtggtcctatgaccagtcctaccagtacctgggatccatcacctcttcctctgtccacccagcgacacccatttcacccggccgtgccagcggcatgaccagcctctctgcagaactttccagtcgactctcaagtaagccctgtgaaaacacacctgcagcggggctggaggggaggattcggaggaccgcgggagactcggggagacacagaaagacacaggaaaggcgggacatggctaatggaccagaaaagggttcaaagaccaaatttcctgcctctgtgcgtgtccagtgcctgagcactgatctttcttaacatgctaagagatgccagatgaggaggcagcaatgccttagtccatccctttgggatttggggtttgctcatatctggtgagaaacgttggtggccaatggttactattctgataagtggaagtggcctaaagatttttgtacctttggccaagaaattaacatcccaactgaattctagaccgaggctattctttccagaagtggccagtttttatggctcctgcatacagcacagtggggtacatactggaataggacacaaatacgccccaagataaacattcccagctaagagctgttcagactgaggctaggaaccaggtagaaagctcaggtgtcatggttagcataattgttgttaatacgagctcattacatattagtcatttaacctatgagccctttgggcttggcacactcaccttcgctcctgggcagggaaatcagaggtactgggggaaaaaaattcctttgttgaaggcaaaagaagaaacttactgtttggggctttgaaattggagccgaagcaaactgtgaaatacttcagagagcttcgtcctttagaggcccgtgaatgcactcccatgtgtgccgggggaggggcaggctttgctttcggactcttgaaggcagattagaatagatgagggggcaggcagaggagttggggctgctgctttaaatgttgtgaaagactacatttccagacagccacgattgcttaagactcctccagcgggtcagctgctccctcacaatcaccctcaattcaccccgcctttccccagcaaccatactgacatttgggctgtatcatgttttgttgtgggaacaggggactggcctatgtgccaaacaatagatagatgacccttgacctccagatgtcagtagtaaatggccctgtctgtccatcagaaatatctccaaggctggggaccagctcagtgggcaaagcccttatcttgcaaacatgaggaccaggtattaaggcaaagtgcagtggcacaggctgctagtaccatcactaggacatggagacatgtgagtatccagactagttgaattagaaagcttcaggcttgggagagaccctgcctcaaaaagccaagttagatggctgctgaggaacacacacacgcacacgcatgagtctgcactcgagggtactcatcaatgaacactcagaatgctcccactcaccccttacaaacacaaacccacagaaaatgttgctggacattgtcacttgtctcagctgggggcattgagaacttactagcttcaactaggcttggtgctggactgaaatgccaaagccagnnnnnnnnnnnnnnnnnnnnagagagagagagagagagagagagagagagagtttgccaggacccaaaagtgaccctctgctgcccagtagggaagaccagagaatgacaaacaactggcatagagtgagcctcaacttggcaaaactccctctagaaaccaagccccgagcacaggcctcaaaagcctgtaatgtgttctcataaacctgggccagagagggtaggtagggtccctgaaaggaagaggctgtcaggcccacagcttgtcagccgaacttgacccctctgtggctgatgtgccttctaatcccaccagtgacagcttcaagttctgggctttcagcctcccccagcccgacctgcctagctgctcagcacacacacatgcgttctcagcagacgggccctgtctgtctctgtcccttgcagacagacagactccacaccttgtctgaaaggagctgccacgtgaaggtttatctttcctcctcatttctcttcttcctttattttaccctcttccttttcttttggttaattaatgtctagctgccaacctgggcgacagacagcgcatactaatctgagtcacgcaggagagccttttaaggcggtcattatctgctcaggttgtttaatcctttgggggcagtgggaggggcctggggtgggacctctttcatccacatcaagctttagagccaagactctgcgctctgtcaaggtagagacttagcaccatagagggagagacactgccagtgaaagtggctgaaccttctaatcctcacacttcctacttttaaagtctccccatgaatgggagagggggcagttgtcacctgaattgagtgggtgggggcggcgtgcaccggactagccaaaagaatagaggagccgtagttgggtgatgtataaattctgtgtgactgctgatgtgtaaggaaagaggttagacaggatttaaaaatgaaaacacggggagctggtgaggtagctcagtggttaggaacctttgttgctcttcccaggccccccacattagcccgctcacagctgcccataactccaactcgagggcatctctctccttcctccagtgtctgcaagcacacacacacacacacacacacacacacacacacacacacacacacatgcgcgcgagcacctaactaaaaataaaatagctgtaaatgagaacacgtattcgaatagagcacttgaatttgaacatatctaaaaggcccatgtcttttttattacagagcgtatacaaagcgagacagggagggatggaaggagaaggggaggagggagagagaacctgacctctcgtagaaagacgccacactatctcagatcttccacatactctgcccccagcagctgagactgtaacattactcctgcgcttatgcccatgacaaatcacggactcactcgggattccggtaacgtggtaccattaccacattaccatgtaagaactgggacagactggcagagcatgttcagacacggctctgaaacgtggtgacctctccttcatttttttccagtggattcaccttttttgtctcaggacaaatgaagcaagagggataatgggcagagtcacttgtttgtgtccagtgtattgcatcagatgacaacaggccgattgtgtgtgtgcctaatgctctccctcctgcctcggcttctccctagactgtataaatctaactggaaaaaaaaaatggagtagagcttcctgttaactctcaagcatgtcatggctctctgtaagcaaaacaagtgacacagagtttgctcatagaggtccccggtgagggcgcagagatgaac

SEQ ID NO: 104 - DNA, 4295 bp, Mus musculus
ctcattcatagagccagcgggcgcgggcaggacgggcgccccgcggccggacccagccagggcaccacgctgcccggccccgcggctggcacttccatcctgagctccccgagacgcaagaaagtcaccctttgcggctctttctagatctgcgttggaccttcttgttttcctttcctttcctttttttttttttttaatttttatttttattttccctttcttacttttgaatgaaccggcttctaggctttggatgtttcaacttctaggctgtgaacttttctccgattgtttcttttgacaactgcgggagaaagtgttccggagttccaggcgagcggtgaagttgcgtgtgcgtggcagggtgcgtgggagtgagcgtgtgtaactcgagcctactggtctacggtgcctcctcccaggcccgctccacctgctgcggttacacggtgctcgctcgtgggtatttgtgcgccccagcagaaaaccagccaccgccgggcgacgttggaggaagatcatcttgccagactctgggctgactcactcaaccaatgtagacagtggctgacttccgaagagtgcgagtctgcctgtgtgtgtgacccaactgcggctcaactcccaccaaaccacaggatcagccacaaacttaaccagcgttcccaaaccagagtcctcagctgtgggaagctctaccctgagtgtcatcgagtttgacttttttttttttaagattagctacagatctttgtaaagcactgaccatttatttggccagaatttattgagtaatgacaagtgatcctatccagccttccaactactgaagctgattttcaaggctacttaaaaaaaaaaaaactgcagcaaacattaatggatttctgttgtgtttaaattctctacagattgtattgtaaatattttatgaagtagatcatatgtatatatttatatatacgagcacatacattagtagcacaatcttttaaagttacggctcttgcttttgagaaacgaagtgagtttttcatggtaagaggggcgctctgtatggaagacactcctaagttttgtattttgttgagactctaaacaaaactgacccgcaagaaagaaaaacaaactgacaggcaactaactggtggaacttccaaatctagtttttgctggtcattttttggttgttgttgttgttctgcgcataaatattttaggacgcgtatgggaattttgctccgggaccgtttgtaatagccaaagactgaacttcaactctcaaagcgaggctctgttgggcatttgactttgaattctggttgcccactttttaacgcactaagcggccagttgctaaccctgcttgggtgtgaggccgatccgtgtaactagatctcagtccgggactgatggtaatttagtctcctacccccacaaccctccggtagtaataaaggcttctgaacttgtatgttggtctcccgggagcagcttgcagaagatccgagcccctgtcgccgtctagtaggagctgttttcagggtccttactcaatcggcttgttgtgatgcgtatccccgtagatgccagcacgagccgccgcttcacgccgccttccaccgcgctgagccccggcaagatgagcgaggcgctgccgctgggcgccccggatggcggcccggccctggccagcaagctgaggagcggcgaccgcagcatggtggaggtactagctgaccaccctggcgagctagtgcgcaccgacagccccaacttcctctgctccgtgctacccactcactggcgctgcaacaagaccctgcccatcgctttcaaggtggtggcactgggggacgtcccggatggcactctggtcaccgtcatggcaggcaacgatgaaaactactcggcagaactgagaaatgctaccgcggccatgaagaaccaggtagcgagattcaacgacctcaggtttgtcgggcggagcggtagaggcaagagcttcactctgaccatcaccgtctttacaaatccgccacaagttgccacctaccatagagccatcaaaatcacagtggacggcccccgagaaccccgaaatgccaggcagatccagccatccccaccgtggtcctatgaccagtcctaccagtacctgggatccatcacctcttcctctgtccacccagcgacacccatttcacccggccgtgccagcggcatgaccagcctctctgcagaactttccagtcgactctcaacggctccggacctgaccgccttcggcgacccacgccagttccctactctgccgtccatctccgacccgcgcatgcactacccaggcgccttcacctactcgccgcccgtcacgtcgggcatcggcatcggcatgtcagccatgagctcggcctctcgctaccacacctacctgccgccgccctaccccggctcatcacaggcgcaggccgggcccttccagaccggctcgccctcctaccatctatactacggcgcctcggccggttcctaccagttctccatggtgggcggagagagatcgcccccgcgcatcctgccgccctgcaccaacgcatccaccggcgccgcgctgctcaaccccagcctccccagccagagcgacgtggtggagaccgagggcagccatagcaactcgcccaccaacatgccccccgcgcgcctggaggaggccgtgtggcggccctactgagctgagcgccatcgccatcgagggactgggcctgccgtccatgcacagaccccgccaggagggcccttggaggccaccaggaagaatcccggagggaaactgtgaatgcttctgatttagcaatgctgtgaataaaagaaagattttatacccttgacttcactttttaaccacgttgtttattccaaagagtgtggaatgttttcggttcggggtggggaagacgcagcccatcctgtttggcatctatttcttatttcggagttttcttttccgcaccttatcgattgcaaaaatgcctgtttgcatctgggtggtcatttatttttaagtgtgtatagatttgagcttgcttttttttcttcctttgaccaactcaaagaaataaaattcccttctctgtaaggtttatttaacttttagactttcatgtagctttggggttttatttgtgtttggtttttgtttttgtttttatttttaaagagacagctacagctttgggtcattttttaactactgtatttccacaaagaaatccctagatatttatgtatcttgatgtttgaacatttacatatgtgttgatacttttttaattatttaaatgtacttatattaagaaagatatcaagtactacatttttctttataatagccaaagttaaatattattgcgttgaagatgtctggaaaaaaaagagatcgcttggttaactagaaatattgtttacattaaactccctttatgttattcaaacaagttggtaggtaacgcagcaatgtttttaattggattgtagacactgagggtcactccaaggtcagaagtacaaaattttctgctaggctcaacaaatagtctcatacctggctccttcccttcaaaaagagaggcaaactctgtcctgaaagggttcagagaggtgccaaggatttgctctgaagaggatttcattttggcctggagatatacttgccccaaggcctcctcattctggcatgctttatcacagagctcaaccaagtaagctgttggtcaggggtttacttacatagtatttacatagacccaaaccactgaatgtgatttttaaattgccttccattaatagtacccgttcattgatgaaaaccaaaacttgaggctgtaccccaaagatccaaatagaagagttaagaccaggtgtctttgaggcctaaaggctgagttttaagagagtgtaccccaaaagtctgaaggagccggtttccttctcccagtcttagtggaatcagtcatgggaggcagatgccacgcccacctgtgcaggatgctcctcagaagctgccccttcaccagcatcttctcccaccaggccgagcccctgacctttggggtgcatcagtgtgatagatcctggtctctgcagtccgccatggctacggttcagatgtgcatcgtgtcactgtaaatgtaatggtactgttgttacagtggaggacttggtcaaaatccagttgttctacaacgtatgaagcctaaccgctggttctgacatacatgtgctcaaaatga

SEQ ID NO: 105 - DNA, 1164 bp, Mus musculus
atgcgtatccccgtagatgccagcacgagccgccgcttcacgccgccttccaccgcgctgagccccggcaagatgagcgaggcgctgccgctgggcgccccggatggcggcccggccctggccagcaagctgaggagcggcgaccgcagcatggtggaggtactagctgaccaccctggcgagctagtgcgcaccgacagccccaacttcctctgctccgtgctacccactcactggcgctgcaacaagaccctgcccatcgctttcaaggtggtggcactgggggacgtcccggatggcactctggtcaccgtcatggcaggcaacgatgaaaactactcggcagaactgagaaatgctaccgcggccatgaagaaccaggtagcgagattcaacgacctcaggtttgtcgggcggagcggtagaggcaagagcttcactctgaccatcaccgtctttacaaatccgccacaagttgccacctaccatagagccatcaaaatcacagtggacggcccccgagaaccccgaaatgccaggcagatccagccatccccaccgtggtcctatgaccagtcctaccagtacctgggatccatcacctcttcctctgtccacccagcgacacccatttcacccggccgtgccagcggcatgaccagcctctctgcagaactttccagtcgactctcaacggctccggacctgaccgccttcggcgacccacgccagttccctactctgccgtccatctccgacccgcgcatgcactacccaggcgccttcacctactcgccgcccgtcacgtcgggcatcggcatcggcatgtcagccatgagctcggcctctcgctaccacacctacctgccgccgccctaccccggctcatcacaggcgcaggccgggcccttccagaccggctcgccctcctaccatctatactacggcgcctcggccggttcctaccagttctccatggtgggcggagagagatcgcccccgcgcatcctgccgccctgcaccaacgcatccaccggcgccgcgctgctcaaccccagcctccccagccagagcgacgtggtggagaccgagggcagccatagcaactcgcccaccaacatgccccccgcgcgcctggaggaggccgtgtggcggccctactga

SEQ ID NO: 106 - DNA, 96593 bp, Homo sapiens
aatccactggtgcgtttgtgtgggaatgagagtgaatctagagagatgaagacaattatctggtgggctgttaggaggctcaataaaaaacacccctgctctccggtgatccacaatcaacagtgagatgacaaaggagtcaagcagatggagataaaaataccagcttggtcactgatagaacttttggagagcatggcttaggtatgtggcttcctgctactgagctccagaaatagggagactcactcaccaatacccaagcagtgtctccccaaaagaataaggagagggaaagagcatgcccagggtacttgttttcttattgctgtaaaacgagcaaattgccaagcttagcaccttaaacaaatttagcccacagttctgcaggtcggaaatctggtggtgctgtactagattctctgctcacagcttcataaggccaaaaatccaggggttggataacctgagcccttacttgaaggctttagggagaaattcacctccaagctcatgcaggtagttggcagaatgcaattccatggggctgtagcatagtggccctcgtttccttgctggctgtcaatcaggggtcaccctcggcatctagagactgctctctagttcttgcaagtgcctgctctgtcttctagctacaatgctgacttcacttctgccccagcctgagaaaacactgtgtttgtaatggtctcctgtgattagattagggctaccaggaaaatctctctgttgcatgagtcaaagccaactgattagtaaccttaattacatatgcaaaaaaaaatctctttttttccatgtaacataaccagagcatgacaactcatcatattcccagccccagggattagggtggaaagtttgaggggttcattttatgcttctgccttctacaaccagtttctgcttccaacgctactaactaggtaattcaatcttttatggtggaggaggaatgagggtgtaaaaagaggtcaagagttttacactaaggaatgttgttccacatggaaacctgaagccagggaaggggtggttccaccacttcctctcacccgccccaccacccaatatatttaaatagctataacccaaaatatattataattcaagtcacataggagatgtggaaatgatgataaagcatgtgattggtctttaagaggcaatttcacctgaggcagaaggatctgcccccctccaagatgaggacaggaagggtagctcttaatcctgcagaactgtgctaaagaccttgcattgaattccagatgcccaggagaacacagcagaactatggtgcaggagactaatctggaagtactgtatacaattagcaggaaccccctttttcagagatctttgtaagaaatcttcagagaggtaatgagaacttgaaccagaatgatgtcaataggaattgaaaggtgggggccgaattgttatcaaccaaagaaatcaaaaagagatcttggcaacagactggatgagggcaaagatcaatccatggatccaagtctggaaactgggagaatgatggtgcagtggggaaaacaagaggaagacctgggttgaagtggaaactgatgaattttattttcagtaaaatacacatggcaaacactaattttctcaggttgcttccatcttacacacatgcacacatatatatacacaaacacctctcaacactggtctttctctcctcctgctacctcaccagtttccctccctcctccaacaaatttcattctctccttccctacatcccattcgctttctactctctgctccatttctgctgctgccactcaactgaagctcctttggcaaaggttacatggcactctctgtagacaaatccagtggaatattttcatattttcagtccttgttttcatggcccctttgtggcctttgggccatggttttcctccaaagctggcattttcctttattcttttcttttctttttatgagacagagtctcatcctgtctcctaggctggagtgcaatggcacaatcttggctcactgcaacctccgcctcctgggttctagtgattctcctgcctcagcctcctgaatagctgggattacaggtgcccaccaccatgtctggctaatttttgtatttttagtagagacagggttttaccatgttggtcaggctggtctcgaactcctgaccttaggtgatccacctgccttggcctcccaaagtgctgggattacaggcgttagccaccatgcccggctgcattttcctttactcttattacttattctctcctctttcttttcctagctccatctccttggttgctccctcttctgctcaccctggaatgttgataatcccagaacctgagaatggtctcttctcactggaaacagtctctgaaactagcatagagtttgattgtaccctagatacaatctgaaactacaatagatattctaaggatgttcagctcattatttctacatgaaacctctccccagaattcctgttttccccaccagcacctcctattctgttctgggcatccaaagctcagagagacatcacgatgtctctctgtaaacccgctgtttctggtcttctctactactattaaaggacagatgctggggagactcctccccctccctcacctcaatcccctcttccatctccattgcttaatccagatcctcatgaccccttgtctgacaactgctatagctccccactcctcatctctactccctccaactcaccgagctgttgttgacagacttatttttctaatatatatattaattttgttatttccctgtttggctttgacagatcaattttcccgcatgttgaagttcacatttcctcaggttgcttgtgcttccaatgacctatctacgtctatgtatttttgaactgctgcactccctcccccactccccaacctggtctcaaacctatgccccaactgtactggaactgacacactgatgtgtttcataaactcacgcccttattcatgatgcttattcagcccagagcaccatttccccaccccaccgtcacctccctaaacccctcctctagctctttgaaccacctaaaaatctacccaacctccaaaagtcaagtcaaaaatcacctctgctaggaaggaagtctttcctgagcccaccaggggctgttggcccctcttcctcttatattccctcccaccagttcctgggaccctggacatgtgtccaccaacagccatgacacttctttactctcatctgtttggtgtttgtcatcagtgagcctagcaccttgcctgggacagaggaagcattcaaggaatgctgaaggcaggtgaatcaaataccttgtatctaggaaagtcctaaagatgcccttttaaactagtggaggtgggaaaagactaaaacgccattttatattattatcaatataaaagcttctcagccaaatggaccttggctttctcctcaaactctgtggatgacagaaatgacattaaaatctgactcctaatgatatgaggtttgcatggtgaagaatttccaagatattttctgatctagaccctgagacgggggggataaaagtgaaagatgagatcagagttaattttttagaactctaccaaggatagccacaaaaataatcatgatccaaaaggaacatagcttaccatgcatgtggacctatatgtagatatgaatatgtgtgtgtgtgtgtgtgtgtgtgtgtgtgtgtgtgtgtgtgtgtgtgtttctatgtaggtcaagagtgatgtgaatttgggcaagttacctgaactctccaagggtgaggttccttatctgtaaaatgggggtagcaatgatgttcttgtgaggattaaatcaggcaaagtatataaaagcacttcacccattgcctggcatataattacattcaatgggggatgtagggaagagagagacagagagagagcatgcaagctagcacactggaggatgggctaccagattcattgttcactgtcttaaacacacgcaacctcccctctcttgcagtttgggttctggcatctttaacagtttcatgggcaaatcacttcaaacctccacaggtgctacttcacctgggcagcagttgctcaccccctaccccttccccctccccaatttaaccacacttgctgtgttctcaaggctgctgatacacaacaaactaagaaagtttttaatagttaccaatcacagttttcaaaatccactcatttttgcccttgtttttgggtttaaaaaatcctggcattttcctcagaattgctgaactattaggtgtgtagatgaacttgtgttttcttgctctcctactccaatttcttagactcagacatggaaaagcttctctgggtctcaagacataatttccagggtgcgtggttccgctgggtgtgctgtctggtcagtcttaccgttgtggattccacacccccaccccactgccccaacacctattaaagctgagctgacgtaacttcaggatacatttattatttcttaccttatcattcacaattagtgcaaatgattagttctctgccttgctctttaaaaagaaaagtcttcatggagtcattttatctacttgtgaaccacaatctcgtttttttttggatgctcctttgagactatacatatttaattcctttaatatttcatcatagagcagtccttcagaacctcttattttagttgttccttttactttggcaaaaatataagactaaagaagctgcaaatcttgttttcctgcctatttaaacagcatctagaaatctgaagtaattgtctcctcttattttaaaggtttttttttaaaaaaaaaaaaacagcatactaaatattgtggcatggagttgaaagctttaggtctgcagcatttgaaatgctcaaatcctgtctttaaagaacagtatttcctctttgtgactcagtgctgttatcaatatacaaggctgatagagtaatttcaaattcacaacattatatgtagatattcaaaggaaagaaaaagagcttcatgtgactttgcttaatgggtttacctatagttgtaaatgtatactgtaagtgatccatatttgggaattatcatgtaacaattatttctaataataattgatataatctattagaacttgtgagaggtttcgatgtaaataatttacctgcctagcagagagaagggaaggagagtaagcaggggaaaatgtttctaaaatgtcctatcattggaagtaaatgatcataaatgtttttgcgttaagttagggtttggttttaattttcccttgaattctaatgttcctacaccttccaaatatattttaaatcttcattaaataaatcacattttaatcacacacggagcttaaaagaggtgattctatgacagatattcagtattagctagtgaaggagaacattggttgaaggtacctaaaaccacgtgcataaggaacagtttatttcttatttggtgatttactatttcaagtcatttttgtgtcaaagctataaaaatctccagtgctaaaaagtgtaagaagaaatgagctagcaaaaaaaaaaaagtcgggggaaagttaatttttaaacttgcattacttttattttcctactttctgttatttcagaatgcatacttggaatgaatccttctagagacgtccacggtatgttaaattccaagttatatttttaaataaagtacacaccttcatagatgtgtatatgattttatatctatgtatctctatgtataacttgtgatataatttaaccaaataattaaggctgtttctgctgattccaatatacttaaaagcagttctccatattgtaaatgttataccatataaaatatttcaatgaaagcttaaatgataccctcagttctacagcgtttaccataggtgcattctgatgctattaaatgcctctatacaactctctaaaaacaaaacagagcttggcttccctcacagcccagcttattacctgtgttatagcagtggtaatgcaagatttttatgagagtaaaatgtttactaagcattcctaaattttaaaaagattaattttaaaatgtcctcagcttgctacttgtgaggtacacaatgggtttatgaagtgaaagtgaaatcatcacacattaaccatagcatcccacagaaacattcagatggaggaaggatgtaatggaagaactaagggctctcctcccccctctcatagtaattagatttgaaaagtgaagtaatctcaaagccacttcagaagaaaaaaatgtttaattaaattccaatgttcaaaactggatagtgtgtatggcaggtgatttgtacatacatgttactcttcatcaaaattgttttccatccctgtgacatcaatacaaactgcagctatttggttccaaaccatagcaagatacattctattttttaaaatgtaaatggtcatttaaaatagaaataattcttttagacgtactgcatttttacaaatgtgattttggaaatatattgctcgcaaagggtaattttaagagaattgttgagattctaatcccatctttatgcatattttggggaggcttttgaaagagcaaaaaggtaaaagatttagttatcttctgagaccacctatagttctttacctaaagttgtagaagaaaaacgtcaatgcactgttactgttttccaatgaaattatttttcttccaactaaccaagcagtactttttaaatccactgcagaaatgtacatttcattcctgttgtgagccgttttcaattctcctccctccctctccccgcaacaaaatttggaaaaatctgtcacgtagcatccgcccaacgtatcgcttcgttgtattttttttttttttaattttgcattatgacaaaagtaaattctagcattactccagggaaacactgggaatgaacctggtaatgtttcctttcctttctcccttaggcaaaggaaggggaattctgtattgtcgctaaaatgagcgctcttggtggaaaggaattcctcacttcgtacacgctgtggctgtccttgaaagtgcaggctccgtaaaatgcccggccgactaaggggttccctttccccggagcccctgcctctttccattcattttagatcctcagtaaggaagggcagaggttggtctgtttcttcttttcaagagggcaccgcgctgcgcagttaacagcctgcgccgctccggggaaacccaaatgtcccgcgatcccatcgagtcaaggagcaaaagctgtgattgctatcagctttttgtcgggcttcaaactcggggtttatcggttgaaactcctagctgagcagctcccacgacgctgcctctgacggctaaactcggtgcatgcaaggctgggaccaactttccttactcgataaaggaacttgactccctcctgggagaccgcagcccgagtccgactcgcagcccccgtcgcggggtttagggttttaggcaagcggcccgagacccagaggagcctccctggacctttccgaggggcaaatcacccgagtctgctatttcccctggagtcaaaagcctacttttggagccgccacaccctcgtgctccctcccgcatctcgggggttccgggggatgcacgtgggggtggccccaggagccctgggtgggatctcggggaaatgcattggagaccaggcgaaaaggtttcccttgcccagaacttgcctctagagcgggccgcgtccgaacccgcaggcaaaggcgctgcggcccctgcgggcgggcgggcgcgcgcgatgcactcttctcagggacagagttagaaagtggacgtttgggcggggggagggggggatttacaactggaattaggcttaaaaaaatcattttaaaagaaaaatgtagtaagttttctttccgagaccccaggtccattaaaacaaaactgaactcgggtgctggcagtgcccagggggagcggaggcggagagggttgaggccgcgggccgcccgccttagccccccggaagcccgggctcctgaagcacagatagccaagagcggcccgagtcaagccccaggaacaggggcttcgggaagagaccccgaccgggccgcacagcggggaggcctggtccgagagtccccacctggccggctgcgactctatattggaacctcggaaacgcgccttggccgttccagctcaagtgggctctggggcggcttcctgtcttttatcctcgaacgctagttcttcccgggcgacccgaaggccacgaggcgggccgcacagccccgcgccgtcgggggcgttccgggagctccggggactgcgcgcggcgtccagggagggcggctgctgccccctggcgtccgccagagcccgcggcgcgtcccgacagctccgcgcagtccgggcccgcccgggaaaggcctccacgccagtcaaccccggccccctcctgcgtccgggcccgcggcaacgcccggggacagtccctgcgcggcagcggccacagcaccctagccctgggggagggaggagcgggcgtcaggggccccgtgaggtcggcgagggacccccgcgccggggagcttaattgaggggctccgcggggaccacaaagcagcccgcggtggaacggggccgggatccggggactgggttgcagccccggggtggatgagaggccccgggaggtgcagggcccggcagggagggcgtggagggactcatggtgacgggagcagcctccgctgggagggagccccgccgggcggggtcggagttggcagcgcacgccggaccgggggcggggccctccgagctccgcgaaaatgcccgcagcaccgcggggaccggcgcagggggaagcggccgcccgcacgcgaagccggggtgggttccgcacctggggccgctcgagcgcacgggggcggggagaggagcgggggccgcttccggggagccggaggggagacgcggggcccgggcaggctgtccggctgctgcgggtgccggcgctacaaggcccgggagcaagccgcgtggctgctttcaactttccttccagccgcgcgttcttggggtctttcctgactaggaaactcttcgctggccgctgacgcacgcagcaagtgagacgcgcggagggatcgagccgcggcccgggcgcagcggtaaaaaacacccattacagaaaccgacccaagggaagacgctgagagcaaacggcacgcgcggacgccgtccggcctcatgcaaggaatcagcgccgcttcgccgcagctgccagccggacggtgcaggagcgcggagtggctcccccgggccccgcggccaaatcgcacccccgccctggaagcggaggcctggccctgggcggccgcgcaggatctggggccgtccgcgggctgcagcccggttcgggagcctcgtggcggccactgcgcctgcctgcagcggctcgcggggccgggcctctccgggtgcggcgcgccggccgggtcctcctcgggccggcggggcctgctttctttttccaggtctccggaccgtggccactcgcggagccgcacaagcctgcgtgtggctgcggaaaggggtccgcacgcgggcggggccccgggccagcatgcaggcttggatgcggggcgcgggggtggcctccgactccccgcccgggctgcgtacagtagcgcgcggcgcggcggcgggggcgcgcgggccaattccaggagccggcggcggcgagccgcgccctggctgataccggaaaggcctgtgattggccgccggccgcccctatgcaaacgagctgagggaatggaattcctccggccgggcttacagtaaaagcacgttcatttccaggcactctcattcatagagccagcgggcgcgggcgggacgggcgccccgcggccggacccagccagggcaccacgctgcccggccctgcgccgccaggcacttctttccggggctcctagggacgccagaaggaagtcaacctctgctgcttctccttggcctgcgttggaccttcctttttttgttgtttttttttgtttttcccctttcttccttttgaattaactggcttcttggctggatgttttcaacttctttcctggctgcgaacttttccccaattgttttccttttacaacagggggagaaagtgctctgtggtccgaggcgagccgtgaagttgcgtgtgcgtggcagtgtgcgtggcaggatgtgcgtgcgtgtgtaacccgagccgcccgatctgtttcgatctgcgccgcggagccctccctcaaggcccgctccacctgctgcggttacgcggcgctcgtgggtgttcgtgcctcggagcagctaaccggcgggtgctgggcgacggtggaggagtatcgtctcgctgctgcccgagtcagggctgagtcacccagctgatgtagacagtggctgccttccgaagagtgcgtgtttgcatgtgtgtgactctgcggctgctcaactcccaacaaaccagaggaccagccacaaacttaaccaacatccccaaacccgagttcacagatgtgggagagctgtagaaccctgagtgtcatcgactgggccttcttatgattgttgttttaagattagctgaagatctctgaaacgctgaattttctgcactgagcgttttgacagaattcattgagagaacagagaacatgacaagtacttctagctcagcactgctccaactactgaagctgattttcaaggctacttaaaaaaatctgcagcgtacattaatggatttctgttgtgtttaaattctccacagattgtattgtaaatattttatgaagtagagcatatgtatatatttatatatacgtgcacatacattagtagcactacctttggaagtctcagctcttgcttttcgggactgaagccagttttgcatgataaaagtggccttgttacgggagataattgtgttctgttgggactttagacaaaactcacctgcaaaaaactgacaggcattaactactggaacttccaaataatgtgtttgctgatcgttttactcttcgcataaatattttaggaagtgtatgagaattttgccttcaggaacttttctaacagccaaagacagaacttaacctctgcaagcaagattcgtggaagatagtctccactttttaatgcactaagcaatcggttgctaggagcccatcctgggtcagaggccgatccgcagaaccagaacgttttcccctcctggactgttagtaacttagtctccctcctcccctaaccacccccgcccccccccaccccccgcagtaataaaggcccctgaacgtgtatgttggtctcccgggagctgcttgctgaagatccgcgcccctgtcgccgtctggtaggagctgtttgcagggtcctaactcaatcggcttgttgtgatgcgtatccccgtagatgccagcacgagccgccgcttcacgccgccttccaccgcgctgagcccaggcaagatgagcgaggcgttgccgctgggcgccccggacgccggcgctgccctggccggcaagctgaggagcggcgaccgcagcatggtggaggtgctggccgaccacccgggcgagctggtgcgcaccgacagccccaacttcctctgctccgtgctgcctacgcactggcgctgcaacaagaccctgcccatcgctttcaaggtactggcccggagagggtggtgggaggacaggcggaggccggcgaggccgggggagatccgcgagggcagcggccaggcgggcggggccggattctggaaaggggcccccgcagccccgggtcggtcttcctagcttgggatgtgggggatgctgtgttgccgtggcgaccctcgggaggcactcgtctcagctttctggggcggcctcccaggagggctgaaaacatcagggtgtccccaaagatatccactgggagccggtcgggacctccctggcaggggccttagctttgatacaaagtaggaaaagttataacccagcccggcagagacagcccgtctgctaacttactgctgcccctaccgctggattaacacccaaaccattttgtcttcctcagatgaaaggatcaggaaataaaatagtaagacttttctgccttcaagtcagtgaaaagaaactaactagggaaactgtcagggattttttttccccttctctaaccgccctataggaattagcatgtccaaagtccacagcgggcgtagttaagtttgcaaaagttttctgaagagttctctgagctttttagcctgctcctgccagaagccgcaagtatcgaatcctgtttcttttcccggaaccgttctgaatgctatcatcagctcacctagattaagccaggggtagcgaaaggtgacgaggctgttttcggagagccaggggtcccagcggcccgctttcctgctagaggagggggcggcgcgtagccggagacttcagcgcggcggctccaaagatctcccttcacttttcacccctgatcatccccaaagctttgagctgcctttaaaaaccttgaccttcaacaggggtatgaaaacaaccccaggcgtttctaaacaatcaccctactacactagcagcaagcagtaggaatttaatttctgcagtggagattctgttttgtctttggtgggtttgaaaagatgcgactaagtaaaatcagtgcgggtcatttcctgttcgtttaaagggcgaatcaaggcaggtggttccaagtgtaaagataagctactaaaaaaaaagtttaaataattgtcccctttaaagggagattaatttaatataagctttttatagttccaagcctcagctgggtcttgatcttattacaacgacgaatattcactttttaaaaaagtattgttgcggttatttttaagctttatacagtttccacacttagattgtgatttctaaaacaaaacgaaatttgcagttggctgtgtctatagattggcctctttttccactcacttttctaaaagcagttttttttgtttgttttgttttttagtgggggtggaaatgaggagaaggaacgaaggaacgtggtggcttgcttgactcttttttccctccctccgtttacttagatttgggtttgggagaccattttacttttaaatcattctaaccctttgcctaaatggactcagcgatgactctttagggcacccgcattgagaggggacccaacagggttgggccatggggtcactatcagataaagagcagaggcaagacgggctgataaccaccaaaggccattaaaacctggctgccccaatgcactagggctctaagagatttgtggcttccttttgggggggaaatcagggtctcttctgaactccctcctctgccagggaacccacactcaaatatattaaaagactaaatgattaataaataatcttcaggaattggagcaattcagagtctcaagccattacatgaaagtatttattttcttctaaaaaatgaaaaattatacatattgcttttatgagctgtcagaattctttctagcagaaaccataataaccatagagtttcctttttaaaatgacttttggcaattcacttaaaaacaattaatttgttttattgagtgataatctataggctactaaaaatccaaatacagagctcttgaaaaaagttcaagcagatcccctgagaacatttaggggaaaggaaaggatagcagagaaatcagaccatttgattattgtctgtcaccaccccaatcctcataaaaagaggcttcttcctggaggagacctgctcactgcataactagaagagtagacaaaatgttcagtgagacagtaaacgtgaagggataaaatgttagggataaaagcaagcaaaacatcaaaacctgcctacatcccgggctcatttagtgtgtgtccctggcttcactctatctgcccacccaaccacctcacaagcagcttcaacagaaattattactttaaaatttggatcttaaataagccgcaggcaatctccctaggaagttaaccagtaaataattattatattccctatggtaaagagaagcaaatgtgaaacaatgataaggcctgatgatattgatgaaaagatcactgaaggccttcttaggaatctcctgaagttctgtaggtaaatcctctacgtcaatcttctgaactaaagagagatttaaaattatgaattttctttaaaatagattacaataaccctacttgcttattttgagccccaacctgttctccccctactccttccctcccatggaacacctttattttttacagtatgagagatacatgttttttactactaagaaaaccttaagtttgctgtgtgttttgctgtacttacagaattagcctaaaaagctgttttgatgacttaggatgtatttggtaataccatggtgttatagcttgttcaggccctggtacaccagagtccaaagacgtaaacgtgccttcagcagggaagttcggaggtcttggattctgatggtaatattcttttcataaaaaggaaataagtaatatttttgtcggcaagatcacagtccctagctatgccttaaatatcatctcagctgaattctgtgttccactccacagccttctttgcaacactggaaggttaacggatttgaagtaaatgaattgtaactgtaatttcaacctaattagaattggtttaaaatgccagtttggaccgtgaacaggctagccaagaacagtattgggaggtccatgtaatatagaagagagttgatatttggcccaacttcctgatactttaaaaacagagaagtaaaacaaaatatgagatatctttggccagcaagtcccttcttgcctgtttggtctgtgttaaaatgtaaatgtttgtgtttccttacctattgtttatagcttttcattccagttgtttcttttttctgtttgaagttagatatttttacattctctccatattgcccatcagtgacaaaacctgtatcaaattagcacgcatgttagttttgaattaaaaagaaactttttaaacctggcttaagtatgcttgttaacaattggacgatatacagtattaatgaattgccctggatttactagttcccctttacccacccgcctccaccaaaaaaaaaccctcagagatcaatacaaggccaagtgaatgatatgtaggtgcccaaatatggttgattctgctgcatttaaaaaaaaagaggagtgggagttaaacttctaatttttttcttcttaagttccaacatcaacagccttttcttatttagcctccatgataattttattctatgtttgtttcgacttggcgaaggtctcctgaatttgccaaattaccaatgaggatagtattggaaagatgagagaggcacaggcttggagcactgtgaggggaacagcagtaggaggcagataattcagaatacattcctgtagttataaaagaagatttatttattttcacctttttacagatccagacccaacaatgagttattcagtttgaaacccacgtagtggaggcagtctctgtatacctgctgaatgttgagttacaatagagaagcctgggttaccacagggagaggaggatgaggaagtaaaaatatgtgttcaaagagggcatttcaacactgtgagctaactttacaacgggaagtgaaaatcatgaaaaaaaggggaaaatttgttgtgagagactaaaaagagcaaaataaagcaagcccatttttcgggaatagaaaaaaaaaaaaaacagtagcaataaccaaataactgatcagggagatttatttccgtgatatctttttaaaacaaaaagggaattgtcgtatcactgctcttaattaaatggcaacaaacacacttataatgggaactaaatagctaattagagggtgcttggggaataaatagcagagttttaaaatctcctatatggaaaacatgtccaacaattggaatgaaaggattaaaaagagagaaaaggcccagaccttgtttggcagtgcaagttggataaaatagaggaaaatgcctccctgcttctatgagactagattatcctggtgtagtcttggggttggaagtatgttcatctctcatagtgagttagttcgtgttctgtgccacaaggactgaagcagttctaatgaataaaaacaatagatagtcatctggaggccacagggaaagggtgatggctaagcagatcatgaaaatgggaatcttgagaaacatgacttcgatatcatacaagtgagtctatggcagccttttttacatatagaaaaagaggcctgaaaatatatactacaaaaaattatgtagcagttattaaggtaaaaattgggaagtaggaggcagaggaaggagtgataacactagattaaggaatgctttactgttaccaattcaaaaacagcaaccaaaaatgatgatgtaattggaatgagtaatataaatgtcactactgactttaccgtaaagaatgtcagaaatgatcagaataaatacagcttggggcatttcgatttgaagttgtatgactgctttgaaaaatagaaacaaaggaaatacagccaatagtaaatgtctagaccaagaaaatagtttctagaaggcctaaatgatagccaagaaattgatgctattgtacaaagtatctttaggtcatgcttttcagagtattttactttggaattcattttcttaattacctgagtataaaaacatttatctaccagttttctccaatagccctgataagacttcatacttactcagttacattaaataaattcctggtcaagatcagctgggctagcagaaaacctcaggcatctgtgaggacatgagtttacacacgctgagactcacagatacaaaaatgcaacccaattccacccctgaattgaggggagtgcatagaagtgaatgtcccgtctttctgaggtctgttgattttgtaattagtaaacgaagggtgcatttctgatttttttttcttgtgtgctagaattcattgctagtaaaactcaagataatagcgatgagtaggaggtatcaaagatgaactgtagagggacagtttaagttacttaagaatcgtcagcaagatgaaatctacttttagcagaaattgggtttttttgtgtttttttgttttgttttattttctaaaagtaaagtctgcaccttgttcagcctgttagtggaggtctgagcaagtaaaagatgggttggattataaacttacaaacacaggatgttctgtttctcaaacgggagaaattaagaagagatgcttgtattcaggagacggcatagctactcaaaatccttgatatcttgctatggttagtcttgttccaactgtgctatgtgacctactatggctttatgaggtaaatttagtatatgtgtcactatttgaaaatttacatatagttatacataatgtattaggttggtgcaaatgtaactgcagtttttggagttaaaaattgcaaacactgcaattacttttgcaccaacctaaaatataataaaaaagtgtcttctctttataacttttctgttgttttgcttaagttatcattgctattcctctgcaacctaaaaagaaatcattgaatatacatttaattttagaataatcactacacaaatgccctaaaagtgtatgtataacatccctgatgtctgcatttgtcctttgactggtgtttaggtggtggccctaggggatgttccagatggcactctggtcactgtgatggctggcaatgatgaaaactactcggctgagctgagaaatgctaccgcagccatgaagaaccaggttgcaagatttaatgacctcaggtttgtcggtcgaagtggaagaggtacgttatctgtcaaaactatgcttgaaacacgtttcatggcaacaaacccacatttcaaaattctagtgatttctgtgatggaatccctagaaactcggtctgtcttaacattcttattgctatgtcaagctcttaaaaatatttatttgaagtttaatatttttagcagaatctctatattattgctttatgttactgagtggatttaagactgatttggaacatgcaacgtaggaattgtgaatttcaaagaaacgcctgagatttttactaaaatgcaaaaaatataaaactgactttaatgaaactaggattatacaattacaatgaggattctctcttggataacaatacaaaagctatttaatggaaactgttgacgtatgatctgtgggctatctgtgaaaagtgacagagtttcgaatgaccacttctaataattttagggatttctagtgtatgatgttgaaacatggtttcaagcaagcttacctttttagaaaaagacatgaagaaataatgttagtaccattgatggcagtatgatcttcctgttgtatttcttttcaatgccttatttaggaggaggggttgggcctggttagcattttagatactaataatattagagattggattatccaagaaattgttgcattacttcagctccatgtgtgattttatttttccttgcctttaactcattatcaaagcattagagcagaaataggaatcttggcttattgtaattttttctggtttccaattattttcaagtattatgttttctttacattgtaagaaccaaatcatattttataaatagcaacaagtagtaaaagtttagttgagggaggtaagatagttttttaaactcattttttgtaatatagtaccgattaagcttacaaataagttatttcaagtataataaaaagacttatggtaaatacctaaataacagtaatagttctcgtattgaaaaaaatggaagcaccaatcaaacaacatttaaaataagagaaattattactctttaaaaaggcatttaaaaacaagaaaatctcagttctcagagaatttgattagtcagaaaggagaaaggggtaaatgtgagttgattattttggtgattatttttgctatcctagctatctggagcattttcataatagaatcatagctggagaaaataaaaaatttatataatgtgattgaaaatatatattcatagtactatattaataatagggtaatgcaaagaaaattatatccactttttgaaagcatgagtgatgctataagatataaaagcataagtcattaaatgggttcacttgttgtattaaaagtccccacctttcagtaaatggaatttgcattatgattcagagatgtgtgtctagaaaacatcttaaaggcttcggatgagtagctggcagagtgggtgagaagccaataaaaaacaaaggccccacagcctggtccatgcccatcggcctagctaactctcttaattcagttcttgtggatttctgctgttaggaatcaatagctaagtatcattgaattgcttttctagagaaagtgttatcatcatactatgcatctgtgtgggtcttcaagttaggttttggtcataaaagttttaaaaactatttagtgatccgtgccagtgacattttcccacaagaagttcagtagtggctttccggcaatgcacagtaaaccagtgataataaaaaaatgagattttgaaagcagtgtgctttcttttctggcattgatggctgatcttgcatccctcattgaccatttctgttttgagtgggtgactaataggtgcttgtgtttacttgggtaacagtgaactgtttccccaaggtgtggagtgtttgcatttggctgcaggattcgtgccagtatgcccttgagtttgcataaaccccaaaaagtaaaatagctgcaaccaaggctgggctgtcttcccatactctggaatgagaaaattaattgaaatgccataaacagacaatattttgaacagactctccttcccaccagtgataataagcaataaaaaatacggaaaccctaatggaacatttgacccaattgtaattactgtggatatgaatattgttggtcttgagatgtatatatatatgtgtgtgtgtatatatatatatatatttttttttttttttttagtcagcgctacaaaagtaaatgagctgtctgaaggcccgatttgactctgtcataatttctttccatagtcataaaatataacttgatttttctctttcaagtgtaagtgtcaacaccaaagcctgccagatttttttctttctttttccttcttcttctttttttttttttttgcaatttgcttcccattaggaagagagcagatcattctgactaattttaacaattagtcttaatcttcctcactgaatcttacctttaacagtttcattacgttttattaagtgatcttaagacaactgtctcattttctgtttttgaaaatgtgcttgaaaatatacccttggcatgaacacaccacgccatggctcagaaggccctggctcttggctcatccaaactttcagtgccaattttgaattctgtcaaaagccaccagtctgatggattctccaaggggcctagtaagtggtgcaaaatgaaaggtagagaaagaagttctctttctgtgaccagctgccagtccatggggattgtaaacctcatagaaactgccagaggttgaacatggaagggtttttctctgttctacaaaacgaatctatctgggcgctggctgccatccaggatcacagctcctaacctcgggttcattccgtaactgggaaaacctgcctgtccggctttgatggcctcgctggctacactggccctgtagaagcctgaaccttctctcttttcttccattccctcctttttctccttggcagtttaaatcttggttcagagtgtatctcacccttggaatgtttctctctttgattcagtatctccatgtaaatcgaccgctcctttacaaaggaggaagagatagcagctcccaggagatgagggttagggagctctggggaccgggctgaactccagaggtcatgtgagcacagaggttattgttcagaataattcacattttagccaaatggactgggactccatgacacccccaaaaaattgaagttcagggtcaaaaggaattctcttatgtgaaacgaattcactgagcagcttatatcagtttacatctgcagttgaggcaagtgctacatcacctgccacctttagaatgacaagaaagtgtatcatggcttcagctgagagaaatttaagaaattttagcaattggtatccgggcacagtggctcacacctgtaatcccagcactttgggaggccgaggtgggtggatcacctgaggtcaggagttcaagaccagcctggccaacatggtgacaccgccatctctactaaaaatacaaaaaattagccaggtgtggtggcgggcgcctgtaatcccagctactcaggaggatgaggcaggagaatcgcttgaacccaggaggtagaggttgcagtgagccgaggttgcgccactgcactccagtctgggcaacaagagcaaaactccatctaaaaaaagaaaaaagaaaaagaaattttagcaatgaaatctgtgactgcttcatcccagttggagtatttaatcagtcagagaataactgatcaatcaggaaatacagctttagtaatttcatttcagaaccaaagaagaaatctctccagctgctttatcagctgcattgttgctgcaggaggaaagatggtctactgcacatttctttctagttttttcttagaatatgatttttaatctttggggaacatcatagatacttttgaaaatcctttggaaggctttttccaaggacaaaaaaaaaatgcacgtgttcacttacacacagaattacgtatatcatttcagtttctaggctaccagaactcatttatggaccttctggggatccacagaccctaggccaaaaatttgtgaatttggaactttgcattgatcatggagggccagcttagccctatgccgcatatagtagacacctgaaaatgaataaatacatgtacaaatgagctagacattttcttgaacctgtgctgttttggtaacacctgtgtttttgttatcgccggggtctggtttgtctaattaagaaagtagatctccttgaaaccactggccaggcctttggatggccatcaggtatgcccacatatcatcacgggtaaaggggagggggcctattctgtcattgaaaggacagtcgcttccctcgtactgtgtccacacccagccctgtaaggccaagtgttctgtggcctgtcaggatggcgttgagtttcttggcggaatttgtgtttacattgacctccctggcagctttaatcttgcccactttcaaaatagtatcctttcccaacacatttatacaatgaaattccttcggtatgttcttgctgtgaatatcttcccagacataatatttatcctgtcacaatctgggttattgcatatttgtgtaatgttagttgcttaaggcattttcattcttaaattattctacattatttgggctaaagtgtgggaggttgcccttcaggtgagtggaagactgtggtcaagaggaagggaaggtacatttagggaaggataaacggtactgatattctaaacaaagagacatggcttggctttatgtagcggttgttaccaagagatgatctgaatgactcgcagtattatcgtaggatcccagtccttctctattctattaacagattcatataatagaagaaggaaaaattcatctgaccaccccagagttgtttcacgggtaatgttcatggtataaactggcagtcagatctcctggagagaatataaggaaaagacatgagttatattaaaatcaactctcccattttcccactttcttctgttacatactgatctacactttaaaataatatatatactgaaatctgtattcagatctcattgcaagcaaatatagatgaataaagacccagtctctgatataccaagcctcaaccagccctaacaaatgctgcttttcgacgggcaggtcaaaagcttgcctccatgatctgatgtagaattcatctctagagaccaagtttctcatttcggtttcacatttgccaataaaaggatagcaacactttcctaaagcaagttgctccctgccctgcttaaagcctggggtggcccagtcatggcaaggaccagcaggaaaagctttcttgaaaactgcttgtgcttgcaacaggcagtttcgcagttgatcccttcatagttttcttgctgattttgtgaagtgtcaggcattgctgatggcgtcacacagcttttttaaattgaggttatttgtatgaacaatattttatagtttgatgggcagaagctgtacttctctccacccaccctcaaccccttccttgccagccggcttgtgtttggtggaggcatttctttttggtcgggacagaagactatcaatcagaaagtgcctgcaagagaaataatggttgagtgatttttagagcttcctgtttcagcaacaagcattatagacataaacagtgatccagccaacggctgcaaccctgctctggttctaataaatcagttttgtattttcttttttgtgctggttggcaaggggcaagagagggtggagaaggttggctaaagaagaacatattctgtgtttctggtttttttgttgttttttttttaaggaaaaattacttgttgacaaggagagatggtgtactgtctttttttttttttttttttttttttgagacagagtttccctcttgttgcctaggctggagtgcagtggtgtgatctcagctcactgcaacctccacctcccaggttcaagcgattctcctacctcggcctcccaagtagctggggattacaggcatccaccaccacgcctggctaattttgtatttttagtagagacgaggtttcaccatgttgactgggctggtcttgaactcctgatctcgggtggtccacctgccttggcctcccaaagtgctgggattacagtcgtgagccaccgtacctggccggtgtactgtcttaaggctgttttctttctgtagatgattatgacacaagttcagatcagtaaagagatgtttatgaataatcatatactgtcaatatggggagagtgtatgcttttgaaggcttcattgattcttagccagtggagtgtgtgtgcgtgtgtgtgtgcgtgtgtgcaagggggagagagagagagagagagagaatgagaatatccatacttccattgagagacttcttgggccaaattatctttgaggactaaattcatgctaataacatcttctcatctaaagcccaaataaagcaattaatggaaattaataagtgagcagtgtggatttaatgagctgcctatgaatactatgacatgcgctcgttttgtcggctccctggcggggcatggggacagatcgcagcacttcaacgtctgtatttataaacatgcattcctggacttcaggcagcgcgcatactccatcattggttctgctgtgagtcctacattcaacggagatgtattttgatctctgttgaagacagagcaatcgacggcattcagtttgcactgcactgatttgggattccagtacattgcccagtccctgttagtctatattgggcagcatgtcccattcaggagctccatttgacatcaccgaacgttctccaatgaaggtgtcaggcagttgaggtccatagaggaatcccagcaacttcctttgagaggctcacggccattctgctgctagactgaaaatgcgtttcctctgatttccttagtgaggaagcattcatttaggagccatttaaactgtgtttttctcaaagaagatgtaagtacatttcctgtttatttctcaacttagattaatttgggcttttaccttgagatttaagaccatcattaagaatgtatgggcagggccatctgcagaactaccccacctcccccatcacctatcccaaggacgtgcctgtccagttaataggagggctggccagcactctggggtggtgtatggccctaattgagtcaccgtatgcaaaccaaggtaaatcacaggaatatgggcagattgagcataattggtcatctgtgtgctcatcagatctctggaggtggaaacactccagtttgctcaaggcattgggttggggtctttacagatttttttccttcattctatttgaaactattgtatagaggatagtcagtattaatcatctatctttctatctatctataattagtaaggagctagtctaactcacatcataataaggctttgtctgcctctttaaatggtgtgtctctagtacctaggacaaatgtcctgccttcattattctatctgaaaccactgggcagtttattatcagtatcttgtctccctgcttatcaattttgatcataatcttgctcagtgtttcccagctggggtgatttgactcccagaagacatttggcaatatctgcagacatttttggtggtcgtgtattgggttggggagtgccggtggcatctagtaagtagaggccagggatctactaaacgtcctaccatgaacctgacagcctccccaacaaagacccaaatgtcagttgtgctgagattgagaaactcatctagctccagtcatgcgtgatctcgccctgatcatgcataggttgtaaaatgtttcccttgccccttttattctgacattctgcctccctacaaacttatcaaaatgtatgaaaaacttattttaaattttatgaaaaacttatttttaaaacattgcacagaataaaaaatagagaacatcactgaatattaaaagttttttttaaagggaaaacagcagtgttctgtatgcatagaattgcaccatccccctggcgccactgaccctgcctgctatcctgggtcagggatgtgcagtggctggaggagtggctgcaggtgggggtggtacacacagcagggcagcttctccgagaaggctccccactgtagccaccccctcatgaatgtcacacaggtgaggtccacgaggactgcagaaactaggaagccctctgccagaggctcactgcttttccctgaatacttcagcagagagtccatggagccactgatctaggaatgggaattgatgtcagtggacagtgtccactcatattaaaaaagtgataaagagccgggcatgctggctcacacctgtaatcccagcactttaggaggccaaggcaggaggatcatctgaggtcaggagtttgagaccagcttggccaacgtggtgaaaccccatctctactaaaaatacaaaaattagccaggagtggtggcacatacctgtaatcccagctgctctgaaggctgaggcaggaaaattgcttgaaccagggaggcggaggttgcagtgagccgagattatgccactgcgctccagcctgggtgacagagcaagactccgtctaaaaaaaaaaaaaaaagtgataaaagcaaggtcttggtgtgtgtcactgacagacaactcccagacaccaaaatggctcagtctgcataccctaaataaaaatgaaggcactacgtggcaggaggggagacaggaccaaggtttgtgggtttgccgcccacaggatgggcttgcagatgccacccgcagacagatggctgggttcctctggagctttatcccacctgccccagcatgtcagttttgccatcaccggtttttacactgagattcagggcacgatgatttgaaaacaaaaatccgtagggagactcccctaggtgttcccagtgcatcaaggtagagcctgctgcaggttgagtttctggaataggtcaggctgtgtctgctttgtttgtttgtccgtttccttgcttttgtgctgcatggggaccctcacgcctaattttccttctccgtgtatacatctgcttcctttaagctccctacagtagagcaacgctcctagattcgacagagatcacttgtgtgtcatgtaatctgtgactagtaagcattaactatccaaatgggagttcgtggacggtgtctgagccagggactgcacagagctcacgagttgctgtaggtgtgctctagagagaaggtcactggggaaaaagcttgaaaacagctgtggcatgcaagggtgtgtgtaggaacggagacccaagcactgtggaaaggaagatgtgctcaggagccccgaggaagtgggctcacaggaattttccaaaatcaagagatccagcctttaactagaaagctccaggtggtatcatgagtgacattagatgatgcctgatacatggtctgtgaatgaatgactgttcaggactgtttgtttttttgtttttgtttttttttgagatggagtctcgccctgtcaccaggctggaatgcagtgtcgtgatctcagctcactgcagcctccgcctcctgtgttcaagcaatcctcctgcctcagcctcccaagtagctgggattacaggcttgcaccaccacgcctggataatttttgtatttttcatagagacggggtttcatcacgctggccaggatggtctcgatctcttgacctcgtgatctgcctgcctcggcctcccaaagtgctgggattacaggcatgagccactgtgctgggcccaggactgttttgatgttaggcagtacagcctagtggtcagcacgtggactttactggcttccccactgtgtttcaacttgggtgttgctgacatttagggccagttattctttgctgtgagtggctttcctgtgcatggttgaacatttaacagcacccctggcctctactcaggggctactagcacccaccctcctggttgtgacaaccagaaatctctgaagccattgcgtcatgtcccctgggggcaaatcgcccctggttgagaaccactggcttggagctatctgtccttgaacaagctacttgacctgtctaagcctgattttgcccttgtctgtgggaagacagagggacaatgaggattgattacctgagacaagacataggttaggagttgttactttttgcagtgacaccaacaccatggggcagacaatggggactctgtgagtgcatagcaaacaacagcaaacagcaacaacaaccagaggtctgctttttttgtttgtctaaatgggtgagcttccaaggaggaaacacaatccttatccttatttcagggccccatacggttctgtggtcgtgaaagggttatatgcggcaggccctgagattcctgttagcaataggagaaacgaaattaaatatgtactgtaatttgaagcactgcttttcatgggaaaagaagttctcccaactcagcctttccaactcttttgtccaaacattaatggcatgcaaatatttatgattcatatgtgccccttttaattcccaatcgtattttaacagtaaacacttcattttaataatgaagcagaataatccctttgtcctgtcgctgggttacacaggctggcacctggcagcatcacattcttcctgagtgatcattgctgcctccacccaagttgaaggggttttgtagcagtgccacggcagctcgccttggactacttgaggacttccggatgttccgctggaagccattcttaaggttgtgtctcagcattttcataaactgcaagtgaacatccatgcatatttttctcttttggccacgtataaactcagcactggttcatctggctgtcacttggaagggttcttactacactattatcttgcattctggccaaatccctgaactctagattacaccgaacccattgtgtcctatttaatattcctttgattcgtaatgatgacatagaaaacacacacatctattagcgatgattctgtgagtcctagaaaagtagcataatgtaatatgagaagagggcacacctgtaggactcagatgtgccagcctcagtctccccatctgtgttcaataggtttaagagtgcctttcatctatgacttatatcatctatgttaggatgataaaagcgagatggtgtgtatgtaactatacttaggaagaagagctagggcccctcttgatgatgttcttccttctacagcgagaatccctgagggaggaggggagagagcaagccagaggcagcatgggtcttgctgaatttgaaaagttgggaatgatgctgtttttcagggcccactcctcgatggcaaggaatttatattccttggtcctgctaagggcctactaaaatgagagtgcatgagataacagcaggcattccataagtattcacaagtaaaagcctatgtaataataatataattacaaacttttattgggcattgaccctgtgatggaaatatagtacctattcctgttttattagaactctccctctgccccaccccccaaggtcatttactaagggcatttctttcattcattcatttatcagatatacattgtgcacctactgtgtgccaggaactgggctagcatgagaaatacgacggtcagccaaagagaacccacagccttgggggctagtaaggaacatggcaattaagtaggccatccctgttgtgagtagataacacatgatagatgggtgtggcgggagccaaggctcagaggtacagaacctggtgaaggttcagagggtctccctggaccacttgtcattcacttgagacctgcaggtgacaaggagactaacccggtggaggcatgaagaatcatgtcccagcagagaaagcagagtgaggaaggagcacctggcctgttgggagctgagagatgctccagtggcggtggttggggagtgatggcggggagccttacagagagatagggcggggattgccttaacatccacgttgggaatttggtctgatcctaatgaaatggagaaccacttataactaactccagatacaaattgtggaaagatacttggcttacagtttaaagaatggaaaggacatttggagggtgcgtggggagcttagagacccatccagagactgaaagctctcctttctcctttcaagcagcgccaggcatgtgtatatccagcttgcaaggaccccatttggtagatggcactgtacctagaagtcagctccctcctcaagcttgcctcaagcttccctctcttccctctctacctccacactcacctgcctttcttcctacctgcagtggcaagtgctgcaaggctggtgagcaggagctgacgccccccaagccttccttccctgaagaatgtccatgcctcaggcctcccagctgcagctctgtgtggccttgggctgtgtgtttgaggcacccggctaggggcactatcggaatcaggaggaggccaggcccaggaggtcactttggtcacttgccctgtgtgaccccagcccaaacacacagcctgatggatgagtgaagactggtaaatctggtggctgtccttgggggaagcacagggcagcaggtgtggccttggtctccagggggctgcgaattcagggttttggggtgttttggttaaaacttggttccccagctgagatcctagggaactgtggtatcaaaaggaaaaggaagattagaaagggaaaatgaaatctcaggaaaggaaatgcaagattgcatgagaacatcatggtgttttgtgggataggtgatattctgccaaataaagaggcccgcccctccactccttttgcaaacctgagcttttcccctgcctgcagttgagcccagcatacctgtgccttggaaaaagcaagctatgccttccaagtgaaattcgacgttgtaaaggactggctgtcaaactgaaagtttgcagagtgattcattgatttttagagacagggtcttactctgtcacccaggctggagtgcagtggcgtgatctcggctcactgcaacctccgcctcctgggttcaagtgattcttgtgcctcagcctcccaagtagctgggactgcaaatgtgtgccaccatgcccagctaatttattttattttattttttatttttattttattttattttattttttatatttttggtagcaatggggtttcaccaagctgcccagactggtcttgaactcctgagctctagtgatcctcccgtcttggcctcccaaagtgctgggattacaggcatgtgccaccatgcctggcctcatttatcaaacttttctttattgcctcagaatagaagatacaaagatgaataaaattctgtccctgtcctcaaacaactcattttcatagaacatctccagagaaaatgctttgcatgtcttcggttttctccaagtaaaacagctatttttcaaacaatccataattccaaacaaatgccatttccatggaaaactgagttctatattctaaggacctgattttcagtctgacttttgagggtagtcctggtgccagtagcttaggcctcaagtctgcattttgcatgtgtgatgtgagtgcgattggatcaagcaatctgcaaatacaggcactttgcacacaagtatatacagtacgccgacatcttaattcaattcagcatggagaatcaggaaattatgtgcaagttgaaggatttgtatcccgtccagaaatccccaaataaattaattatacaactccactgtcaaaaatagtggcaaatgtttgggtaaggaaatggaagaggagcataagcatgaattttggctgttaggttgttccagtggaaaagtgagaaatcaaaattaaaaatacttcataaaaaatactccaaatgcagactactcctggaatccgagggtacgttaatttttatacttagttatccgcaattaaaattagacccaaagccatctattgtaaaaggagaaatctccctgcaacctttcaggatcttgtgggatttcctgaatttgcaaagagcagaacctgagccttcactgactctcttggtttttaaaagctgcgatgtttttcttttatttttcctttctcactctttgggcgtttcaagactctgggcacaactggctttcctgcagacaaacacaagagtgaaaaatgttgcgattgtgtttcctaaggactctgagcccccagggcagacggctcctttgtgtctgcagccttcctttgcgtgacaaagggcaagtttcacatcccctgaaactgtccccaaaagaagaagatgactcatgcttacagacctacactaaggagagtgacaggaacagagtctgctgcagagccaactcaggtagaccggggatacctgcaaactagacctgaggaggccgagtcacaacaggagtcggggctcgcccgtcagacacggggtgttataggaggattctgctctgatgtggcctggatgcacttttaaatatgttcttcacacctaggcaagaaatgaccccgagctgcatgtctttttgctttgtaatctccttgccaccctcagctctttggggagcagtgtgcacatttgaagcaatcctgaggtttagccacttcccagatgtggtgaggaagtggagagtgcgctgggccatgcggaactgcaggttccagccgtggctttatttgaccacaattggctgtcagagttcaccagccccagggccgccaacgtcaagactaatcaagcctagacctggggcctccccgctgactggccctggggagtgtgtcatggcagcgagtgtccaggaagactcaccccttgaccttcttcccaactaaataaagcagttagtattttgccctggcatttggatggacacactggcgtcgagggagacaacacatgttgcagtgaggagcactggcctggcttgtttacatagcatatcagccactcacagttgtgccttacaaaggtcgccagctggcggggcaggagtgaacttgaacttgaagttcaagttgcgtttaggcctggtagcagccccatcacctgctgaacacacacacacacacacacacacacacacacacacacacacacacgcacaaaacccctcctcatgtcagacgtcagtgcctacttcatccccagctccttcttacgggatctgtcacagctctggtctttgtggaatcacctttatcatgtctttaatgatcattccactgacatttactgagacctttccctgtgctctgcttgtatattcagcattccatttaacctgcagaacaatgctacgagatggaatgactgttattaacccccttttacagatgacaaagctgaggccccagagaggtcaagtaacttgcctgaggtcacacagctagcaagtggcagagcgaggttttgaacctaagtaggttgccttgagagtccacactgaatgaatcaccactgtgtttccaccttcatgggattttatatggaattcttctctctcactgcttccaagcctacatcaagacaaacctcatctgccctgttgttttttgttctcaccttcttattcagtatgagtgtcgtttggtgcttctaatggtcttctaatggtcctcctggaacccaagccctggctggaactgatgctgctgtggtggtcagggttcagtgagcaggaggaaggacttggtgtttaccccttgtttacccctttccttggcttccttccatgcaggccaccctgtgaccccgtggtggccccctctggaaccaagagctgccgacttccagcagcacacacaggatcagtgctggggccatctgtgcactgaccaaagcctctgctggcctcaccagaccaaggccagtgagtgcttcagggagccttggatcctccaggctgccaacagaaacaccggccctctcggcagcagccccatccttccacccctgcactgggtcctgaaaagcccattttggggccgttgctatttagccaacctgccctcccttgctctcctgtgatttctcactattccggctgcagctcgctgggagaaacacttgagagtcttttgtgctccacacccatgtacttaaaataccaggcctataggtcatttcaatgagggaatttggctcataacacgtgtgccccgaggcacagatcctacttctgcagatgctggccaagaagggctgtgtcccagccgccatggggtggggccacagagagggcagggccacgtggagggcagagcatgtggctcctgtcaggtgcgcccgttgctgactgcagcccagtatcaaggctctgctgggtctcattggaagaatacaaaggacgtgtaaggcagttttcgtgctgtggaaaaatgtcacctacacctgtgaagaagtcatcactgtgtctgtaagataataagcaaatgtccttgtacccaaagctgtaaacaagagccctttgtgagggagaaccacatgactggccaaaacgccccacctactagtgtgtgctcggtggaaatgtcttgtgactgtgcttaaaatgaagggcatgattgggaggccaaggtgggcggatcacaatgtcaggagttcgagaccagcatggctgacatagtgaaaccccatctctactaaaaatacaaaaaattagctgggtgtggtggtatgcacatgtaatcccagctactcgggaggctgaggcaggagaatcgcttgaacccgggaggcagaggttgcagtgagccgagatcacgccattgcactccagcccaggagacagtgcaagactccatctcaaaaaaaaaaaaaaaaaaaaaagatgggcatgaaataatgagaattcagataatgaccattcatttcacaaattatcactttgattaagttttactcctgattatataggttagtctgtggtttaccagacggggtgtcatgagtgctcaactgccagaggcccaaacgcagctcagtaagaaaatgcttttgagctataacccaggttgagtaccattggtacattagaatcacagagtcagattttactttttggggcagtggtaggtgtggataaagtatctccagtccagatttcttgtactggtgctattgggtttgcgggtggagatttatgacctcagggataataaccggaagaacagtgagtagaaagctcagggatatgagttttgctgtatatcaaagctgtgtgactttgggaaaattacttaacctttctgggccttagctttgctacctattcatcaagaacaataaaatccatcttgtttatttcatgagattggtgtgaggaccaaatgaaatagtatatgggaaggtgtttaaaaagttgtaagttctacacgacttaaaaatgccagtattatgaatgcaaccattctttgttgtcatttgggtagtcgtggatagcgtggtggtaggagagccactatcggagcaagactgttccagagggtaaaacacacgcgtgcctgtagagcagttgtcactggtagagccatgatgggagctcttactacattgctatttgtactgagttaaatagtgttctccaaaaagtgtatgtccacctagaaccttaaaatatggcttaaggtctttacaggtgtaatcgagataaagtcatactggacttgggtgggccataagtccaatgactgatgtccttctaagaagagggaggggacacccagtaggaagacagtcatgtgaagatggaggcagaggctagagtgctgcagctgcaagtcaggaaacgccaagaaatgctggccaccatccgaagcgagaaagaggcaaggatcctccctagagccctcagggggagtgtggccctgctgccaccttgatttgggacttctgacttccagaattgtgaaagtcttaatttctattgttgtaagccacccagtttgtgataatttattacagcagccccaggaaacaaatacagtatttttatgaagtcactgaggtgctagagttgtaggcaacagaagaatcacacgtggacctgcccgcctgcacatggctatgggcatctcaggccagctgcattcttggaagatgaaatcagagagttgaaagggacattgcatgcatcccatgaacccccctcattttgctgatgaggaaactgagatctggagaggtaaaatcgtttgtattgcatccccaaacttgtaactctcttgctgaaagaaccacctcagtctctctctctctctctctcatacacccacatgcacccctagacctactcaggactgggacaatggcattatctattgttgtgtcctcaagggacttttttttttttaattttaaataccccctctctcctaaagccccttcccacttgcaccctttcccacctttctgtgagggctacatgggtatatagaaaagggtccccaccttctgggagactaggtctacacagccgcaaactgcattcagtatgacaccctaaataatcaaaggtgaaggatgatttatgaggcagcccaaacagccataaagcaaaatgtagtcatcaaggaaggctgcctggaaaacaagtgactgagtgactgcccgttgccagatgctgaagggcaggaagactcgggtgaagggtgcagcaaggagccttggattggcgaagtggctggaggaaggaagacctcagcatctcaatgccatggctcatgggtagaactcggagggtgcacactgggagtcaggtatgcggaggagagggggtgagtgagaaattacttggggcagggtcttattagtgagaagatcctaaaagcaggttctggagttcagtcttgatgatacaggtgataaccttcatgggttcttgacagagagggaacaggctgaccatgaggcttgtaggacaatctgttagtcagctctggaacatgtggatgtggctgctccccgtctgtggctgtcattgctcctggatctgttcttggaaagccagagactgcccagtgagatgggcagttgcccccaggacctgcctccctctgcggcagcatcttcctccacatcacatcacataccctgcttgctgggcctggccaaggcctcttctacccagtcctctccttcagctagatgccacggtaggaaagcatccagagtgtcgcctgataacatctgaacgatgtcctaaaactggcaaatccccaaaggccaacaagactcgtctctaggttctggggacaggccagttgatgggaaagatggatttggaggcagagtctcctggcatccctgatgctctgctccatggaagtcactccccagaagcatcctcacctcgtttattggacaggtcagctgagactttagttataaaggcacaatgggcagagcagccttcatcatctaattgttacttgctattgctctttttattatagactttaatacagatagaatccacatctttggggagtgttcggtggagatttctcacgattaggaatcgtggcttgctgtggccaaagattatattttcattgagcatttttctgtggccttcctttgtattaagacacgcatgacatttgtttttctgtggccttcctttgtattaagacatgtgtgacaattgaaaatattttcctttcatctgtctttgatttactttatgctacatgattaagaggagaaactatgttgattaaagaactactgtattgatgtaggaagattgaacatcagacttaatcaaatgttagggtcctattatagacccgtgagaaacagagaagagaaataaagcagacaacatacacacacacacacacacacacacgcacagacacaccctgttgaataccgtgtgccagataactgttttaacagggttactcacggtaaatcatttaatctcccctaaaactctctaaggtaggaaaatttgcatgtaaccatcttcctggtaaggatactgaggaacatagaggtgtctagtgacttgccaaaggtcagctagccagatttatcttctgaatcactttaccaacaagaaatgtttttagattagtaaatctatgcaatgaagattttctcaccttttataaatatatgtaaaatgtgtaatggaaattttgtgcattttttattactagtacttattgaatctcagtctgtcagttacatatacttaagtccatttatgagtcatcaattttattctgactgatcccatgagtacctctaataacatctggcattttcaaataatatttaaaatcagccagacttcgtcttttaaaaatatagacagaatgattctaatttagcctgttttcaaacttagaaattctatctttcctgatcttcaaaggtacaaagtaagaagagaaagatggatatggtttcttctactcttatttgccctgaattataaataattgggaaagatgggagcagggaagttgggaaccagaagtggagagctgccaatctgactctatggtttccggaaatcctgacttaacagaaaataaattctaatctttcttgatcttgtattgtttattgatgattacattaaagccatataactatgtgaagtgttacacttaggcaactatcataggtgtgtattccagaattgaagcaaagccaaaattccgggagtgttgtcaaaactggtaacttgtgctgaagggctggacagcataaattaatgattggttattcaacagatatgttcaggccaccaacctcattctgttttgttctctatcgtgtccccacagggaaaagcttcactctgaccatcactgtcttcacaaacccaccgcaagtcgccacctaccacagagccatcaaaatcacagtggatgggccccgagaacctcgaagtaagtgcatccacttggggctggtacaccctccaggctggtacaccctccaggctggtatactcagggaccatgtctcagattccttgggttcaacctttcccccagggggatgtcaggcccccgtaaagccaaaaagttgcattgtcaatactctcgctactcaaagcttgtttctgtgcactgagctctttttgaagcatccttttagagggcaaaaggaaattaggctgactgaatcatatgttagaaccattcagggcagcatgaaactaaggactgcttcctcaatatacagtaaagttcaacaggatcagaaacaaatagtaaatggaagattggccaggcacagaggcagcccaaagaggtctgagggtcagagtggaccacaagggagtaattaccgtctatgctggccttttattaattcatgagggccagagatgaaaactatgaaaatgacccttttctttctatggcacagatcaaaatcttattacaggcatttttaagatagagagtgggagggtagaagaatgtctggggaaaaccagtaaatatagaaagatagtaccaaaaaataactcctgtgagggaagcttttaaaaaaatgagtgaggttgtttagtctgcagaaaagatgtcttcacagtgacttaatgactatctttgagtaaacaccagagtaacgctcttttccagaaccacacccttccccaggatctgaggctgggttacagttccaggtctgtggaactgcccagcacccccgcccagcatccagatgtctccaaaccgtatcaggtccctggtggaaaattaatatactctcttcttggagtgagggatattgaaaaacagggcttcctactgtccccaaaagccaagatgcagggaggtcaggttgtaaaatgaagtggttaagaatttgggctttatgggcaagccagtggaattcttaagccttcagtgagctacagagccttgctgaacctcactttcctcttctgtaaaatggggataataatgagagcttctttataagatcaagccaaatgatgctgtgtgcctgatgcagagaatgaaggcaggaaatgttagtgatccccagtagggcatccctgctttcatccctggctactgctccagtcccctctagatgaccttccctgcatggtggtttctaggtggggttttaaggtagttctctgcaggctatcctgtgatcacggcagcttttatggcagccttccctgtggtcctggccacaacctcatggcatctgggtcaccttctggaaccattccccaagctgcatcaactttcccaaagtccttgagtggatggagctctgcaaataatcaccatgcccaccaggggcaggccaccaggatatggtgttcctcgtctgctttttcccttccttccatttgctgtgctcggtgactccctccagatctgactgcatttttccccagagggccctctcagctttttctgatcgagactttctggccatgcctagacttgggagactgtgggacttgataacagaccctgattcttctttatgagtgaaaagcaggccatagacacagacaggaccacacaggtctaaggaatgactgtgagctcttcttaggtttccagagtaggaatgtcaacctggacattcctacgttaatgtaaccctgcattaaacagaacataaacaccaaagcaagtttgttctccacagaggaccaaagaggaagcaggcttgaattatggcaaggggcctggctgggagggaggcagttgttaggtataagaaaatcgactttgagggtgactaaacttagagaaatgctccttcaggaggctgtagaaccactgtatttagaactagaagcaacagccgtctctgggacagttgaaatgccgaccagcctgaagaagccgaagccaggtgaccctgggtataccctctacttctcttatttcctcatgcataaagaaggctgggttttgcctcactgccagcatttcctgtaacattcaaagaaataacaaagttattgagcttcagaaaacaaatggtggcgactctgacttttaagaattggcagtcagaggggaaaaaagatgtctatgcgattgtaacggtctggctgtatatacagtttactctgcccctgctgttttacaacttaagaaaacagttgttatatggagaagcaccctctgagcagacagaagggatttgcgccaaagaagcatccatttttacacagtcttccctgccaaatggaatttggggcctggggaaaaactaaatgcgtggaataagtataagtatgatatatagaggtgcaatagccccaggtagaaagtctcacattttacaagggacttctagaaaaaagccaagtgcatgcagactcccaggttgacttgggtaatgctgacttttctatttgccctgtgaagcaagaggggccatcactgctaattttagtatgctggtttcttatggtttgaacgtcttcattcagggtgggaactttctatagtaagctttgctcacagttgctttccagtgtaacataaagagaggacactgcatgtaaatcaggatgcccagatgttgccagatctctggatgaataagacctcccgagtcccctccatgattatggtgcaatgaattctgggaaatcctggcaaaatggccctggcattgccaaggtcaaattgaatcattttggaaaattctctagtttcataaaatcaaagacaatgagagctaggaggggcctgagaagagcctttaggatcatcaccccataggtaagggaaaatagccccagaaaaatgaaacggtttgcctagctttaaaagagatagttgatgatgaagcgttaacagaatgaggagttcctgatgtctacttctgtgctgtccttcatttatctacctgtccattcatctgttcatctctctatccataccatactgtctgtacatcatctatttctttcttatagactctttgacctggcctcggtatcctcacatttaaaatgaggagttggcttatatgattggctggcatatttggctcatctcgaagactgtctattatagaagggcaaatggtagtgcctcattgcaggtgtggagcctttgacttgaggtatgcgtgcaagcttaactaaataaagcagttatctggcatttggagggacaaactgccattcaacctgccattccgctgactaagttaaggactgagaatgagaagctgtgccacagctcgtctgtttttcatgccgacgggtaaacttgatgcatccctcccctcttccagggttttcagtggtgaagctgtagccaaaagtatacgccaaagggaatttaaagtgtttttcgtttcagatggtttcttgctcttttacagtaatggacctgccccttagaaaatcaaaacttgtttttctcatattccataggattttaagaaatatcttagagtaatatagaaattattaattgttgaaaaattaactttatcatggagcaagagcaccatcaaaaggtatcctctgcctggaatgggttcttaccagcaccaaggtgggctctgttttcggttagcacgtagagcacttagtagcttgttgatatactgagagtgtctcctccttaagcacaaaagatagagcgaaaggatttttcaagaaaaggatatttgagagttttttgtttgtttgtttgtttgtttttgagacagagtctcactctgttgcccaggctggggtgcagtggcacaatctcggctcactgcaacctctgccccactcccaggttcaagcgattctcccgcctcagcctctggaggagctgggactacagatgcccacaaccactcccagctaatttttgtatttttagtagagacggggtttcaccatgttggccagcctggtctcgaactcctgacctcaagtgatctgcccaccttggcttcccaaagtgctgggattgcaggcatgagctactacgaatggctgagagttgtttttttaatgtatgttttatatttctaggatctaatgaaaaactccagctctcagctcacaaatctgtaatttaggtgtctctatgctaatattgagatcccaaagcatcttctctacagagatttcattaaataatttcaatgcaggaattggttcaatgccatggaggaagatattttgccaaggagaggttgaggagagtgagcagtggggaccctaactgacccgtcttggggggctggtcctggtggtatggattgggcagcctttacctgtctggtcaggtgtttgttacgtctggaacattgagaaactaaattaaaaatcaaaaaggttaattaacgtattggccatttctgagataacttctgtctgtccccaggttaaaggagtctttcacgtgactgtgttctgcttgagctcttgatttttttgtttgtttgtttaattaaatatagttatttctattttaaaagtgaaagagctggctgtaattttggaaaggtgtaacccagcagatgccgggaagtacaaacctggagggaaggacaggcctctgcagctgcccccctcctcacaggcaaggatgaccatgtctagagctcacgggattccttttgggtggaggcagcgttgcctctgctctctgggcagcccgtccttgaggaccaggctgttaacgtagagtcttgtgatgtggtctgtttaagggtggggcttctagcatccatacatcaggtgacatctgggatactggcttagagggcagctagggagtaaggtaaaatgtgcagctttcttttttctttttttttttcttttttttttgaggtgaaatctcactctgttgcccatgctggagtgcagtggtgcgatcttggctcactgcaacctccgccttccaggttctagcgagtctcctgcctcagcctcctgagtagttgggattataggcatccaccaccatgcccggctaattttttaatttttttcatagagatggtaaggtggagccattacttacaaactgtagagtgcttcctgaggcactagctttctttctgtctgatttttgtttttagagggagttatagttaaaataggttgatcaaagggcctaatcttcactcagctactttttaaagtacttggttgagatcatgtcatatgagtataattcttctatgactttgagtgtgtatagcaaacctattatatatgtgaacatgagaaataggatctttatatatggagaatgtgcttcaagtgaagaagagaaatgcatgaaaagtacctatgggccaggcgcagtggctcccgcctgtaatcccagcactttgggaggccaatgcgggcggctcacttgaggtcaggagttggagaccagcctggccaacacaggaaaaccccatctctaccagaaaatacaaaaatcggcctggtgtggtggtacacgcctgtagtcccagctcctcaggaggctgaggcaggagaatcggttgaacccaggaggcggaagttgcagtgagccgagatggtgccactgtactccagcctgggtgacagagtgagaccttgtctcaaaaaaaaaaaaaaatgaaggaaggaagggaaggaagggaaggaaccaacctgtaaactggtggtgataatggacctaaaaataattgctcttaggattgagtaacacctagttcacattgttattttctcttaatcataaaaatactcgataatagcaatagctaacattaaatagtgttatttgcccaacactgttcacagtgcttcacgcatattaatttatataatcttcaaaagaacaggcagggaaattgaagaaaaaataaatcgtataccttgcccaaagtcacgcaactagtaagccagcatgtaaactaaggcgtccagatgctggcacgcaccgatgccagggtctgtttttaagaactgcactggccgctttttgagcttcatggtaatgtaattcctgtattttttattgggagagtttatcagtaaagttctgggtcacatacagttttcttcaagaaagcagagccctgttgctttggcattcatcattttttttgtactgacaggagggaatcagtgttttccccggcagggctgcaggaagtaccctcccctcccacacctccccagagttcataatacacagccatggccatgctggtcacaggtgccagcagttggttctgcttctgtcaccagggtccacttggggacctggcatgaagggggacctgaccccggggtgttgtacaacatagacctcttcttccggtgttggccttcacgaaagatgggtaaagtggagtgacctgcagagtagtggtccaagtctgggtccccctttaacaaagggtttcgtggagggcccgtgtgcacagcacgtagccgccggggggatgaaaagatgtgtcactctttgctcttgaatgattatgaaaatgtcagatggttttatggatctgtgatctcaggattgtaattaccaatccacaatcgcattgctcactgggaattgcttcaagcgtattttccaggtagtgaatgatgagctacttaattcctcttcccttgaattcatcagatttggacttggactttagttctttctagatgcaatcctgatccacacaggaattagaaagtaattcttcctcccctcccacctaaagcaggagcaaggcagaggctcaaagaggaggaaaatgctgtcgtgactcacatcccctcctccccactttgaaaggcatttcaggccaagctgaaagttctgggggaacttccccctggtacttttaattccttctgtgttaagctcctcaactacctgatgacttggcaaaggcagtttttaaagcattaataataatcgtgcctaaatgtttccagcgaattttagaatgtctttctgttgaatatttttagtagtatcaaaccagtccaagaagaagaattttacatgcatacagacttccttgaccctagagtggaggttaaggtctgaaagggcccctggggtgaatgggaacctaagaggaccgtgaagggaatgggcttctgtcccagaagcggcagtaacccacctggtgcagctctgagtgagctggcgtggcctgtgtattcttggtaacttttcctgtcttatacagaaaccactgaggttttttgtgtgtggttgttgttttgttttgttttgttttgttttgttttttgagacagagtcttgctctttcgcccaggctggagtgcagtggcgccatctcagctcactgcaacctccacctcctgggttcaagcaattttcctgcctcagcctcccgagtagctgggactacaggtgtgtgccaccacgcccggctaattttttgtatttttagtagagatggggtttcactgtgttagccaggatggtctccatctcctgacctcagctgatccacccgccttggcctcccaaagtgctgggattaaaggcatgagccactgtgcttggccaccactgagattttctaagatggcatttgtattgctatagaaagaaaacaaaataagagttccttccaggtaatgtgaaaacccaaagagatgatctaggcaccttctcaatccaatgtgggagcagagaagagggaagaaacttacaccattacattgaatttctctttccgtctggaccctcgcaaaaccatatcactaatttgaatgccacaccagtgaggtcaggatctaaactaatatattgcagtccttgttagaattcattgtatgacatgccataagaaaaaaaaaaccctgtctgcatttaggcttctgtttcttaagcttcaaacatgtaaaaagttttctggatcctgaatttagggacctgggttttcacactggtgccaccaggccagtgggtgtgaacttgagcaattatcttaaatactttcgtcttcattttcctctcctgttgaaccaggcaatgggacgagataatctctaaattagttctcatgcaaaaagggtaacaaaatatggtcagcaaaataaagccgtaagttcgttcccgtaaactggccccttagaggccgaggcctccaggccttccctgggcagtgccatcctaaatcacatcaggcaaatccacatgcactcaggtggtacatgagatagacgtcgtttttttgctgtaaagtttttaaagggctttctaatttgttctgaaattctctggctgtaagtggctgccctgccttctctgccaccaacatgtaatcaagactaggggttgaggtctccattttggcacttgctaacactatgagagccgattcctgggggagcagctggtctgactgagcctctccaaaacggggacagttggtagtaccaccgtcacatcactggaaggctgaatgcagcagcctctgtggcttagaaccatgcctggcacacaatacatactcaaaagaggacaggtataattcagatttagtcttgaaatccttctggaaatgagaaaactttaaccaaaaaagatctgtggctcctaaatttaaaaattcatgaagttgccataatggtacacttttttttttacatttaattaaacatttataaattttgatttatttttctggatttcgttttgtgttgagacccagtaaaatttcttttctagtatagcatgggccctggaaacactctgggcactgttcctaagtcactaacgggtgaaatggccttgcccccaaatgttgcactttgtgaaaaagtcagaaagaaaagtcacgtgtgggtgacatcaaacatcagtgcttaagatctaacacatgggtcctgttcagtagaggcatgacacagctgcagaagtctccacactgtcctagaaacgtgacgtgtaatgtagcaggtgtcttggggtcggaattcttgtactaggcaaatgcagtgtgtctcccaagcgtgcctgggatctctccccgcagccaagctttgcaagcacataaacatggccggccacccactgagtttcctaaatcagtgaccagcactggagacccttccatgtgtgcaaggcagctccgcctgctgcctgtgtcctttgggggtctgatggggcagccccagtctgagatggtcaggccttgtcattgggtgcacgtctcccatggggatggatggacccacagctttcagatggattgcggttggcagtcacagcatcccagcacattaaaatacatcaactcctgtgctttcaggtagatttagaatttttctcataccctagccactttccatttttcattttgaaaaatttctccttgagttttctcaaaggcttcagttttttttgttgttgttgttttttcctgtaagccatgtaactaggaaaggcattagtaagaatttgatacactgggtctcatggaactccactactaccaccaaaataataatagtaataataataataataattccagtttagcttaaataagtaaaagctacccccttacaccatatctgcatttaaattcatttgagctgataggcaatttctgtgttctcctgttcatcgcatattcttttcctttaaaggcaacttttagagaaggtttgcttttttttgctatcaaagtattaattatgaaaagttggcaatacagaaagggtaaattaggtataatctattaccgtacattatggctatattatcagacatatcacaagccagtgacatttagttggatgtgaaattccttttttatagtatgattgacacatggtatattttcatcaacttctatgtgtaaattatgccgtgtcactggtaaaatttgctgtcatgaatagccaaatattctggattcacattcataggtgaaagccaagctaatatatatatatataatatatattatatatatactatatattataatatatagtatatatataatatatatactatataatatattatatatagtataatatattatatatactatgtatatagtatatataatatattatatatactatatataatatatatagtatatataatatatatataatatatattatatattttatatataatatatattatatatatattatatatatatatatgtacccaaagcaaagttcttttctgtttgccttttcaaaaagtaacacaatggaatcaatctgccaactctcaagacccctagaaagttatttaaaggcagtacattggtttggtactttcatgatatacatatacttagtttccattaaagcaattattgacaaaaacccagactgctattgaaatctttcagtgtacttccatatactgaaatgtcgaacatttgatacttgtttgattttgtatttgtttttgttcaccatggcttaaaagtcatattctgattatttaaaataaagagtaaacatttgaaataagttcctagatactacatagatttatggccctttgaatattttcctggtaccaccttattttcacttacctttgaagtggttgtatgatatttccagttcattcatttgaaagagctaggagaaatatgcggagccacgtcccacgcgcctctcggacactactcgccaggcatagcccagtgtttcaaaagtgaaccagggggctgggcgcggtagctcacgcctgtaatcccagcactttggaagcccgaggtgggccgattacctgaggtcaggagttcgagaccagcctggccaacatggtgaaaccccgtctctactaaaaatacaaaaattagccgggcatggtggcaggcgcctataatcccagctactcgggatgctgaggcaggagaatcacttgaactcgagaggcagaggttgctgtgagccgagattgctccactgcactccagcctgggtgacagagtgagactctgtctcaaaaaataaagtgaaccagggtgctcaggtagcctcggtgagcgagaaaggagtttggagcttcaagtctaaaactgcgtttcacagttttcccatctgtagaatggactgcatgatacctctcttgctaggggatgtgaggattaaaagagatagcctgaaaggcgagctggagcagtggctgatggcgaagctccagagctggcttcctgattcagcctggcctccccttcgggatcagattaacctccccaccctcagcctccttgggtataaaaccaggagtatgatatccctctgttggggattattgtgcggattgaataaaataattcatgttagggcatagcaccgtgctgggcacagaagtgttccttaaatattagctgctattattaaagcacatgctctagacgggtaggccccttgaccatgtcccaaagaccttatgagaggaaacaaatggaattctgttcaagtgggggccaaatatttaccattgccaagtacttaaaaaaaaagaagaaaaaaaaaagcttggcagatttggccctcacaatacagtacaataagggctttttctcttttccttccatactacctattattaattccaattactgcatcactgaactggcttcaacaaatgtattcctcattgaaacataaccctgtcaaccatgttgccctacttccttgagggagaggtgatctttttccaattaaaggttttatcaaaatgcagttctgcttcttaacatgaagcacctatgctgttgtgtgacctgcaaagctctgagcatctagaagcttcccctgggtcatctataagatgggaataatactatgagttctgcctactgcacagggttcttgaggacacattgagataatatatatcaatgtgctttttaagtagtctgtcaattagataatataaatataattagataattaaaaaatagaaaatctattattgttttgcatgtactatattaaaatcttagggattttaaataaaattaattgatttattgaaagtagatattatctcgtcgtgtctttcaggattggtgagaagaaattaaagagaaaaaatttaaacatttaaatcagaccccactgtgaatccatacttttagaaattttacctttttccattcacatatcttaatgttttctctacctacaactagataccctttttaaatgttggaaacaaaagaagtaaccttggcaaatagttgagaactgagttttatatgaatatacttttctcttgcaagaccaaatacagtttttcttctaaaactctgttattccattttctttcaatgaaatgctcacagaaccagaaggcttgggaagaggctcagagcacctaagagttgctgagtccgtattccttttttcccctgtggctttttatatatgctgctcgcctgagatttctggatttgatttcagggaggtgaaatgttacacccctgagtctcagtgccagtttcccaggacgagtcaaaaactgcagctgcttggaggtgagaatcttccaaggctccagaggccagctcgctgtcctgttcatttgctgacatgctgccgggagcagcttcagagaaacccgttctattcttcgggtgattcagccagtctcaaaataaataggtagctgagtgcagggagaaagaactggaaaccactgaaatttgagtcttgagggctggtctgttctcgggagctgctctgttgaactctaaaaggaatcttgagccctgggcgagggagtggcctgacctggtggaaagactgcgggcctgcccgtggagtctatgtctggccctgctagctcagtcaatctcagcagctcatgtctcctcttagaccctcagattcctcatctacagaaggagaaagaagaggagattgaatgatttttaaggtctttatcagcttctaaaagtttgatttgatggttgtaggagcaattgttctttcaaagcaccatcttctaacctcaggaaggaaagcccaggggcccctgggatgtcctgccaaactgggaagacaaagattgtgactgagaaggtgggggcagggcaggagaagggggaagaagggagaatggatcaaccccaggccggggaaagagatgaatgaaggtccacgccagagtgacatgctctaagtaggggaaatcttcctaactagagttcccatgactttggcaacatttgaaaaaaaaaaaaaaaaaaaaagacatccttaaacccacaaagtactcaattgtccaagccccattatggccaacttcccaaagctggctggtcagagaccttggtgttaattcctcagccaactaaaaaaagatggtgtaagttctgttgacttaattgttggagtgtttctgagtggggccgcctccctcctctgcctcctcacagtattatgggctattctgcattacctgccctacctatcttcataatctagccgcaaacagctttggttgaccacaccacttccctattgaaagttaatactgtttgactcattctgtgttactaacctgaagccaaagaaaacaaggcagagaataactggcttgtgtggagtttggaaagctcttggaggccctgctttcaaaatcctatacagtagctttactatatctctccgctgcagctgctgagaaaatgaaggaagcagaagtggttaaaaaaaaaagttgggggtggggaagagactgggaagggagtggggcggggtccccctccggctgggaaaagacagggtaatctgcggcagtttatgagggctgtctccctgagctgaggtcttgctttcacacaccagagtgttcacacagaagagggactgttgaaggagttaaaaggagaggaaagttcaaaacagttgttgaaaaggcagctctcctattgcctgcgtaacacagaggagctgggaggctggtctcaccaggccaggcagccataggcagagactcaaggtagacaggccagggggaagttgtgtacctttcgaatcgggaaaggattgaggagggggaatgttgccggacagaaggctgtcctgggcgtccatccttgccctccatccctgtctccatccctggcaaggatggaaccttcccttccttcatttcctaactggctcaaatgtggtcaccaaggtgaataggaggcactagtgtcttggaataaacagaactttccctcccaatgttacctggcagacagtgggaccagcatcttcatcaccatgctgtgctctgtgggagtctaggcaaacagccacttgcccattcaggtaactttagaagaggtctccctcctcacagatgcccttctcagcaggtggctgcttctggcacgtggacaacagtgcatagaagtgagcctgatgcctgaatgaggctgtcatgacacaaacaaccggaagccttatttgtgagggagggtcaacgttctgttcaaaacaacttgctgcggttggcttttgtactagtgagtactcaggagctgtgagtggccagggtaccctgtccttctgtaccagccaggacctgctcagccatctgtccaagggctttgcaaggccagcctagaacctcagttggcgtctgtgacaggagagagcgtcagagtcagatgctgttcccctgctgttgggaaagtccccgaggcccagggggcagggcttttagaaataggagggaatttccttccctctttttagaagtacagaggaggagagatcatcctccacactgctggatgagcattccagaataaatctagtccaggaaaggggctcactcattcattcattcactcactcactcattcatttatttgtccagcatttatggaggcatcacccaaccttggaagggccctgcctttacctcggtcctgtccaaacatgctcagtgtctctgcccattatgtatgagatctgctgctgcgggaggggaactgagattcctgcagggaggttaggaggccagtgtggagagcctcagtgctggtaacatgctcacgcaagcagtgtgtgtgcgcctcctggatcttcttctcctggcccccaggtcttgcctgtctaccccaggactagccctgctgatgcctgaactccaaagccatgtcagaagctccaggcagcgttctgtgagtcagtgctcatatctccatagtgcgccacccgccaccaatactttctttctcttctgcaagtcgccttctctttagagtctgtccctgggcaggagctactctgatcaacaaatccatgtcactggtggttaccactctctggttacttttcagttacgctgtaactgggggtttccttgagataagaccttaacctagggagggttgctaatatttgggattataggctggtagaagaagaaaaaccttgaatttgggagctgtctgcacccttcttaagaaactgcctccacttcccccacagagggctacctctggtcaagagcaaaagccagcaggtggcttctctgccctgagctcaagttacctccttagtcaccagacagaaatggacagtgagccctggcgaccggggatggcagatttagattttgagtgctctgcttttaggagaggcccgagtctcatgtgagtgggcgaaaaactccactgctcgtggcaatgagccctggactcagggagcagagttttgtttgggtttttgtcccgtgagtcttgggcgcatggtgcaggggggctggggaggggcaggcctgtgtgcgtctctggcttgaagttgtattggttgttgatcttgccttggcgttggccagcctttcctgtccattgactgttgcttgctacacttgtcttggcccatgtcctgagggcgatcacagaacggtgtgtgtgtgtgagtggatgtatggatgtgtgatggatgtatatgtatgtatgtgtatatgtgtgtatgtcagtatgtgtgtatgtttgtatatatgtgtccccatgtctgtatatctgcctgtgtgtatatgcatgtgtgtccctgtgtgatatatgtatatgtgtgtgtgcgtctgtatatatgtgtctgtcctggtttgtgtctgtatgtgtatgtgtgtctgtgcatgtcttaatatatgtgtctgtgtgacgtatgtacatgtgtctgtgtgtatttatatgtgtgtatccccatgtgtgttttatatctgtgtgtgtgtccaggtgtctgtgtatgtgtgtgtctgtatgtgtttacatgcatgcctgtgtttgtgtgtatatgtccatgtgtgtctgtatgtgtgtttatacatgtgtgtccatgtgtatctatattttgttttgttttgttttttgagacagagtctcgctctgtcgctcaggctggagtgcactggcatgatcttggctcattgcaacttctgcctcctgggttctagcaattcttctgcctcagccacttacttgtaactgggactacaggcacgtgccaccatgcccggctactttttgcattttttagtagagatggggtttcaccatactggctaggctgctctcgaactcctgacctcatgatctgtccgcctcagcctcccaaagtgctgggattacaggcatgagccaccgcgcccagctgcatctgtatgtttttatgtgtatggctgtgtccgtgtgtatgtttgtccatgcatgtctgtatgtgtgtatgtgtgtgcatgtgtgccatctgtgtttttgtatgtctctctgtgtgtgcgtgtgagagggtactcactacaaagaaacaggagaagctggtggactttgcttatgtcagagtgccactctcaactcagcaaaagagcctttgacctattctttttgatttttcactatgaaaataaatgagttttcctgattgatttaatttttttttttttttttttttttggagaggtctccctctgtcacccagtctggagtgcagtggagcgatcttggcttactacagcctctacctcctgggttcaagagattctcctgcctcagtctcccaagtagctgggactacaggtgcgcgccaccatgcttggctaatttttttatatttttagtggagatggggtttcacaatgttggccaggctggtcttgaactcctgacctcaagtgacccgcctgtgtcggcctcccagagtgctgggatgagccatcaggcccggactgattcaacttctaatgagacaattctcatgaaactgctcagttatgatattgtattttttctcaacaagaagtttttctgtagttacatttcagctgaaaactttaattacaacttccttcacctgaaatgatttctgctttcccacaacctagtggagggtgattggacagcaccaatcatgaaggacctgagtactcattcattcattcagccaacattagtgagcctcctaggctccagttggttttataggtgctggagacatggctgtgcagaaaaaatacaaaatccctgtctttgtagactttacagtcccatgggtgcagacagaccctggataacattaacatgtgctatggagaaaacctaagccaaagggctagggactggctggatgtgggatagtctgcaacttaaaaggggatctccaggaactcctcagggagaagatgacatttcagcaaatacttgaagggtgggagggatcaggtccacagggatctcagggaagagcttcctgagcagaggaaacagtaagtgcaaaggccccagggcagtgacacaggggcaagagcaaggtggccactgctgccggagcaaagaggggagctcaacctatctgccttctagtttcaagtaggaggcatttgccttagaaaacaggcttaagaaaatgccacctgacctcaggtgacatgacctgtacttcatgtcacctgagaggccactgtaggaccatggttcgggaaggcccagagtaggaaagccccatacacaggtggacccagtgagtgcttgctttcctgttaccacccacaagagtacaaaagctctttccgaccaaaggctctgctattcctgctggtgattctctggggctaaagcatcacccctctagaaatcgctgagtgggtaaaagggattcctaggaagtggaggtatcctaggggacttgccaggattcatccacctctaagaggcttaggggcatgagctagaggaacaggggcctgcacagggagtgtgggcggggtgggtgacaggtactcacctaagacttatgtgcctactgccactgatggaaaaggtgggcattcagggcagatgtctcattgttttccaacccagacaagaagctgggaaatgagagcctggatgagtgttccgcagagtggctttcttcccaggtgcagcctctgacaacttcctagcaaattttaaggtgtgtttaatgtcccactccctctggactcagccttgggatggtagagggggaggggtgaaagcagaatggaatgtcccagtcagtagggtagcacgaaaggctctgtgaaggcttaagggagagaggagggcacctttgaatactgaagtccaaggtcactcataactaactgtccaaagggtcactgatgaaacagctggaggcagagggagagtgaattcttaggacacctcgtgcaaagctgctgacccccagcacacagaaagatagagcaggccaggtgggatcgcaggctgggcgacctggtggggatcaagacagagctctgagaccaacctgacagctagacttggcagtggctcccgcagccaggtgtctgcctgaaaaaagacaaaagggaaaactttgaaagtcgtaacctcattagaagttgttcaagaaagaccgtgcttagaaccagttgagtagataatggcagcagatgtaattgttgtggatgcttttagagtcccttggagtaatccttcttagtctcttaattccaggcttccagatacggagcctcagtgatgaagagacttgttcttgtccacagcaaaggttggtagaaaagcagatttagaatggagaattcttaacgcctactctagcattcacgtttccctgggaccatgttgtttctctagaggggaggaggattgtggcatctgcattaacacccggtcctgtgggcactcagagaacttaactgctgcatttgtggaacggaataaaggttccatgtaacccttccctgccattccccaaagtctttctatagatggcacagcagaaattacttcctacttgagaatctggggttcaccttagcaatcagactgattatcatgacagtgactctgacagaatgtgcccagttattgtaggagacagagacggtcacacaccggcctatctgcagggcagagtttgggcattttcagctgctctgtgtgtattgaagagttaaaaaaatgaaaagacggccaaatagttatcaccaaaaggaggccgtcagtcattgctcatgaacacagtctaaacacagttcaggcatatttagttcgcgtgtttctccccagcacacagcaaatcagaagcaggcaggagaagggaagtagtaatgcacattggaagcttgagtatcaggaggagctctccctctcatgcagatattcccagcgtgctccctgtatcggcagcctcagcatcacctgggaccttattagaactccaaattctcaggcccttcaccctagaccaacctaccaaactagaatgcccaggtaattccattgcccactcaagcaggtgaaacacagcctcacagcctgcaggtcacagtgtggctggggctgtcttctgattctacacacacactgggagcagaagtgagatggttgaggcagaatgcaaaagttcaagtgctttcgtgtctctgagatctaaaactatgaagcattgtgcacttctccaccctgttcgctttgagttcacagaaatgtgtatttctaggtgcactgagtgtacatcccgagtgtgtgtgtcggtgggtgttgaatttctaggcacactgagtgtacatcccgagtgtgtgtgtcggtgagtgttgaatttctaggtgcactgagtgtacatatctgagtgtgtgtgtccgtgggtgttgaatttctaggtgcactgagtgtacattccgagtgtgtgtgtcggtgggtgttgagagtgtgtgtgttttcagacctgccctcttcctgtaactggccgtgtgagattgggcaaatgacataacctctctgaacctcacttcccacacattagttaaaaaccaaggctgatttctgtggccattctccagttctgaagtactccaaccttgtggtgttgtcttagcttaacgatatgagaagaaattggggtgggggaaagtgaggctacccatagttacgtagcactggacaatatataagcatgcatatataatatgaattagaatgtatactgacatactatataccattatatagtttatattatatagtatatataatatacatgtggtatggtaaataatattgaagaatatttcccaacattaaattagccagcatatggttaggtttgcaattagggagatttattttaccatctgcaaggggcttcaggaagagtcacattcagtactgtcactttgaaatcctaatgaccctgcaacctaaaggttagactgtgataccaggaaaagtaagctgttctctacacacattgatttcttttccattgtcataaaacagtagcaaatcaaaggaagaaaaccccatatttttatatccagattcatgtagtgagtatccaattgactggccaacatcttctgaaatacagatatccttttaaaattgactatataaaattcttatatgcttttagaagaaccacaattttatacatgtatatacagagagaaatatatctttttggtattatgcttttgcatagatttggctcaacggctcatcatgacagtcttctgagtatataccttcctcatttttctgctaagaatctatcaagaaaactagtaaacccatatcggaaacatagactaatatgttgttgactgccagaaaattctttattctatctaaccaaaattttccaagaaacggtggcaatttaaccttatctggtttctttaatggaagatcatatattacatttatgttacttacagccacagatcacaatggtgtcttgaaaaaggcagctcggttatcaacgagatatgcatacctgctcagtttattttgtatggcagaaaagtgaaagctggtctcactatccgtcacaaaatatcataacatttaaggatggcctaatgagcagccaaccccgaaaacaataggaatgcctttggaatgaagtaaaattttgcaaacggcattgacttatttttattatatacaattttttccccttttttggatttttatgactctgcatacataataaaattccaagcaagtactttcatttttttcaaaaatgagaaaatggtactagaagaatttaggacctttttcaactctgcttaagattaagatgtcccagggtgaaatcttgatgtgcccactactttaaagcaccgccctgtaaacattcacagttgattccaaacatgctgaagaagccaagctgccagcatgcaggtgttcagagctgcatcctggttctacccaagggcttgacccagggtcgaattccctgttgccctctaaagcccggtactcagtgagaaagaagaaaagtgaattggatagtagacattttccatactcctctatttaacattcggggggcaaatgagccttttaactgaacacagatacaggaaactgaagacataaagtattcattttccccagcttgaaagtttatatcggaagttcctatatttcatgcaaaatattgctatttggcacatgaggtctgatggtttcagaaagtaagaattagatgttccttcgatctagcttgtaagtgcatccaaaccacaccctgaatatgataatgcttctcatttcccctgtgccttggtgtcacagctctccagcaccattgtgagcctgagggtcaagacccctaccaaggcaataacgttcctactgactcccaggaacacacgtggggagagtggaatgggctcttccccaatcctccagcattaaactcagccctgagactcccagggcttagaaaacagcttagagtgaagaattgttttctctgagagttatgcctgaacacttctgctaaagcagacagtcatcagttaatctctataaatgactacaattttggcaggtatcagctggtatagaaattgctcacaagttaaagctctcatttctaagtatatagtaatgagggggactaattaaaataaaaaacaaagaaacaaacaaacaaaaaatacctcacgttgtgcctgaccacaggactggcttacctggaatgatgattcctgttgggtgtctccgtggcacaggtccccacgcttgctggctaagagagacacaactgccaagagctgtttttccaagctgtggctgtagactctaccacgtcaagtgctgtgtattcagaatgacctcgctcacatcactctcctgggtcacccactgtccttgacacagtgttcttcaaaaatgccactaagtgcctgaggaatgtgaagttttgaaatgagcacaaaacctgccggcagcctttgccgactggcattatttctgaggcagatagagctctccacaatcattgttcctgccttcttctttaccccaactcgtaatgccaggcattagactgtggtaggaggttaaagggctgagttattatgttttgaatggttgttccattggaattgtttgtttttctgcaagaaaactgcagatttttcagtttgatcatcaggaagccaaggatctatggcagagataagaggagggaggagctaaggaaggcttcatccagaggcactgagtcacaccatggctgaccaacacagagcgctctagaaaaaagacattttcatacttctgagggaaagggatgatgggggttgctgcaagacctggccccatggcctttcatccacaaagccggtgcttaaaatacgcagccaagaacaggcctcccacatgcatgctgagcctgcgtgactcaggctgtttgcgttcaagtctcctgttgtgggctggagcgctgaatcagagtccagatttgccttggtgacacatgacaagaggggccattgcatttgaactacataaatattatgcttaagtgtttttcctcattttggagccaaacaggtctcgttaatgataaaatcactgcaatatagtgggccctttttttctggtctggaatttgagacaatgtcaactgtgccaaggggcctggcagcaggaagaaatggccagccatggagatttgcagccatcatgcaagttataccatttaattttataattgtagccattgggagctggactacagtgcacttctcgtggtctgctcttaccccaggctgcgggagtggaatcaagggggcctctttctagtctaggattgggtcagggcatgtgaaatagcactttatgggggcagcgggcaggctgtttctcagtctggctttggggacatttggcaatagggaacagaggttgtgcaatcgatcaaggactctttattggaaccataaggctgaggaagcagcaggaggccattgtctttaaaagagaaatgaatggcccaggcctcctgtggctacctccctaccttggagcctcagctttgcacgacaggactggctctggtttaaggacattttgagaaaaccgtaggccccagtcccccatgagtggcctctgcttgctgcttcctggtgacggttgttttggtgaagagcatgatgaggacacttgctatctatatagacactgaggggcccaccatcccaccctatatagacactgaggggcccatcatcccatcccaccagtcctgagccccctggggaagctcaccagataggctgtagctacctctgggctccagtgggcctattctgctgggaatattggacaagacacaggcgaggccttcctgtcaactcctccttaggggtacatgggggagtcggcttcagggaagaaggaatgcttgtgaaaagcctgtgaggagagggagagggagaggggctgaggggctgaggatgccctgcgtgtacctggaaatgggacctccccagaggctgtgggtttgcagccacgcctcatttcctcttggaaggggccctaccactaagctgcggggcccactttgccgcctctaaaacgtgccagtggctgggtttgcagtaaggaacagccgttctgatgcccctgggaggccacctttcctggctgccacagcatagcccctggcatgtggccatgtgccaacaattaatgcgcctctttccctcccggcatcaccaccaccgccaagttctgtatctcagtgagttgtgcccattggaagtgggtgtagagggttggggagggtgccaaggcccagactgggggagcactctgtggccgaggcggtgaaagggggcccattctgctgagaggacagtggccccaaattcagctggcatatctctagcgagtctatgttggggtgaggggagagagaggggaaagacaagaaaagccccagttttaggaaatccacaatactttttctgatctcttccctccctccttccctccccccatcccctcccctccctgctccccacaataggacatcggcagaaactagatgatcagaccaagcccgggagcttgtccttttccgagcggctcagtgaactggagcagctgcggcgcacagccatgagggtcagcccacaccacccagcccccacgcccaaccctcgtgcctccctgaaccactccactgcctttaaccctcagcctcagagtcagatgcagggtaagtaccagatggagcccactgcccgcctctcctgcacctgggccaccacccacaactggcccccatgtgcacacaccttcccagaccaactggggtttccccttgatgctcagagaaaggcctcgaaccaacagcaccacctgggagctgttggaaatgcagagtcttgggccccacccaccccagacccaccgagtcagatctgcattgtaaccagatccccacaaggaaaagcactgctacagaggatacgaggagctctgggtatggatatccatattggatagatagctctcttgaattttttaagagttagctttggctatgctatttttttacctacccattaggcttgaagacacacacgcagacacacacacacacacacgtcaagcaaagtgaagatgggatgtttcaagttctcgctattgccagattatttgtgggttttgtatctagtgtttttttattattaagaaatagttgaaatgtatggatgtcatcacatcaagggtgttatttgcaaatcaatagagaatgcaggtccccccagcccatgggcctagctggcaattactaaagcgctgtaagatgcaataattgcctaaggcccactgtgccaaattagataatacaagaagttcatttacactgtagaccagtgacgtcaatgactgtttgctctgtgataccgtttcaaaaatccaaaatgcagacttttctctgtgccatgcaggatgcagctgtgtgtgatatggtttacagtaatatttctttctcaaagtagcaggcttgttaaggaaaagataagcaacacatctggggaaaagggcaggtggccagcaatcgatgtggtagctctttgcccctctcggacagcaggaattagcttccccaggcattttctgtatgtgagttgtattgtgggatgtacaaatatcatctgttcctttgggtttccaggccagtagctctctattttgggttcaaacatgggttctcaggccgggcgcggtggctcacacgtgtaatcccagcactttgggaggccaaggcgggcggatcacgaggtcaggagatggagaccatcctggctaacatggtgaaaccccaactctactaaaaatacaaaaaattaggcaggcatggtggcgggtgcctgtagtcccagctactcaggaggctgaggcaggagaatggtgtgaacccgggaggttggaggttgcagtaagccgagattgcaccactgcactccagcctgggcaacagagcgagactccatctcaaaaaacaaacaaacaaacaaacaaaaacatgggttctcaaaaggcatgcccactgtctcccatggagcttgacagcccatgccattagctctcactgttaggtttctggggaaggttcttctacttgattggaaaatttccaaataaatctttccagaagatactatgcacacagctaagtggcctgtctgtggagtaacccttttgtaaacaaacagaaacctaaagcttgatgttttggggggctgcctgtcatctataggttcatttaggtgtatttaggaagaggatccatgaaaccactggtttcctgttacataataatcattaataatgatttaaaatgtgtacattgattttttttaaattccaaaatacaagcgtatatggtaaattaagtcaaatggtatgttcagtgagcgagatgggcttggggcaaaacaatactttgcttccaaagaggatacaactctcaaggagattctttcatcttgcctttaaggtcatttaaactaattcacataatcttcagaaaactaattcacatcatctattcatgtgtaaaatcaaaaggaagactgttttcttagtctctcgttgcctaactggccatttatactactaggttgattaagggatttgcctttttctgctgatatgggaacaaaaagtcttaagcatttttaaaggcaatggaaaattcagccacatgggggaaaattgatattgtcaccattgagttgctctgtttcttggtgaagagtgaatctaatctgatttccttcttcatcagatatgcctctttaacaacaaaaacaaaaaaatggggggaagttgcacattgagttctcatcctctgaagctcctgggcaaaagcattattgtggaccgtgtgatgggcattcgtcagctctttggagacctatatgcttagtagagtatcaggtttaacactaagcatcgccccttttttgttcctcttgaaaacttttacttctgcaacatttaagaaatcataactcgcttttagagttcctacgggcttggttgctactctaaagaatgtgtgaactatattgctggtgttctttctttccaaaatatgaatttgatattcagtacttcacttgtaaaattttaggaacaacttttaaaaaataagtatccagaatattttcatgtgaaacaacttttccttttccttttgttctttctttcctataagaaaacgctgttttacgctaatcatgttttgagtagacccttgggctttttctcttgaaattggaaagttaacaggtataatatgcaagtcttgttcagccaagaccttcagtttgttcttgacagtaggaaaatgcttattttccaggctcagccctgaaatttctatgttatatttacgaagatactttaagaaatacagcatgtgtttctggctttctttgaaatggcagtggtagttttcagaaaaatatccaatttgtcagagtagttccacagtggtgctgtccagatgcatgaatgtttttcagctttacagaaatgtcagtaaccgggggtttggcgagcttgccgggatttatagaaaggctcaggaaccctaccttgctaggactttgtcagaagggttatgccagctcctctgactctgtcagcaagaaaatactgatatagaatagcaccaatacttacctagaatcacatgtgctggagggtcactcaaaatagacatctcaaattatctgaagcacggtacagattgagagggggcaagttgtcatgccactaaaccactgtttatttgttggggtcttaactattaaagggctgaggtttatttcaacttcctattttaccaggtcttaaactggtaaagccattttgtcatgaaatagaatagaaagccattttgtcatgagtagacccttgggctacacgtttctcccagtcaggacaccatcattaacttctacgatcgagtcttagaattcttttttaatttatttcaaaagatagaacagggcagattctagagctagtggtaccgatgcctgttcagtcacaactcccacctagagatgggtttgggcaacccgagtgagtgattttaaaatttcacccctgattgaccaaatatgatgtatcacatttaaggtgtcgtaatttcctcctttctgggaatatgaggatggagtaatagatgctggtacagaaaactgaaacctagataaactaggaagcccattttgttgttcttctgcatgctggttgtcataagcatgtaggaagaagatttaactctttaactggaccagttgtgagctattttgacgtgggtcagacatttgtacatattattccattccctcaacaatcctgtggtatcatttatagacagagaaatcgaaattcagaggttaaaaattgcccagtatctcaaagattgtaagtgatgaacttggacgcaaacccagaccttccttgctacaaagccagtgcaagtgggatggccgttccctgggcgtgcactcttgggtcaaggatcgatttactacagggctgaccagtgtcgagaagaatcccaatcaccaaaggagggatggaaaaagtgttgggctatccactcacttggcattcttgtattgaacatgttctattataattagatgttgataataagaagaattttggggccaggctgtgtggtgggcaccttaataaactgtctcctttggtacatgtgcatttgtttataaagtttgggagaaaagaaaactcagaataatgaatctctaaataagagtgaaagagggggtatatgagcagggagaaggcttaccagccactctgtttactttattggggccattgccttcctacttttgaagttcattgggaccaagtgcttatcatccaaacccagtcaacatctaatccacttttatgagtatgcgtgcctcactttgagtgttccatatggccaagaggggtccctgacctctcaaatcatctcttgatttttagtattccaagtaacttctgtcttgctaattattttcccccaaaattaaagttacttaggaaggactatattctggtgctgctgtctgcaaaactctgagatactgaaatgaccctgtttctcagttgtatagagttatttaagtccgtctgattctctctttatcatctggatagacaaaaggaagaaaacctttccaccttcctgtaggagaaggagataaatcctctttccagccttggaggtaaaatatccaactgcattgcattgctttcctttctctctccctctccttccctctcttccttactcttctagcaatttgaagtttgaaaacaaagggagtagggactatttgattaccttgaaagtggaggctacaatcaaacaccagaaatcctcatatgtgaatctataaatggtcatttaatggttacacaaagtaacatattcagaatgtgagaaattaatttatataataggctataaacatgacaggtgaatgatttcatttaaaaatagcttttaacaaggtgtagtagggtatgagagcctttccaggtctatagcattataatcttaccccgacaacaagcctgaatcaggtgttcacaggaataaataaaaataattaaaggaaagaagggagagagagagaagaaatgaaaaccagtgggatgactgcagagattcactgcagggcttgatcttagtgatgaaatatttcttctgtagactgcatatgttctgaactttccccttatgcttgtaaatatgtaggccagcacacccatgcactaaaaggtttcatttggaagattaatagtttcagcaaagttgtagttggagcatgtatttgatattgatggctacatatcagaaggcttgagctgggaatctaatagccaagaaagatagcagatcatagtggctaagaaagaatgagggctcaacaggcagactaccttagtttctaccacattcactataggacttttggcaagttacttaaccttttaaagccttagttttcttatctgcaaaagacgagtaataattatactagcagatcctaggaccactgtgaaacataaagcagtggacattagagccagcccatggttaacactcaaaaactgttagctgttatgatcaacatcaataatatcaagttgtcgtagtcttatatattatagactgggtaatatataaagaaaagtttattcggctcatggctatggaggctgggaagtccaagagcaaggtgccatcatctgctgagagtcatcccatggcagataggtggaagggcagagagcatctgtcagagagctcacttttatgacaaagccacctccatgataactaacttactccctcaatggtagcatgaattcatttgtgaggatggagcccttatgactcaatcacctcccaaaggccccacctctcaacattgccatgatggcaaccaggtttccaacatatgaacttttgagaagacacattcaaaccatagcattccacctctgacctccccaaattcatgtgattctcattttaaaaatacatttattccatcccagtggtccccaaagtcttaactctttccagcattaactcaaaagtcgaaagtccaaagtcttgtctaaaccagatatgggtgagatgcaaggaaacatttaaagcaaattccattagctttgtgaaatcaaaaacaagtctactataatacttccaaaatataatggtgggacagacacaaggtagaaattcctactccaaaagagaaaaacaggcaagaaaataggggtaactggtcccatataagttcaaaatccaacagggtaaacaatattaagtcttaaaactggagaataatctcctttgactccatgttctgccttctggatacaatggggctaagactaggcccccaaggccttgggcagccctgcccctacagttttgctgggctcagcccaaacttcacctctctcacgttgaagtcttgtgtctgcagcattaccaggctagagttgcacactggtggctctgcagttctgggttctcagggatagccccaattctgtgtctccattaggcacagccttagtggggactctttgtggcagcttcaacctcacatttctgttcaacattgccctgctaggtactgtctgcagtggtattcccctgtggtaggtcttggcctgagcttctaggcagtctgtggcatccttcgtaatctaggtggaggaagccatgcttccacagcatgtattctgcatgcctacggaattagcaccacatagagaccatcaaggcatactgcttgtgcccttcagaatggcagcctagctatacctaggcccactgaagccacagctggggtggccaaggtgtgctgcaccaggatgcaggaagcagagactagaggcagccctgggcagtgagcccatgaagggtgccccaggcctgtcccctaaaatcattctaccctcctagagctctgggcctatgatgggaggagcaacttgaagatctctgaaatgcttttcggggtctttctcccattgttttgatgaacagaatctggcttcctcgcattcatactaatctctttggcaaatggttgcttggccacacccttagtactctcttccaaatacactttcactctttacatggccaggctgcgaattttccaaatctttccactctgcttctcttttaattgcaaatttcatctttaagtcattcttttgctatcacatctcactatatgtagttaaaagtagccacacagcagcctcaatgctttgctgcttaagtatttcttccacaaatatcctagttcatccctcttaagttctgcattccattaagtcctaggacacagacacaatttcacccagctctttgcaaccttatattttataaatatggcctttactccagtttccaataccttgttcctcatttctatctgcagcctcatcagaatggcctttaccagcattctaccagcactctggtcacatacacttaagtaatcacttaagtaatctctacgaagatttagacttcccctagttctaaggtcttctttcagagccctcaccagaattgcccctaatggcagaaccgttcttggcaatgcaggcttttttctagcctgctcctccaaacttgttcagccttcacggttatacagttccaaagccacttacacactttcaggtatttgttgtagtaacaaccccacatcttggtaccaactttctgtcttagttcttttgttaaatgcctgagactgggtaatttataaagaaaataaatttaattcacagctgggcacagtggctcatgcctgtaatcccaccactttgggaggccaaggcaggcagatcacttgaggtcgggagttcgagagcaggctggccaacatggtgaaacccccatctctactaaaaatacaaaaaaaaaaaattagctgggcatggtggcacacacctgagtcctagttacccgggaggctgaggcaggagaatcgcttgagccggggaggtggaggttgcagtgagctgagatcatgttactgcactccagcctgggtgacagagtgagattctgtctcaaaaaaaaaaaaaaaaaaaaagaaagaaagaaaacaaaagaaatttatttcatatggttctggaggcagggaagtccaagagcatggtgctggcatctggtggggtccttgctgcattaacccaaggcagaaagcaaggggcacaagaaagcatgtgcaagagagcttgcttttataacaaaggcacttcaccaataacccactcacatgattatggcattaatccatttatgagggcagaatcctcatgacccgtttgctccctgcaaaggcctcatcaacaccaccacagtgggatctaagtttccaacatgtgaacttttgagggacataatcaaaccacagcacaagtatattagtttcctgtggctgttttaacaaataaccacaaacttggtggcttaaaacaacagaaatgtattctctcttagttctggaggccagaagtccaaaatcaaagtgttggcaagaccatacattctctgaagcctctaggggaggatacttccttatctcttccagccactggtggcattccttggcttgtgactgtatcagactgtatcattccaacttcttcttccctctttatatggcctcctttgtgtcatctcttttgtctaaggatacatgttactatatttagacccacccaggtaattcatgatgaactcaaaatccttcacttaattatagcttcaaaggcccttttccaaataaggtcacattcacagttctgggggtgaggaaatggttctggagccaccgttcaaactgctgtatctttgtacaaaagacaggggacatcagaccattgaccaggcacagcaggtgagtccagagataactctcccaagtccatcccccagaacaaacatggtagacaggtaaatgtgaactgaacatctcatgcacaaatgccccaatcgtgttactataacctcagtccatcatttgtttgaacgcaacatcatagtatttttatttcccagccagaaaaatgtatgattttttttagatgagatcagatatttccttaatattttctagagcacctataccgatggaatcagaggtcctgacagtgatagagaaagagctctcttccctgtgtcccgggagcagtgccagatggggaaacaggaggcccaggtgcctcttgtcctagcctccaaaagctcatgacagcttagatggtaggaacagaaaaatgggaacaaaagatgacatgatgaccaaagccagacagttgggatggactcaagaatttgacctcccaaagccaggcatgtcactgttgttttgaagcaagctgccttttaaaaaagtgacttgattgccaggcattgttgactacacacccatttctaaaggatggtgatttacaaatcgcctgaagatagtctttcaaatttggacatttaaaaaagaaacttttactgtagtcatgaagtagtatcaaagtttaccacaagtttgtattgagagaagaacaaacaatatatgctaatatgaaaaacagctctacttagaaagctactgcttgggttttcttattaggcatagttctccagactgagttggttttactcatctacatgatttttccttgccttatggaacagaaattcaggcccactcgaattcagttattttagggctctttaaaatccagtatttgtgatttaaatgatgcggagggactttcattacctgtgtctttgcttatttctctctggccctcagaacaccccaccctgacctttaggggaaattgacagaggcagagggtttcacctgcctcaattgtcaccagccctgttacattcttccttccaagccttagcctcacagggaccttctcattattgaacaattgccttcaaagcagtagaatagcccaattgttatggagattaaagataccgattgcaaaactcctgtaaataaaatcttcactgacaaacccagtttcttttcataggcttttcttctgtaatctctttctggcagaacatctcatgttttgatgttagagattcagttaccaaccacagtaaataaagcaaaataataatagaaaaatagtatagaactcaccctaaaaacaaacattggccaaccatgtttattttttgtctctctttgcactcctgagaattgataggggaagaatgtaccacctctaattcaggtgatttctgattagcaagctatggaaagtcttcaggttgagttttagccagttcacgctcccctaaatggcatggaatagactattttctgttttaagaaaaaatagaacaatggcactaaatgcttgactgaatgtttgactaaatgttgactgaatcatggataggaaagattgggcagaaaagacagccactgcctccagacacaggatgccacaatcctgggcaccatcattattccatacaaccttagggtcatttttagggtttagaactttctcaatagggtttcaagattttgaaaagtgtcttccaattctgatctccgtagatcctgttatgggaattaacctttttggaaggggattcttgttcttaaagatgaaattccctactttctttcctggagggaatcagtatgggcagagggaagaggagatggcgattctgacctgtgtgtctcatgtcacctaacacctatggggtggcatgaaacttgagctttaaaacacaccaggggccaggcacagtggctcatgctggtaatcccagcactttgggagaccgaggtgggtggatcacctgaggtcaggagttcgagaccagcctgccaacatggcaaaaccccgtctctactaaaaatacaaaaatcagctgggtgtggtggcgggcacctgtaatcccagctacttgggaggctgaggcaggagaatcgcttgaacctgggaggcagaggttgcagtgagccgagatcaggccattgtactctagcctgggtgacaagagtgaaactccatctgaaaaaaaaaaaaaaaaaaaaaaaaaaaaaacccaccaggaatggaaatggtgcttaattcctctaccgtcttggttcttccacacaatctgaactgggtcactgaatcttagcctccgtaagtcaacatcatcagttccgtttaataagacttgggccactataatgtccagctcaatcctcctggaagtatggaggacactgcaggatccttcagttgatgtcataaaagcaaagcatccctagggaagatctgtgagtcaagcctcaaggccctcgctgagtcagcgctaacttgagtatcaggagctcacccgtctgggacggttaagtctcccagccctgtaaattgccagttcctgctatggatgatgtcctctttaccttacggctttatgtgttcaacctgagtcattctaaagccagatccaagacccagagagcttatgctgtgccagttcctctttatatcactggaaggactacatatgtccagttgctttgggatttttttaaagaacatctcaagataaaaagggaggaagaaataatgtgactagggattgcacttcctggagttgcaggtcacatgagggacacgaacatggtggtttgattaagtctcgcgggattataacactgttgtggccactctcactccattagtgcatctctccgcacatatcagatagcaaattatataatgataaagttattaaaatatctgtaaaagtcagcacaagctcaagggctcgacttggcctttctgcccactaagtggtttatttagctctctcatctcaaggccggttaatcttcatctatactttgttgtaaatcacccgctatgtggaacagccataactgcctgagttttaagatgcgcttctgttggtcgtccaacaaggctggtatcttaaagatgaatgcagaagcttttgaagcatgagactcacccacttccccgttttaaaatgatagcctttgtttgtgattgtgtctatacctgggttatcacagagcagttatgacagcaagattatgacaaggacattgcctggttcacatgtttactgaagggagtaataaaataatgatagctcgtatttatagaacagaccaatgttgctggttcattgaatccccaccaccagtcacctgtaggtgcatgacatggttagggggaagcattgcccggaaggtcctgcctgtggtgtctggtttgttttcacgtgacccagcactgtttcctttaccaccaagtcccagtccctcatctatcatgtaagtgattaaccaggttgtcttcaacactaacattctgtcattctggatactgcagttcccgtgaattaatggtcacccctaactaacattctcaggaaaaccagtagggttgccccagagcccctcactctgctgcttatttggaaggagcctttatagttctgctgtgtgagaggctctgagccaccatatgttcctaaatgagagaagccgttgcccagacatggatctgtttaatttaatatgatttaccacaaattacgaagcatgacttcaaaattgaatttgtgcaaaattactgatggccaattcagtggaagggaagggaaatcttgttattcctattccagaatctcttcctgatttcctcatttgattctttcacgccttggggtaggggaggggaatgcattcgcggctctataaagaattgtccttattttcgaactttctccctggtcacacatggctccctcagaggaagacacagcaccctggagatgttaaggcagaagtcagttcttctgtccatccctctccccagccaggatagagctatcttttccatctcatcctcagaagagactcagaagaaagatgacagccctcagaatgcacgttatgaggaaggcagaatgtgggtctgtaattcctccgtgtcccttctccccctctgcaaaccgtcgtaacaataatagttcctaacacatgggacaattgtgaggattaaatgagttagcctgcagaaatcacttgatgcacagcacatgggaagcattgtgtgtatttattaatccttcacaaagtctttgagatatatttttatcaaatatttagcatggatcccggtacactttcaatacttaataaatggtcaatgttattctttttcactattattgctatttatgtgctcttattggcggcattgttgtatcaccagttagttgtacccatcggtcctctccaagtcacacagctactctgcgataattcccccggtgtctccttattcctcgggagccccagagtggataaaggtattggtggttttagtggtattttcatttgagttttgtttccttggataaacccaaacaggagaccttcccataaccactgttccacaagaccaaatggtaaactgttaaagttgaaaggaccttaaacttctttgctcaaagccctatattttactcatgagacactcgaggcccagggagtttcagtgattttccgaactagaggcagacctaacatccaggttttctggctcctggcccagtgctcttcccattggctggttcgggtctgcctcagaggtagcctcagaacagtctctagggttggtgtggatcattcacttgggcactgaaccatgctgtacgtcacactgcctttttctggaaatacaccatctcagggagatgctaggtcccatggttgggttcagtatcatgtgctgcttctgagtctccatttttaaaaggttgaattcgtgctaaggaggagtgatgcttttttttttttgagacggtgtttcactcttgtcacccaggctcactgcaacctctacctcccgggttcaggggattctcctgcctcagcctcccgagtagccgggattacagagtcgggattacagagtctgccaccacccccagctaatatatatatttgtatttttagtacagatggggtttcagcatgttggccaggctcgtctcgaactcctgaccacaggtgatccgcccgcctcggcctcccaaagtgctgagattacaggcatgagccaccatgcctggctggaggagggattcttaaagcatgcaaggaagggaagtcctcctcaaagccacacctaccctcctcagccccactcagcaaggaagggaaatcctcctcaaagccacgcccattctactcagccccacccagcaaggaagggatatcctcctcaaagccatgcccaccctccgcagccccagccggcaccccagccctgctccctgttggggacaaccagctacaggagaccgacaggtcacttcctgagcacaaagcccacgtgggtagcaggcaagggtgaaccctgacctgtcccattacttgcatgaattggatgcattcaacaaatgtgaatggtcagcctctttggtgtttttaatgaagcagctacaaaaggatttcttttaaccaagtttcaccgtcctgtgtgattttgagtaaataccatcctgtgccgattcctcccacaagcccggccctttaagcctgcttgggggctgtggcttgggctggcgggccagaagcaggatggcaaacaggtgtgcgagtgtgacagggcagaggctggagccacagctgtgggaatacgaggctttggcaggccgaggccaggaggggcgggaggctggtgctgactgatggtcctgtcatcccggttcaggatgccactgccaaacttcatgccaattgctcccaacagagtacacggctatgagagggagagagctgggaccagatgaaggcatccctgtgacggccacgtccttgtccatgaattcagggtcagggtgacgaatggcagggccaaaagctaccctggaatgtcacaggaatttgcagagaccaaatgcccttctttcagaggcaccagagtgggggctcccgcattgacgggtggcttctgggccccctcccttcactaagacttggtgacttggtaatcctccctcctcaatgaaacttatctaagaattgattaggaagagggactggagcatggcagtaactagcagtgcagacctgtcatctccatcttcccctcccatagcgtgtggctcttgccatgtcatgaccacactcccgggggctcgagctctgggcttgcctcagcagtctgagaaccacaagtttctaaagaacaggtatgaggaggagagacttttcttgctcaaagacatggatccactcagaaacagcattcaatggtgctgtgagtttcctcccaagtgtaatgacctcctctgacttgggcacttcttacagtgactttgaacttctgagcattagagatgagtgaatcgcagaaaactagaccccttgttagatggatgagcccagagaggttaagagacttgcccagggtcacacagataccacccatatcagagcgctcagctttcctttcccctcctccccagcttggacacattcctaggatttggatgtagcaatgtgaaccgtcctgagcagtcccttcaaaacagcacttaggcgaaagaggggctgttggaacaagacaggacaaacacccgtgtgcctctgcacgctgctccacccagtttctcatctttatattacagaaaaagagtctcaaataacccaaacaggcagggtatgatctgcagacagtctgcaggcatctgcccaagaagctgccggtcggctggtccatcctcctctgatttatgttgtgtgtgttaagccttaaattgttgagtctctggctggctgcagtggtattactggagggctggtgcatgttttcggctcacagagctggctccggtactggaggtgttggccccgaatcaagtccaatctcacacctgtctgagacaatgagggccttgttagacacatctccagtcgaggaggtgcaggctgcttatttttcacattcagaaccagaaggaggggggtctgggacaagggggatgggagaagccaaggggagacgggaaatgctggggtcagctgcctctcgggccctttccctctccttctccctcctcccttcccccgctcttatttaataaacttctccttacttttggaaattaaaaaacaaacaaacaatactaacagttgccctcttatgaaggataatttcctactgcagaacaaggagctcgtggcctgttgtaggataaattcccagtcatcatgggagtggagcagcccaggggaggagtggggtgaataggcaggggcgcagcccccaccccaccccagcactgaaacttgagctctttgcacactgagggcgcctgtcagtgagaggttttctcttctggttttccctccactgctgacatttcagtgacagccgcagaaagtagaggggactttgtccccagctccatattattcattgatgaaaccgcaaactgttctgtcctggttcagccttcctgtcccctgtgatcagagcagacagagcaggccaccaggacttacgtctgcagacactttgcaaatccagttctcaagaggccctgacatgaggcggccccgggcaggagtccttctgggtacaggctggcacccctcaagggtgatgatcgctctgaaggatcattacttagtcaaagccaccctgaaatgactttctattgcaggaccacacgacgtggaggcccatagtgtaggagtcaggaaaagagcttcccagagttatcaaaaaccactctttactgcgagagccaacagtaaggagcctgtgtagaagagctaagaaaatctcacacatgtagtggccatgtcttgggggcttgagtaactcgacaaatctcccagctctgtttgtgatcaggtaggctcttacctgagccgggaggcatttaggtgccagcagtcactcaaacaaggaatgggcagccctatccttctcatccatacacaacttatttaagcactaagccccattgctgactcctaatttggcctcagcgacacaacagggaaaatccatatgctgtttatttcatttgagactgaggacttaccagagatgaggttgcgccagtctgtttcttgtagtataaatcatttgtagctcagccacccttgtatctctgtatgtacatcagttgacaatcccagagaaacaaaaggacaacttttcagaggcagcagagtgacagacggtgaatagcaatgagcataggcaacctggacttctggctacactccagcctgagtttgaatcccctctatgtgaccttgagtgacgtgtgaagacccaatgtgctcactgttgatactttggccttcagagagtccagggactgcactgcataggttcccttagccctgcactcctggtagaacctgtctgaatatgtcacctttggaggaaagtggccgaagaagcaggtgttgctatttcaggtcagctgatgccagggaggcctgatacctatggagaccatggaaccaccagtttcctgtctccttctctagccatgcctccctgccttgttctgggccacaaggtgctccattcttccgaagctcattcttgctctgaaatgaccaaaaagtcaagccaacgaacaggagggaggctggacactgaggtgggtgaatgctgcagatcttcctgcttgatctctgaacacccatgaccagtcctgcccacaagctttggtccatgctggatgcctacccagaaagttccttcctctcctccccaccacatccccgaatcctgccattcttcagggcacctcacctgccccatctcctccagaacatctttgtcctcactgaggcccagactgactcccttcccgactcctgactgatctgttggtctctgtcactttggcatttccccacacattgccttctgctgttaccagataggctgcatgtttgagtgacgcttcaccaactgtcatggctatgattttccaccatctgtgctgtaagacagtaaaaactcaaccaccaccaccgagatgccatccaggcaggcaaccctgagcgtgcccccacccgctacacactcttctccccagagcacatcagggttctgagatcaacaagttggaaggagacttccaggtgggcaggaacgctctctccttcccaggacccccacgaacctagcccagagctgcagagaaaggggtgcatgagtcgttgaggaaggatttttccttgctcctgggacagcaagtcaaaactgtttgttttaggttttaagttaatttcagaatatcctgccctaaacaatttctttccttacatagcaccaactctctgctggggccctttggctgtttcctttctccattctttccttctcctttcccagatcccagctgggaacctggggggagagcctggctggcaccacctgccctttcttgggccatttcccttcttgtttgtgatgaggaggagcctaggaagtctccatgcttcttggctttctggccctcatcactttcacagccttctgctaactaagctagtgagcccccctgccctttcccattccctctctgaggccaaactctctcatcccagcttctttcttttcatcttccttcctctaaagactgctcagcctcatcggaggctgccttctgaatcctgaccctgctttccacattttgtaagacatctcggccccagagtaagagtgcatgatttacctaccacttccttggatcccaacccctactcactgctagctcctggcagtggcgttcttcctccttccttggtgtgcagatgtgcccctgtgtggcctccttctctaaaagcattctagattgttcttggttccagcacttctgaaacccatccttccaagtttactctttttcttgctatccctcgtattttcccactcctcatggaagcttctttcccacacccaccctgtgccctatggcgggggcttcaggacccccaaccccagccctggagcgtttcagtgctgccatcctgctggcttcacttggtgcttcctccacagcaactacaaaagccaaggaaccttccccagtccctcccctccccagcattctcctagcagaattacattttaattttcagctgaatggatgaagaaccattccaacacctctgtgtcacccacagttgtctaaaacacacaaacaaaaaaaagtctgggtcagcagaggggagaccatggtcactctccttgtcaaccttccctttgcccattctttgttttctcttccctccacctctgttcctctgaaacctcttttgttcaaatcaaggggaaggtaattcagaggtgctgttgagactggtttgctttttaattttttttttcaaagaagacgggaagttcctgttttttggaaaggttgttcatttccaaagaagttacacagccagtcagctataggatgattcctggctgcattttttcggggtagtacacaatacaaaaaaataagtcaatgagagagagagagtcagtcagtgaacacaaagggagatgttataataggcttttgttggtacttgcattttcttgttgaaaaacagagcaaagaccccgaggtgctgaggtgtggacagaagcctgatgttatcaggcccccagaaatcctgcctgcagtccagtggcaggcaggatccagaactggaaaagacggaggcaactggtcctgctcagcacaaacggtgcttttagtctttcgtaaacagcctgtgccccagggctcaaatccttcaaaagtttgcctgggtaattgcatttcattgctgtctggcatgtgctcatcagtctaatctggaggttcagacagccaggccaaagcttgcgagactggaggagagcgagcctgtgaatttaatccacttgaaagacagaataatacaagtgcatctaactcattattttaagtgatgctagtcgaaaaggggatggtgctttccataaaagcatttaaaatcagcacgctgcagttgcagccacttggcagtttaaggccattagaagaaaaggcgcacacaggtgacagtgtgatccctgtcgccgtctgcttgtccctgaaagccttcctcctccccacgaccacctcaaaacacagaaggcaaaaggaatggtaacttccatccctaattttgactttgggttatttgtacatttacagcaacagacaccaacttttatttgagatttggggtcattttggcatcgtttcagggtggagagaagacataaatgaagttaggacttcccagtccatctcaccaagctcaggatctcacagagctataagcaggcaaaggtgttccccaccagaaccatctggacaatgtgctttccagtgacttctttttttttgaggtttagctaggtctttttgttctgtcagtacatggtaactagattgatgggagggttatagtttctaactatcatgtagttaaagcagtagtctacaaagagccagaaggtctgtccctgctctgttgctatctgctgtggagaatagggggagtcccttcaccattccgcactgcagctttctctgagatggggctggcatggttgtctctgctgtctcggaggttgctttctgctctatcattccataagacattagaatgaaaccttaagtaatgttgacggtgatttgcgtcattatctagttacatgtgactcatgcccaggaagcccaggagaggcaagtgctagcctgtaccctcccagatggcaaagccgacggtcagctcaggagcagtcttgttggtagttcacacctgcagctcacccagggctcaacatgccagctctaagtctgggtgccaggccatgagactgagagagcagtcgccttaaaccttacatggggatggagtttccccctgggtgcatcatgactgcagccacccaggattctcacaagggctccagaaagtgctcaccacacacctcatctcctcatacccctcagttcatttgtactgtgcccaggggacaatgctgtgttagctttccccgatcctgaagagcacctctagaagtcacatcttccgtcttgtcatcatggtagctgaaaccattgtggcagtgtgtgctttccctgagcaaggttttctttgacactttagggcacgcttgatcttgtgggcaggatcattctctgttgtaggggccatcctgtgcattgtaggatgttgagcagcattcctggcctccacgtactagatgacagtagcactcccccttcctcagttgtggcaaccaaaaatgtctccagacattgccagaaatcccctggaggagaaatcacccgtttgatgatcgctatttaagagtaattgggaaattcacaaggatcttctagtcaatatacacaggatctcaatgcctgaaaaaaatgtgagttacttagctatctaaacttggtagtaagtcaattttgacccttcagttctgtaggtcctagcattcctgtcttccataggtcatccctcttgttgagcaagagtttcatagttgtctgctatctcaacctctacatttaatttttttaaaaaaaattactccattttagcccaagtatatggcttctatgagaaagccttccttggccttgtaaatcaaagcagttctctggagggaggtttcccactgctgggctgagtatcatctttctcagggtgacctcatctattgaagtatgaaggttgtatttgaaatgccatttactttctctaagtcaataaacgaagctgtggatctgtagatcatcagaggtctgcttattaccaagcggttttgtgtgtgtcattttttaaatcgagatctgtgttggagtttaaaagaattctggcagatttccatttgcctttctgaatcagagtttggggtgagcgagtgtagattgcccctagatgaatctgactttattagtttgtgtcctttgttcagagcaccagggatgagcttatgaaagcacaaatggctcttatcttcaagtgtttcctttatgctgcaaattccacctcaccaacctgtgttattaacccactgcaatcccaattagttcacatcaaggtcaactctttggggtgtgcaaaatggctgcaaacttaagtgaacaaattccccttgtgtagctctcacatgaaggtgggggagaagactgcagcaggggaacttagaagaaagagggagttttctgataccatagaagaaagtgatagtgattccccttggctcacaagccaaagaaatccaattattccaaataattcaaaacttgcataggaacttgtcaccaaatgagggaacattttagcctcttattcactctgttgcttggtggcaaatatttaagaaatttcaaaaaatagagaggtgcaagagagctatttctcaggggcatggaggtttcttgggggcatttctcgggggtatagagggctgtttcttggaggctatttctgtgcatggagaagccttgagtttcagaggtataataaacactactcctccagaaatatgtctgtgaaaaataagctggagcgggtgggtctgcaggacactgtgtttaggaatgaaggctgcctgtcctgccatctctcaggagctcccatcagaacagacagtaaagacaggaatggcatgtctccagttgtggggcaaggcccctcctagtgtgaagaaaatatacttcctggatctatcattatctctagcatatcagaggggggaataaaaacaactggggtggcaaggccctgctgaaagagaaactcattgttctgcacattcagagacttcctagttgtaaagccgttcagagctcttggaggtgaaggggcagccagggaatcacatagagtgaaagacctgtgtgcagcggccaggtcagagggcgtgtagaagacgacatgaagcattcccacagggcagttccctgaggttctgtcctccagctcttgctgcaaggaattctagaagccttggcctgatgtgtgggaaaggaaaacaaggtgaagaggatgcaggtaggaaaagaagagctgtgacaaggtagtcagatgggaggactgcatgagaaaaacagaggaagagagcacagaagcagccctttgatttcactcgcgtttattgaaggggacgaggcacttccacttggggaattctacttccctttgtcaggatatccttcaaattgggagcatggaatggaagctcttaaagaaagaacggttgccattcattgtgggtcacacttcacaagacaaagagcagtgaatcctcgatttgtaaaatgcagctttcagaatctgtgttgtggctggcacggtgcaacactgctgtgaggccctgacgcagctgtgttctgcagggtggctatggtgctccttgtgaaggaggaggctgctgctctgcaggaggaagggcttatgttgcatcctagcggtgcatgctaccccgctggaatagtgcaccttggaactctggctgcctaaggaaggtctcatttctggtggctttgtgagaccaagcctctccctcttctgttacctggagcaacaaccagctaagccaacagtactctccagacactgttatcctttcctggaagggcaggggagagaagactgtttcctgccttcaaggtgccagctactgcattgacaatatcgggcagaggggcacatttcaccctcccaggaatctaagggacagatgcaataacatctccttatggggggaaactgagtctccaaggcattaagttacttgcttcagcacactgtgagtgaggggccaagctagggtctctgtccttacctctcagactgcagaactatgcccttattgtatccttactgaagcccttttggcttttagagagacagctctgggatgaggttcccaaatcctgaaaatgtttggggccagaacaaacaaaagcatctttatgttaagccatatttcatgtttattgttttgaattctccttttcccccattcatatgagtttttcttctgattttattagaatgccatgcctcagagtttgctgcttaaaaccagaatccctggcataaaatccaataagcctgccttagggcccatgtcatatggaagcagaagacaacagagactgcttgctgggcttcaagccactctagaatttttcaaacagttctaacattttacaacatcaaaaaagtgccaaagtaaaaactaaggctgcagctaggagaatgcccactgagaaacccgtggttgggtttgtgtagagaggaaggcttttgagatcactgctccatgccccctcggcctctcccaccagaggtctggctcagggacagcacttgggcacagagagctggggcagtggcagagatggatggggtagtcaccagaggaagcccaggctgcaaactggcatgacacacacctgtgtggaacagatctccatctgagctgggctcaaaagcatcgtattctccaatatcgacaactcataggttagggggttcatcattttgtagcctctgcagtcccagacgtaaagtcacttctttttttttcttgcgtgctgacaccctaaggcattacatggaccctggcaaatctcagccatgttacttaacatgatctgccccagcgacagctcttaactgtatctgtttagccagagatatcacaggtgcctctctaggaaatcccaccggcccctcatcagcacagtggagattggctgtaaagcacggccttccatgcccagcctggactgcaggttggagatgacagtctcccaacccaggccttccaagcatagactatcaagcgtgcacaatcctcttgatatcaggtgccacctcaatggagtgttcttcagaaaattctgtttctttagctgtgtgcagtcctgggagatgctgtgcctcttctgcttgaagcttcccagctcccacttgaggtgtcagtgatttgttttactggagtgagtatcctcattctccaccaagggtccagtctcaggatggaggctgcttgagatatcccagccctcaacacaatatttctggctcatgtttttcaaggaactaagcggggcaaaggtgccagaggagtagaagggagcagaaagttgtctttaccctcctggagaagaaggacatggaggagtggaaggaaataaatagggtggccatagaagaatctaaacatccatgatgtgctggtgttgcaggaatgtacccaacctgtctgtagagctccttcaggcctggaaagttgtatacggggggcagaggtgcagaaagtgcacagtgcagaagatccttatggaaaagatgtctgcaacaaatgtttatttaacaaagtacagagaaagaatctgtctgcaagggaggaggcagcagaaaccagaaggtgccttctgttccctctgaactatggtccctccagctgtgtgcactgaaggccactctccctctgcctcagggacacgatgccaactgagaatgagacatgttctaaaaacacccatcttttctggaagctagtgacctatccttgaaccctccctccaaaagcactctgcctaaatacgtagccctttcccagacgtgtctcagactcatctggctgagggtagcagcctcgtggtgcagggtgaactgtttcccctgggaaccgtctgacagtgctaatgaggaattgcattttgcgtttatagagcacctttcatctgtggatctcaaagctgccccacaaacattaattaactctcacacctgtgaggcaagtgagcctggttacccccatttttagaggtgaggaaacagaggtttgaaaagaaaaggactccagggtgaaccagcagggttgggggcggcctgatgtgaggaaccagcattcttgattcacagggccctgaccacaaagccacaaagcttccccggcgaggtgatgaatacgggtcccggaagcagggagtggtggagaggcggacacagggctcccttcttccttcccgcaggcagcctgccacctcccaggctggcaggtcggcagtgaggatgggatccctcaaaacctgaggcctttaaaacagcatacccaggcagggttctgccccggcttggtctgtctgcttctcttcaaagtaattgctggaacaacgaatgcatctgagctacacatgactaaccaagatgtctgcagccggccagagacgaacggttggcaaatcctggagctgtttcacaacctcccttttttccaggatccagagctggtgctgactgactcatgttatcatgggatttcaatgatatagcaacagtgtgctgagccggtgtctgctacctgggggtacctgtagtaggaataggtgactgctcttcttacttgtgctgtgccggagctttgctccctgctgcagaggccagaggaaacactgcttctcaaagacagtggaactttcagggaaatgtccctttcagagcagagtcacccacccccagggactctgaaaggcccctgacatcacacacctctgacagatgtgatgctgggaagcatctggggtcaccccctttgtctgcaaggggagcctaggcctttcttcccaggggtcccagacagtgagatgcaaaccaccactggggctcgccctaacacatcaccctggaaactgactcacatctctgagtcctgagtcacatcctgttgtgtgttctgaggtctccaagagggcattacaccagctccccatgactgaggtgaatctggagggaaccctgggaacgtccctaccttcctccaggatgaaggagggaaaaaattcctccagggaaataaccagggctgcccctagggtttatatgttcaccaagctgatttgcctttttcaaaaatagatggtagaaccctgtggtctatgtgacttttatttttaaatagctctgagagatgactgaaagacctggcgttttaaagatgtcagccacacaatcaaggaaggggctttctaactataaccttctccaagcccaggatgaagggtgccaccgctcaaggggtgctgttggaaacccagcttctgagggtgggtgtttaaaagaccctagagtggacagtcagaggagggccgggaggggtctctatccatcttctcccagcgcctgtggggagcacgaggacaaagagggatgttttgaacttttcaaagaacaagatattttgttctattgattttgtctattattttcctgtacttaatttcactggttcctagtctaatttttattatttcttctcttctgcttgcttgaggtctgtattgctattttctccagtctcctgaggtggaagcttcagtgactgattctggatctttcttttctaatatatgtattcaatgctataaatttccctctaagtactgttctatctgcatccaaaaattgtaataagttgtattttcatttagttcaaaacattttttaatttctcttgagactttttatttgactcatgtctaatgtagaagtatgttgtttaatctccaaatatttggagattttccagttatctattattggctttttaatttaaatccatgtggtctgagaaaatactttgtatgctttctatacttttaaggatcttaaagtgtgttttgtggcccagaatatggcttatcttggtgaatcttccatgtgagctgaagaatgtgtattctgctgttgttagagtattccataaatgttaattagatcaagttgactggtagtgccgtttaggtcaactgtgtcttaattttctgcctgcttgatgtatcaattactgaaagagggttgttgaagtctccaattgtaatagcgtatttacctatttctccgtgtagttctatcagtttttgcctcatgttttttgacactcagtttttaggtggacatatattaaagatgctgtcttcttagagaattcacccacattatcatcatgtaattcccttctttatccctgaaaattgtccttcctctgaagtcagctttgtataaaattaacatcgctgctctggctttctttcaatcagtgttagcatggtgtacctttttccatccctttacttgtaatctgtataaatatttttatttaaaataggtcccttgtagacaatatgtagttgggtcttgtctttaatccacactgccaatctctgtctttaaattggtgcatttagagtattcatatttaacctaagtattaatataactgcagtagtatcaatcatatttataacttttatatttgttgcacctgattcttccccccacacctctttttctaccttttataggtttaactgaacattttatatgattccattttatctcctctgttagcatattaatcattctttttaaaaatgtttttagttactgccctaaagtttgaaaagtacatgtataactaatctacatctagcatcaaataactaccacttcttccttcctgtttatatcattactgccttttatttcatttatccacatgctataatcactcaatactttgttactattattgtaaacagttatctttcagatcagttaagaaaaataaaacttaattttaccttaatatagtacttttctaatgctcttccttttttatgcagttctttttgacatttctcatagggcaggtcagctggcaatgaattattccagttttgtttgtcagaaaatatccttatttctttgaatttgaaggataattttgctgaatgcagaataatagtttggtagcttttttgttgcaacacttcatgtattctcctttctttgtgtttgcatggtttctgaagagaaagataatgtaattcttatcctttttcctctatggataaggtgttggcttttccccctctctagcttctttcaagattttctcttctctttggttttttgcagtttaaatatgatatgcctgggtgtagatttggtatttattatgcttggtgttctctgagctttctggatctgtggtttggtatctgtcattaattttggaaaattcatagccattaatacttcaagtatttcttccactgttttctttttcttctccatctggtattccaattacacattacatcttttgaaactttctcacagttcttggatgttctttctttttcctctttatctttttgtttggtaagtttctgtatcttcaagttcattggttctttgctttgtcatgttctgtctactaagtaagccattcctcatttctgttagggtgcttttggtttttagaatttgcttttgagtgttaagagtttcaggctgggcacggtggctcatgcctgtaatcccagcactttggaaggccgaagtgggtggatcacctggggtcaggagttcgagaccaacctagccaacatggtgaaaccctgtctctaccaaaaattacaaaaaaaaagaaaaaatagctgggcgtggtggcaggtgcctgtaatcccagctactcgggaggctgaggaggagaatcacttgaacccaggaggcggaggttgcagtaagccaagattgcgccactgcactccagtgtgggcgacagagcgagacactgtctcaaaaaaaaaaaaaaaaaagtttccatctccctgcctacatcatccatctcttcttgcaccttgtcttctttttccactagagccattaacatgttaatcattgttaaattccctgtcttgtaattccaaaatctgtgtcacatctgggtctggttctgatgcttgctttatctcttcagactgtgtttttttcttgcctttcttgtaattttttattgaaagtttaacatgatttatcaggcaataggaacttagtaggcctttagcgtgagttattattctcatgtacccaagagttgggctgtatttaatgttttcagaaggtaccagagacttcaaattcctctagcgtccttgtttttgtctcccatgtcatctgtgagcttctctatgaactcctccttagtcagtatgttgaagctctttcagccataacccactgttataataatatattggatcctgtgagaatctggtggagttcctgaatgaaaaacccacaacagtgcacttcctcctgaaactgtagcccctaggagtgtcttattcgcacactagtctgtactgagcctctagcaatctgtcaaaatcaccattaagtgttctcatcagtttatgaattcagaaattctgctcccagcaagcagacctcactatgattctctatatttgcctgcttctcaaaatttggggttgcagtttgccctgcaacttcagctttccattggacttaagaaaagtcatggattttcagtttgttcagcattttttcttataaaaacaagagtgatgactctcaagctctttaaattttggaactgaaactagaagcaacaggacattctgacatgaattatttaaaagggtcattgttgactctagagacattttaatattgctgcatcaaaagataaaagcattctcctttcttcttgtgtgatatatgccgtgtacacctctgagctcaccactaacctcaactctaccttatccctaacttcccatttcaaatggaagggaatggggatcaaggagtagaaggcctgttttacccattattgatgattaaaaagctgaaaataacccatcacaaaatggcctcagtaaagtggctgcatcagacatcatttagcctggaaaaccagtatgcataaaggctcaaatttaaatttttgaatccagtgttttttatttattattatttttttttttctgagacggagtctggctctgtcacctaggctggagtgcagtggcacgatcttggctcactgcaagctccacctcctgggttcatgccattctcctgcctcagcctcccgagtagctgggactacaggcgcccgccaccatgcccggctaattttttgtatttttagtagagacagggtttcaccgtgttagcgaggatggtctcgatctcctaacctcatgatccacccgcctcggcctcccaaagtgctgggattacaggtatgagccactgcgcccggccctgaatccagtattttttaatagaaacatgagttggttgagatactgagttcctgccttctccatcctaatcccaaatttccaatctttggaaatttgcccctttaccatttaatctcctgagcccagctcctctccagcctgaagagtgtgtctgtcaagactgtagctgtgaacaaaacactattacttgagccttatcctggagcaaatgtgtgtggtctcaccaatgaacatcagataagtcccttggcatggatttcttttcctttttagtaatacaatcataaaggttattcagacttattgagcatttactatggccagaaattgtgatacttgctttccatatagtttatctcacttactcctattaccctttgaagtcagaattctaactatgaatcagagaaaataagtgacctgcctaaggtcatccagttggtttatggtgaaggcaggatgcaaactgaaatttgtctgtgatttgagttcggtgctttccctagtctcctcctctcagaggcagaacataagcatgtaatagataccactagggttcttgtttctaccttgggaacagctgtttgcaagtccaaattaggcagctaatctagcagttagcccagatacagcccttgggcaccctagtagctgtaacttccagaaggcaggaaccttccattcactagtgagtccccaaaacagtggcccaagtgaagcaaaaatgtttgttggaaatatgagtgaatgaaaaagtaatttcatgaacacatgaatgaataaatgaatgaagcaacacccagtatgatgattaatgccacaggaagatgcctttccaagcatcacaagatcctgggatcttcactgactgtaagtgcctgtggggcagggaccatgttggtcttattcatcactctcctgccaggtaaattagcacattcctggcacactgtaaatgttcaataagcttttgttcttttagatggattgacttatcagaggcaactctttcaagaacaagtagccctgtgctctggagaatgatttacagtggttctcttcctcagcctggggccttttctggataactcccatcgtactctcctctacttcctcttcctagaatacacaaatttattattacaggcaccactcttcaccccacatctgattc

SEQ ID NO: 107 - DNA, 3225 bp, Homo sapiens
gcgggcgcgggcgggacgggcgccccgcggccggacccagccagggcaccacgctgcccggccctgcgccgccaggcacttctttccggggctcctagggacgccagaaggaagtcaacctctgctgcttctccttggcctgcgttggaccttcctttttttgttgtttttttttgtttttcccctttcttccttttgaattaactggcttcttggctggatgttttcaacttctttcctggctgcgaacttttccccaattgttttccttttacaacagggggagaaagtgctctgtggtccgaggcgagccgtgaagttgcgtgtgcgtggcagtgtgcgtggcaggatgtgcgtgcgtgtgtaacccgagccgcccgatctgtttcgatctgcgccgcggagccctccctcaaggcccgctccacctgctgcggttacgcggcgctcgtgggtgttcgtgcctcggagcagctaaccggcgggtgctgggcgacggtggaggagtatcgtctcgctgctgcccgagtcagggctgagtcacccagctgatgtagacagtggctgccttccgaagagtgcgtgtttgcatgtgtgtgactctgcggctgctcaactcccaacaaaccagaggaccagccacaaacttaaccaacatccccaaacccgagttcacagatgtgggagagctgtagaaccctgagtgtcatcgactgggccttcttatgattgttgttttaagattagctgaagatctctgaaacgctgaattttctgcactgagcgttttgacagaattcattgagagaacagagaacatgacaagtacttctagctcagcactgctccaactactgaagctgattttcaaggctacttaaaaaaatctgcagcgtacattaatggatttctgttgtgtttaaattctccacagattgtattgtaaatattttatgaagtagagcatatgtatatatttatatatacgtgcacatacattagtagcactacctttggaagtctcagctcttgcttttcgggactgaagccagttttgcatgataaaagtggccttgttacgggagataattgtgttctgttgggactttagacaaaactcacctgcaaaaaactgacaggcattaactactggaacttccaaataatgtgtttgctgatcgttttactcttcgcataaatattttaggaagtgtatgagaattttgccttcaggaacttttctaacagccaaagacagaacttaacctctgcaagcaagattcgtggaagatagtctccactttttaatgcactaagcaatcggttgctaggagcccatcctgggtcagaggccgatccgcagaaccagaacgttttcccctcctggactgttagtaacttagtctccctcctcccctaaccacccccgcccccccccaccccccgcagtaataaaggcccctgaacgtgtatgttggtctcccgggagctgcttgctgaagatccgcgcccctgtcgccgtctggtaggagctgtttgcagggtcctaactcaatcggcttgttgtgatgcgtatccccgtagatgccagcacgagccgccgcttcacgccgccttccaccgcgctgagcccaggcaagatgagcgaggcgttgccgctgggcgccccggacgccggcgctgccctggccggcaagctgaggagcggcgaccgcagcatggtggaggtgctggccgaccacccgggcgagctggtgcgcaccgacagccccaacttcctctgctccgtgctgcctacgcactggcgctgcaacaagaccctgcccatcgctttcaaggtggtggccctaggggatgttccagatggcactctggtcactgtgatggctggcaatgatgaaaactactcggctgagctgagaaatgctaccgcagccatgaagaaccaggttgcaagatttaatgacctcaggtttgtcggtcgaagtggaagagggaaaagcttcactctgaccatcactgtcttcacaaacccaccgcaagtcgccacctaccacagagccatcaaaatcacagtggatgggccccgagaacctcgaagacatcggcagaaactagatgatcagaccaagcccgggagcttgtccttttccgagcggctcagtgaactggagcagctgcggcgcacagccatgagggtcagcccacaccacccagcccccacgcccaaccctcgtgcctccctgaaccactccactgcctttaaccctcagcctcagagtcagatgcaggatacaaggcagatccaaccatccccaccgtggtcctacgatcagtcctaccaatacctgggatccattgcctctccttctgtgcacccagcaacgcccatttcacctggacgtgccagcggcatgacaaccctctctgcagaactttccagtcgactctcaacggcacccgacctgacagcgttcagcgacccgcgccagttccccgcgctgccctccatctccgacccccgcatgcactatccaggcgccttcacctactccccgacgccggtcacctcgggcatcggcatcggcatgtcggccatgggctcggccacgcgctaccacacctacctgccgccgccctaccccggttcgtcgcaagcgcagggaggcccgttccaagccagctcgccctcctaccacctgtactacggcgcctcggccggctcctaccagttctccatggtgggcggggagcgctcgccgccgcgcatcctgccgccctgcaccaacgcctccaccggctccgcgctgctcaaccccagcctcccgaaccagagcgacgtggtggaggccgagggcagacacagaaactcccccaccaacatggggggggcctcctgttcgcgacaagcccgccgggatcccgggccctgggcccggacaccgtcctggggccgagggcgcccgacggacaggatctcgctgtaggtcaggcccgcgcagcctcctgcgcccagaagcccacgccgccgccgtctgctggcgccccggccctcgcggaggtgtccgaggcgacgcacctcgagggtgtccgccggccccagcacccaggggacgcgctggaaagcaaacaggaagattcccggagggaaactgtgaatgcttctgatttagcaatgctgtgaataaaaagaaagattttatacccttgagaaaaaaaaaaaaa

SEQ ID NO: 108 - DNA, 1419 bp, Homo sapiens
atgcgtatccccgtagatgccagcacgagccgccgcttcacgccgccttccaccgcgctgagcccaggcaagatgagcgaggcgttgccgctgggcgccccggacgccggcgctgccctggccggcaagctgaggagcggcgaccgcagcatggtggaggtgctggccgaccacccgggcgagctggtgcgcaccgacagccccaacttcctctgctccgtgctgcctacgcactggcgctgcaacaagaccctgcccatcgctttcaaggtggtggccctaggggatgttccagatggcactctggtcactgtgatggctggcaatgatgaaaactactcggctgagctgagaaatgctaccgcagccatgaagaaccaggttgcaagatttaatgacctcaggtttgtcggtcgaagtggaagagggaaaagcttcactctgaccatcactgtcttcacaaacccaccgcaagtcgccacctaccacagagccatcaaaatcacagtggatgggccccgagaacctcgaagacatcggcagaaactagatgatcagaccaagcccgggagcttgtccttttccgagcggctcagtgaactggagcagctgcggcgcacagccatgagggtcagcccacaccacccagcccccacgcccaaccctcgtgcctccctgaaccactccactgcctttaaccctcagcctcagagtcagatgcaggatacaaggcagatccaaccatccccaccgtggtcctacgatcagtcctaccaatacctgggatccattgcctctccttctgtgcacccagcaacgcccatttcacctggacgtgccagcggcatgacaaccctctctgcagaactttccagtcgactctcaacggcacccgacctgacagcgttcagcgacccgcgccagttccccgcgctgccctccatctccgacccccgcatgcactatccaggcgccttcacctactccccgacgccggtcacctcgggcatcggcatcggcatgtcggccatgggctcggccacgcgctaccacacctacctgccgccgccctaccccggttcgtcgcaagcgcagggaggcccgttccaagccagctcgccctcctaccacctgtactacggcgcctcggccggctcctaccagttctccatggtgggcggggagcgctcgccgccgcgcatcctgccgccctgcaccaacgcctccaccggctccgcgctgctcaaccccagcctcccgaaccagagcgacgtggtggaggccgagggcagacacagaaactcccccaccaacatggggggggcctcctgttcgcgacaagcccgccgggatcccgggccctgggcccggacaccgtcctggggccgagggcgcccgacggacaggatctcgctgtag

SEQ ID NO: 109 - DNA, 65787 bp, Mus musculus
  misc_feature (1352)..(1371): "n" at positions 1352 to 1371  can be any base
  misc_feature (5406)..(7204): "n" at positions 5406 to 7204  can be any base
  misc_feature (19611)..(19769): "n" at positions 19611 to 19769  can be any base
  misc_feature (34373)..(35238): "n" at positions 34373 to 35238  can be any base
  misc_feature (44209)..(44263): "n" at positions 44209 to 44263  can be any base
  misc_feature (52248)..(52317): "n" at positions 52248 to 52317  can be any base
  misc_feature (63871)..(64442): "n" at positions 63871 to 64442  can be any base
  misc_feature (65333)..(65526): "n" at positions 65333 to 65526  can be any base
taatgattaataataataataataataataataataataagaagaagaagaagaagaagaagaatgagagaccttggaacactcagccccttgttgtgcatggaacccagtagaagaagtgggaagaatgtgagagccagaggggatggaggccatcaaaaaaacacaatcttctaaatcaacatgagcaaagcacctatgaagagtgaagcaggactggagagatggctcagtggttaaaagcactgactgttcttgcaaaggtcctgagttcaagtctcagcaaccacatggtggctcacaaccatctgtaacaagatatgatgcctttctcgtgtgtctaaagacaactacttacacataatcaatcaatcaatcaatcaatcaatctttgggctggagcaagaggggccggagtgagcagaggtcctgagttcggttcccggcaaccacatgaaggctcacaactgtctgtacagctacagtgtactcacatacacaaaataaataaataaatctttagaaaagagagtgaagcaacatgcacagggcctgcatgggtctacaccaggtcctttgcatgtatattatggcttccagtttagggtttttaaaggattccaaaatgtgtgaacaaggtggacttgattcttgtaccttctcttgggctcttttccttctgtctgttttgtctaaatccaatgtgttagttttttgtatagttaaggttatagttagagtagcataccatagcatgtccttcagaagcctatttgttttctaatgagagacagaaaaggagtagatctgggagggaagggataggaaggggactgggaggagtagagggagggaaaccataatcagggtatattatatgatggaaaaatctattttcaataaaaggaaataactttaaagaaagataattagggagtaaatatgatcaggtgaatatatgaatgtctgaaaatgtcataatgaaatacatgactgtacactaactttttaaaaaaaggagtgatcttgggactacagactcttcaaagataaccaaaaaaaaaaaaaaaaaaagagagaggaggctgttgagcggaatagtgattgaacaggaagtgtaggggaaaaagtggggaagccatgttgaagagggtagtctaaggcagatttctttgggaagatttgcctggaattaatagatgagactggaggaggtgtgagggctggctcagtagctaggcacttgcttagcatgtgccaggccctgctttaaataccagcaccggaaaaaaaaaacataaaggattgcagaatgtttgagtcaatgatgtcagtcggaaagctatagttannnnnnnnnnnnnnnnnnnnctatagttacatagacgtctagacaaaaggtgacacagacatgacttcaccttcctccccaaaccccacagactagtgcttcagaacctcacaatctttgcttccagcagtccctagaggtcaccagtgctggatcgagagattgagcgatatactattgtccacccttgagctagaaccacatcagaggaggtcagggagcctttcctgatacctacgtgccaaagacacaatagaaagtgggatcatggattggggggtgcatcagccaatgcagtacctgcagtaaaagcatgaagacctagctttggtgcccaacccaacattagtggtgccctataatcttattactaagaagacagacaggatctgatagccaagtagttgagtaaaacttggcaagtcccaggctcagtgagggaccgtgtctcaatctctgatgaagagtgattgaggaagaacctccaacaacaacttcctctggtccccagacacctgcaaacaccagcactcatgtgggtgcgcgcgtgcgcacacacacacacacatgcacaggtatgcacacacacatacactcatagccacacatacatacatatacatacaaacacacacatacacaaatgcagacacacacaaaaacagtcatgtatacatacaaacacacatacacacatacaggcatgtgtgtgcacacacatgtacattcatacacacataaacacacatgcacatgtgcacacacagccacacatgcatatacacagtcatgtgggcacacacacacacacatacacacacacacacacacacacacacacacacaaggaatctgtctacaagctagcataagctgcaaatgatagcaaagctgctgtttggttttcagtgtagggactgagtttgtgaatctgacaagctgttagtctcccagtactttattaggggagtaactcaccagtcagatgggcccctctggagctcagcatttgcacagaggacagctcctttgcgcatagtggattctggttttccacaggaccctgtctagtaaaacctagtggaaattacaagctgagaaattcagccttgtgccacaataacaggatgcacctgtagatttcacagaattagctgctgtcttctcttaacgccaatttgagagaaagaagcctgtttgtctgctgccaaacagggcagaatctcaagtattcccatatatctgcaaatgatggaagttatcaaccacagtgacactgtctttctagcggtcacttgacaaagacagggacttgcttgcctctcttttccaccatgctacccccttgttggctcctttgggacttacccatttggaatgtgatatagttaatagggacctgtctggccctgcctccccatctccatttgagagcaggaatccttttcaattcatttttgattacacagtctggcacagggcccactttctagatccttaactagtattttatggaattgaattctagaaaagtacatgaactgtgtaaaggtgacatcatgagcacttaaatagacatccaaacctatgtccacgcaataaagactccgtgccccataggctgacaaccacctctaactaacccagaaatgcagtaaatatataaatgatgagttccctgagctactagccatcctccaagaaaacaaaggcccctttcctcctcagctctctccttttcgactttcccttcctcacctccattttcttcccctctctttgcacctaccctttccagtcctctctcctacccctcctctctctattcttccttcctttcttctctcccctttctctccccttctcttctttccactcttctttcttccttctcttctctggttttcttctcctctctgcttttcctcgctctccctccacaccatgcccctctcctcctctctcttttcctcttctaattctgagaccacaaatgagcacatggctcttcagagagggaagtgaaaagacagagtgagggagcttttatgtggtgtcactcgggtaggacaggcaagtctgatagtgccaaggatccagtgagcaacagcttccctttttaagggctggtttctttttctccttgagtagattatgggcacagacaaggccttgacttctctacttcagagcccagtgtaagagcttgtgtagttgcaggtgctcagtcaacatgagctcatggcctgcttaacagaaatgaaacactttgacctgagtttcagttcttcctctctgtagacttctctgtagacttctctgtagacttctcaagacattgatagacaatgaatagacaggggtaaaggggagaagagaagagaggggcgagagagagacagagacagagagacagagacactgagagagacagagacagagagacacacacagagagagatcgtgatactctgaactgcacacctccctcttatgcctggtacacaaagaaagccgggctcagaattctaacacaccctcaaacccgattcaactccagaatgtataagaaaaagtaatttcatttaaaaagaacatctttgaggtgttgaaaaaaaagagttactgccacaaaaggaactataaacaattactgtcaaatgatttttaggattatttatttatttaattgagacaggatttcttggtgtagccttggctgccctgaaactcattctgtagaccaggctagcactgaactcagagatccacctgcctctgcccctggtattacaggcatgcgtcaccaccaacaccccccccccccatttttaaggatttctttcccttttttctttttaaagatttatttattgttatatgtaagtacactgtagctgtctccagacatgccagaagagggagtcagatctcatgacaggtggttgtgagccaccatgtggtttatgggatttgaactcaggacctttggaagagcagtcagtgctcttacctgctgagccattttgccagccccctttttaggatttcttttactctcttgattgtgcccccaaaattgccccagtctttctattccatcttgataccacatttctttttctttttctcttattaactcactttctatgagtatttatgtgtgtggagtgcacacatgtgtacatggttgcacatgtgtgtgtatctgagctccttggtgtgtgcacacatacacatgcatatttgacgtcggggtgtcttccttggtcacattctacttcatctttttgaggcaagtcttttgctgaacccagagttccactgatacagagtctagctagcctgctcattctggggatccctttcccatccgccaagtgttgccgtcaaaagcagccactgtgctgcgctttcccattggttttggaggtttgtagtccagtcttcacacctgtgtggccagtgctttatccactgagccatctcccagtccttcagcatcttttctagagcagcaattttctctctctttgcatctctagttgctgaagccttacctgccaggtcaaacatgtcagagaggcaaagagacagagaagttctgggaatcagggcttcacacttgctaacccaatacactgtctttgaactatgccccatcctgaactatgtcttaacaactgaaagtaatggtaaaataatccaactgatacctgtcttaaaagataaatatttatttttacttacttatttattattctatgatcattggtgttttgcctgtaagtatgtctgtgtgagtgtgccagaactcctggaactgaaagtatagatatttgtgagctgctatgtaggtgctggagattgaaccttggtcctttggaagagcagctagtacttttcatcactaagtcatttctccagaccaattatctttgttttttctatgtatgagtcttttgctgtgtgtatgtatacaaatgcatcgtgtgtgtgtgtgtgtgtatgtgtgtgtatgtgtgtgtgtgtatgtgtgtgtgtgtatgtgtgtnnnnnnnnnnnnnnnnnnnnnnnnnnnnnnnnnnnnnnnnnnnnnnnnnnnnnnnnnnnnnnnnnnnnnnnnnnnnnnnnnnnnnnnnnnnnnnnnnnnnnnnnnnnnnnnnnnnnnnnnnnnnnnnnnnnnnnnnnnnnnnnnnnnnnnnnnnnnnnnnnnnnnnnnnnnnnnnnnnnnnnnnnnnnnnnnnnnnnnnnnnnnnnnnnnnnnnnnnnnnnnnnnnnnnnnnnnnnnnnnnnnnnnnnnnnnnnnnnnnnnnnnnnnnnnnnnnnnnnnnnnnnnnnnnnnnnnnnnnnnnnnnnnnnnnnnnnnnnnnnnnnnnnnnnnnnnnnnnnnnnnnnnnnnnnnnnnnnnnnnnnnnnnnnnnnnnnnnnnnnnnnnnnnnnnnnnnnnnnnnnnnnnnnnnnnnnnnnnnnnnnnnnnnnnnnnnnnnnnnnnnnnnnnnnnnnnnnnnnnnnnnnnnnnnnnnnnnnnnnnnnnnnnnnnnnnnnnnnnnnnnnnnnnnnnnnnnnnnnnnnnnnnnnnnnnnnnnnnnnnnnnnnnnnnnnnnnnnnnnnnnnnnnnnnnnnnnnnnnnnnnnnnnnnnnnnnnnnnnnnnnnnnnnnnnnnnnnnnnnnnnnnnnnnnnnnnnnnnnnnnnnnnnnnnnnnnnnnnnnnnnnnnnnnnnnnnnnnnnnnnnnnnnnnnnnnnnnnnnnnnnnnnnnnnnnnnnnnnnnnnnnnnnnnnnnnnnnnnnnnnnnnnnnnnnnnnnnnnnnnnnnnnnnnnnnnnnnnnnnnnnnnnnnnnnnnnnnnnnnnnnnnnnnnnnnnnnnnnnnnnnnnnnnnnnnnnnnnnnnnnnnnnnnnnnnnnnnnnnnnnnnnnnnnnnnnnnnnnnnnnnnnnnnnnnnnnnnnnnnnnnnnnnnnnnnnnnnnnnnnnnnnnnnnnnnnnnnnnnnnnnnnnnnnnnnnnnnnnnnnnnnnnnnnnnnnnnnnnnnnnnnnnnnnnnnnnnnnnnnnnnnnnnnnnnnnnnnnnnnnnnnnnnnnnnnnnnnnnnnnnnnnnnnnnnnnnnnnnnnnnnnnnnnnnnnnnnnnnnnnnnnnnnnnnnnnnnnnnnnnnnnnnnnnnnnnnnnnnnnnnnnnnnnnnnnnnnnnnnnnnnnnnnnnnnnnnnnnnnnnnnnnnnnnnnnnnnnnnnnnnnnnnnnnnnnnnnnnnnnnnnnnnnnnnnnnnnnnnnnnnnnnnnnnnnnnnnnnnnnnnnnnnnnnnnnnnnnnnnnnnnnnnnnnnnnnnnnnnnnnnnnnnnnnnnnnnnnnnnnnnnnnnnnnnnnnnnnnnnnnnnnnnnnnnnnnnnnnnnnnnnnnnnnnnnnnnnnnnnnnnnnnnnnnnnnnnnnnnnnnnnnnnnnnnnnnnnnnnnnnnnnnnnnnnnnnnnnnnnnnnnnnnnnnnnnnnnnnnnnnnnnnnnnnnnnnnnnnnnnnnnnnnnnnnnnnnnnnnnnnnnnnnnnnnnnnnnnnnnnnnnnnnnnnnnnnnnnnnnnnnnnnnnnnnnnnnnnnnnnnnnnnnnnnnnnnnnnnnnnnnnnnnnnnnnnnnnnnnnnnnnnnnnnnnnnnnnnnnnnnnnnnnnnnnnnnnnnnnnnnnnnnnnnnnnnnnnnnnnnnnnnnnnnnnnnnnnnnnnnnnnnnnnnnnnnnnnnnnnnnnnnnnnnnnnnnnnnnnnnnnnnnnnnnnnnnnnnnnnnnnnnnnnnnnnnnnnnnnnnnnnnnnnnnnnnnnnnnnnnnnnnnnnnnnnnnnnnnnnnnnnnnnnnnnnnnnnnnnnnttagcaccagactgcatcataacacactgctcgtatgtactgtgatactgcacttcataagtgagtacaaacattatctttcaattcttttaaacaaagaatacgccgggcggtgtggcgcatgcctttaatcccagcacttgggaggcagaagcaggtggatttctgagttcgaggccagcctggtctacaaagtaagtgccaggacagccaggactatacagagaaaccctgtcttgaaaaaccaaaaaaaaccaaaaaaacaaaaaaacaaaacaaaaaaaaaaccaaactttgattctggaggtgtatcacttagcaacggagcatgtaccccattgatgggacatgtatcagtacatgtaagaccctgggctccaaccccagccacaaactaaacaacaacaaaaagcccaacttcttgaaaatgttaaaaaaaaatccttagtctttgattttcttttttaaatgagacattgggccttccagaaccagagaaaataagaggaatagaagacaaaacctcagtaataggatttaaaaacaaacagatgactagttctacaaaatacctttgttaaaacagtttacatgactattttaaactgacctaacaaaaaagtaatggaaatctaatcttggcatggtagcctatgcctttagtcccagcacttgagaggcagagggaatagatctctgtgagttcaaggtcagcttggtttgtctacataagaagtttcagggcaaccaaggcttcatagagagactatgtataatatgctaggccctcccccatcaattactagttaagaaaatgccctacagccagatcttagggaggcattttctcagttgaggttcccctctttcagataactccagcttgtgtaagattgacataaaactagccagcacattgtttcatcctgtttgaacatgtcctgtggctcagattctatccttcaaagtcttcctcgccatcaatccaactgacatctctaccctcacattcctttggcctcccagtcaactgtacttctagttagctgttgagcacagattatacctgaaggacctacctaaaaaggctacattcacccttcaaggacagcaacttatgtctttcctgaacatagtcatccataacgttctctttgctaagcgtctcccgctcttcttcatcatgatcactgggcaactaccaccttctactgttagaaagagcaaaggctcacctctaacctaagaggaggcaatctgggtcagatagttgatgcatgatatgatgtgcagtttcttctgagaagtaccagacatttctgataagagagttgagcaacttcctgatatgtgagactcagctttatacagttgaccaaccaaccaccagtcctgaaggaacattagtgacccttagacaaatgttccttaaattaatctattggggtcatctagcctacctttttccttccttaaaagtctttgccaggaaagaagtatttgaaatagacttagtggaaactacctatttccagcaggtttgaaacaaaacttggacatgtgctcacaagcatttgtctgaaatggcttgaaatgtatccttgttgtatattcacattcacatatctcaatgcatcatggttgaacacccatatgtgttatgaaatcagtgcttatttcaaaaatatattggatgtagcctgtctccagagcccacagtgtgatacctttatcctaagatcctcagactcttatgagttcaaagtgcctgtgacactcctgtaacactcctgtctataaatatactgattatatgctggcgtgcatttttccctcaagggaggaaattaagatttcaccagatcttatttgcaaaacaaaacagtcagcaactaggctagaagtaaaaagttatgtcaatagtgggtgaaaagacagcttggtgacactatgagagaaggcaaagggttctttctgaaaggcctcctgggagaagctagacttaaaatcttccattgcagctgtaaacacatctggacaatagtctgttttctgcatttgtgaatcccacacccatggaactatgaatcgtgcatcagagttatttaaaaccaccgtgcatggagtgaaccaataccgaggtgtttgcttatcattttcctttgagcacacagcacagccttgaactcagtgacactcctaagagggctctagggtcaggccaacttagatgagatgctagtctttagctaaagatgcccttccacccccgttgcacgaccttgcttctcagtctttgttgagtcttctgggggagaatccccctagaggactcagtttacaaaaccctaagtgagaccactgccaagaagtgcttgctcacccctcctgccgcggcagggaatccccctttccttgtacaggcaaaacacaaaaaaggactcataagtgaagcctgatccttctcaccaaacactgcccacacctcctagtaattgaacttgaaaaaaaaaactggtttgaaaaattaccgcaaaccatattgtcataaaaaaaaaaaaaaacacttcctatatgagatcacagaacagagtaggcacaagttcctgctgagcagatcagcctaatgcttaaatagaacaactcctggctgtcattgacattgtctaaaagccaagatgacagactgagaggcctgagcccttgttctggcattctcccaggaagatgcagtaaaggggttgacccaatatactgcagagaatttcatccagttccctcctccatcctgatcccatgtgccaggaagatggagccacgcttgctgatgttggggtttctctcattaaccatagtacccagttgtcgggcaggtaagagaccaggaactgccctgggaaccttgggaagactaacagaatcttggtaagcctacatctgctcagctatacaaccagagggaacaatgagatggaaaactttgaagagggagttgaatcatgggttctaactcttgtccagggtccactaggacctctttttgtgcctcagtggtccctaatctatcaacctttcttaaaatagcaggaaggaatttctcattcatagtcctttttaggtttcattcccagggatggtttggctttgctgtcttggaagtttcttgtaaatatcattttatggcaatttcagaaaacataaatatattcatttttcagagcatgactttcctctgcttctctgggtgtaacgtctgtgtgttttacataaatatgaattccatcatcatagattttgtcaggtatagttttaagaaataaaaaccatcaccaactcagacatcaaacaactcttcttaattgaggatgaattccctaataccattttttcttgctaatccagaaagagaagtgaggtttgtggaaatacatatatttcaagtctattagatagattatagatagatagatagatagatagatagatagatagatagatagatatgggactgtctcactatgtagtcttggggtgcttggaatttgccatgtaaactagtttggcctcaaactcataaagatctacctgcttctgtgcataaccccacactaggctgaaaatatattttttgaaagcctacagtttcatattcttaatttctaggaatttattcttaaatgaccccagaaaaatgtattaagaagagtaaaataaataacatatacacgaagcttgattgctgactgggggcaagtgatcacattgtgttgggtcacttgggagcatcttggctttggagttaagatgtttatgattttaggaagcttttattgtgtgatttctcccctaaaagtatctatccctcaatggtgtctttgtcaggttagttcaagtcagaacaaccaagtctttacagttatgtgtattctgtctctgaggaaaggctttcaagtaaacttgtgttatgagctgtggttgatttatataaagctcatttacttggttttgcaaaacatctgtccactacttcttatgcatgtgtatatggggaaatgacagcattacaggttggaacatgcctggagctacaggggtgtggggctgtcagagaagacttcatgaagatagcgtgtccattgagccctggagactggtaaatttccataaggaaagattttagatgagaaggcacatggatcaggaaatagaagagtctgaggagtcagtatatgtattctctgaatatggggctattggataaagaacagaaagataggaatggggccaaaggcattaaagctctggacaggaagctcaatccttttcttttcctgtgttgttggggatagaaatccaaggctttgagcacactaagcaagcactctaacgctgagctgcattcctagcccacaacttaaaatactttagttgtatttggtaggcaacagaaaactacttgaaaaatgtcagggaatgccatttatagagtacacttgataaatcagatgtatacattttattacaacttctaatcactttacagtgtgggtgtcatgaatcagtagaagtaaccccaaaatcagaatatcagtgttgcaaggctcacatcacttttgtattttctattggagacaagaccagaggtgattctggctgataatagaaagagatcaggtgcaaggagttatgtcaagaggcaacttggttcccagtgggaaacagaaagaaatggccagaggtcagcaagtagctcagaaactaacccagggcaagagatgatcttatttcaactttgtttatcgtccaggaagaatttagtttaagcaattaatggggctggagagatggctcattattggtttagagcactcattactcttgtgatgcgttgagaacccaggacccaagatggtggctcagaaccatctgtaactccagttccaggtgatctgacaacttcttctggcctccataggcaccgtacacatggcaaataggcatagatgtgggtcaaatgcatatacacgtaaaaataaataaatattaaactttaagaaagggtagaaaaataaacaaatctttctattccttgggggcaagaggtctttaatgaaataagacagactgtcaacagattcaatttctagctgattcataaggcagattttcattttgaaaatttccaaagccaccatttaaaattgtgatgtggtacaagggatgtattagtcaacccgggtgtttttagtctctgtatcactgggccttgggatgtggttaaaagagaattctccctgatgttgccaacacagcagcagctaactgaagccacctttcttagaactgtggaaactctgagctgtctcttgatcatttttcattctaggaattctgtaatcaaatccttatccctctagagtcagaagacagaaggtatggaaacatgttaaggtggtacgcatgtctagttatcccttctggtaaaggctactgcccacactagaagttccggtcttcagctccgttatgcttcccagtgccccgtcagtttcttcacagtgttagagctattgtgactttgttcatcatccaaaatagaccttggagacatgtggttttgctaagcactgggaatacttaataaagcaaacattacatttgtccctaagggtctaagatagcctgatatggaacttatgcctgtgcttgatttagcttggaacattgaaaaaacagtaatttatttcatccacttacatgtcatctggccatgctctgaaagaacagcttccgaatgctcaacacctccatcactgggtccctcccaaaggcagggatttttgtgttcatgtatgcatatgtgtatttttgtggctatgtgtgtagatgaatgtgtgtggaggccaaaggtcaacttaggtattaatcctcaggtgccattcacatgagttggttttcttattatttgggttttttattattgttgtctagagatggagtttcttgctggtctgggactacatggttaggctaagctggttggtcaagaatctgcctacttctgctttcttagggctgatactaaaggtatgcactgctgtaatatatacatacatacacacacacacatatatatacattatatatacatatacaatatatatagattaaatgtatcagtgttttgcctgcatgtttatatgcacaccacatgcctgcctggtgccctcagaggtcaaaagagggcattggctcaccttggactggaactatagagagttttcaactcccatgtgggtggtgggaagcaaacctgggtcctctgccaaagcaggtgctcttaacctctgagctatctttccagctgcataatgatttatgtgagcaccagggatcagaacagaggtcctcatatttatgaggtaagcactttatctactgagccatctccccagccctgaacatctctctctctctctctctctctctctctctctctctctctctctctctctctctctcaaaaactttgagaattctagatatttttgtgtaatttcttatggaaaccattcctgtggtagcactgagtgccatgaggataggctgcaccctgacatgttcatgtcaactctgctttccttactgtccaatgatggccgggcattttacagatagaggttgaattctcttaagaaatagtgtgccaccagtggtcagtgagaaatagagctaggaggcaaatgaaattttaaagatgtatagtatagaacaaggcacctaatgatgttagaaaaaccaaaggcaagacctagcaagtcacagctttcagcaaacttctctctgcaacaggagaaggttgttgcaaagatcttgaaatccccttacaattccatcattatacatcaagaattctggggggaaaaagacctactctctcctctcctctatctctctctctctctctctctctctctctctctctctgtctcacaaacacacacacacacacacacacactcactcacaagtcttttttatcctggggtacttttggaaacaagaaaagttcccaaccaaagatatgcccactaccatgtggattgaaaggtcaccgggtatcagcagacccaagcctgagagctgggttccaggttatttccccactctccagagtgcaacgctctgcactgcagcatgactactaattctgtactgctcgagttgtgggtgtagggtaaaaacaccactgtgtttcggtgaagtcttctcccgtttgatggcttgctatggggatttcttccttcaaactgtgttcatgtctcgaaaaaggagtgggaatttatctctttcttctctttgttttgagccattccctctgggggagggagggaagggagagtctttattcaatgcattacttcaaaaagttatagatcccagacctgagatgcctctgtggttaagagtgcatactacttttgcagtttggttcctagtacccatgctgggagacttaccctgcctatttgaatccaatgacctcttctgtcctgcatgtatggatagacacatacataaataagaccttgctgtcctggaaatcaacctgtagattagaacagccaccacctcagagctccacctgtctctgtcttctgagtgctgggcatgcaccacttctgcccagtgatcccaggcctcttgatgacttgattacatcttctgtatgcctttattctgattctcagaagtgatatctctttatccatgcagccagccattcatgcattaggattatagaggtggataaaggtacagtccttgttctccaacatgaagactaaacatctgctgattgattctgattaggaagactgctaagggaaaacttgcatctgccaatgagtcaacattctgttccctttccaaccctctgccacattttcaaggacatcacccatttgcagggaaaactacaactaagtgatctctgaagatgttgggtgttttctactctaatgttgctcacatcttttttggctagttgattttatggtcattctagattttgcctttatcaacaagacaacgcaggtctcaccgggagctgtctgtggaatcatgtttcccaaccccagcttcagttacaacatgcatctggaatggctgagacttcttcagaccagtgaagtcagactctcaggggagaagaaccagacgtaccaatgacattatttttatgtccccccaaacaatgaagatgcagtgaggaatgagatccgtctaatattgtagagaagtaatataatggaataatcctacagccgggcatggtgtacatcgctgtgacccttgcttgcacttgggtgattggtgcaggaagattttgagtttgaggccagcacagagctccacagtgaaactattttaaaaagaacgaacaagaagagaaggaagaggggaagggagaaagggagggaagggaagaagagaaacgcaaatggtttttcatgctggttaatttcattgcttcatttttattctttgaaaatagaggagaacttctcaaactttacaagactcctggggattttgttataaagcattctgttcggagagggattcggtagcttgaaattctgttcaaacaggctccaacacgagatgtgtgttgtcagtgcatgggcccagttctgagcagcaggctatcatgtaacaacaacaacaacaaaaaaatgcacactatgtaaccacacagaggtttcaactaaaatgggagacaacttcagagaagattaaatattgatcaaaggttgcacagtctatataacacagcctataaatattataagtggtcagaataaagagagcagcctactgcctgggtaattaaagatgatgctttgagaagggcttttggagaacctagctctgaatgatgcttaagaataacagagcattagccgggcaatggtggtgtacacctttaatcccagtacttaggaggcagaggcaggctgatttctgagttcgaggccagcctggtttacagagtaagttccaggacagtcagggctacacagagaagccctgtctcaagacaacaaaacaacaacaacaaaacaaaacaaaacaaaacaacagaaaatgttagaagacagtattgtgtgatgattctgccaaagctgtacacatgggccattatccgtttgcagagatgtgtgtctgaacaaaatgattttcaagtgcacagtgtttctctgataaaaattaatactttccccacataaaaaaaaaagctgaacatggtggcacatgtttgtaatcgcattgctgggaaaacagagatgggtagatcgctggggcttactggtctaccagccaaatcagtgagctctaggttgttgggaaaccatatcccaaaagaaaagatagatggtatacacactacacacacacacatatagtagtagtagtagtagtagtagtagtaataataataataataataataataataataataataatgataatgataatgataataataataatgattttgctcaggcataagactttgcatgttccccatcctacttaaatcctccagtgcccataggcattagttatctctagtagatttctttgacatgatgaattactgagtagccttgccagtaccacatgacaccctggatatagtcaaagaattttttagttttcttctacctctacatctgtgtttttaactatgatgcagtcctgttaacctcataccacaaggtcagaatcccatggcttctaacacgacagcctccttttaccctgccagttcactaggcttcaaccagcaactctcaaggtagcaccagacatcctacatgcaggaggctgaggctcacatgactggactaccaacagtaaacggtttcacccaaaagaagcactgtttttaaatttttatttatttatttatttatttatttatttattggtttaaattttttcttttcttatatgtatgggtgtatggatatttgacctgcatgtatatatgtgtactctgggcatgcttggtgccaaggaggccagaataaggtattggatcccctgaaactggaattatggaaagttgtgagccactatgtgggtcctgggacttgaactcaggtcctctgcaagagcagcaagtgttcttaagttgtgaggcttctctccagttccagaagaaacatttcaaacagtgatgatgatagcgagagcttatgctcactgtctacatgccatctcttagtattgtgttaaatcagtgtctcttggttcagttttcaaaataaggtagttgtgttgggcattgtggtctatgcctttatgttcaacacttgggaaacaaaggcagcagctctctacacagtgccagtctcctctacacagagcagtgttctcaacctaacactgcagccctctaatgcagttcctcacactgtggtgactccccaaccataaaattatttttgttgctacctcatagctgtaattttgctacttttatgaattttaatttaaatatctttttttcccaattgtcttagcaacccacaggttgagaattgctgacacagagagttccaagccagttagggccacatagtgagctctggaaataaaacaacataaaaagcagttcttattatcttccctttgcagttgaccaatggagtctttggtcagttaaatcagtagctggtgtaacacaactaggaagtctctagaatctgagtttacagaatctctacccaccatcctgagccatgaccaccttacacagcagctccacagtctacctgaatggccacctgttgaatctcttgtctttacttttgtgcatgtgtgtgtgtgtgtatacatatgcatgtatatacacatgtgtgtggaggtcagagcttcattcacacgacatcttcttttatcccttgaccttatctttttgagacactctctcactgaacctggagctcaccaattcagctagaccacctgctcaaaagctgcagtggtcttgtcttccccagccctctgctggggctacaaacatacatcatggtgctgggatttctacctggagggtagggaatccaagcctgagtcctcttgctctcccagacagttacacctcagcatagcctcagcctctttttttccccctgaatgtatgtagctcagggtggcttagaaattcatgaagtgattaaggctaatctcaaactcctgatcactccaccttacttacacgtctggagttcactctggtaggacctcctcaggaccctgctagtcttagatcctgtattctctgaatccttctgttaccttcaaagagcagcctggggtgttttccttgcatctgatagcatttcaaagaagtcacagcagcagagtctgggctagcaaccggcaaaacagaggaaattctgagcacctttggccatgagtcaccacaccttctgagcacctttggccatgagtcaccacaccttgttcaggaattgccatctctgcccacagaatcgcccactgttttctgtgtgggaccaaaatagatacctccttcataaactttgtgtgtgtgtgtgtgtgtgtgtgtgttctctctctctctctctctctctctctctctctctctctctcttggtaataaaaaacaaaagacaaagatgggtatgtgcttccaagggcagactaagaagccacttacaggtgagtgtgacaggtgagaggaaccgtggcaaggaacaccctaccctggtggcagagcttctcgatatttgtatgtctgctgctttgcttctcagttcattcatgatctattgagcaacttcacgcaaggttagagaggcagagatgaataagacccaactcttggcctccaggagcttcttgcttatgcggagagaatacccaagctaagggctgagatttaagtaagagcacagagctggtggacacacactccactgcccactcctcctgcaagaccgacacaccataagctaggaactgcttcccattatatgtacatgcagaagagagaagggctcacgctgttttgtcagtgtgagtgactagaattagaatccagcactttccattttgagtttagaacaatctgcagaggttttgtgcttgtttggctcagcaatacctttcagggacatctcaggtaggacgtactgggagtccttcagtaacagactgtttccacaggctcaggagtctctgaggcaccatctataggccaactctcacatgtctgagtacatttgaagatctcccaggtcctcaacatctatgacctcttcaaggaagaaaggaaaagggggagggagggcaggagggaaggnnnnnnnnnnnnnnnnnnnnnnnnnnnnnnnnnnnnnnnnnnnnnnnnnnnnnnnnnnnnnnnnnnnnnnnnnnnnnnnnnnnnnnnnnnnnnnnnnnnnnnnnnnnnnnnnnnnnnnnnnnnnnnnnnnnnnnnnnnnnnnnnnnnnnnnnnnnnnnnctaaggattgagcccagggttcaattcacactaaacaaaacactttacctctgagctgggtccccagttcttactatactgtataaagccgaaaagaaaagcagtgctttaaagatgtattaataaactataagaataatacataataaattgatatgtaaaaaaccacaatgtatatatgtaaatgagagcagccctaaaaccaaacaggcctgtgtccccagggaaaaggtcactttatcatgttgtggggaacggcaaaagaaatgtttctaaaagtttcttttgaagtccccgacatctatgctgacgtcagcctcttcctgcccagcgctctgaaagtttccagggagttttggggccagtgacttgacacagggttgtatgtttgacacttgctgactgtgggcaggttgtggtggctttccctgcctgccaagccccactcagctgagcatcagcatggtatgtgcttcctgtccccgtgctagtgacacctctctgttcagaccttgatttagaacaaaaaagaacctttgtgaagagaaaactccttatttaaaggaaagtaaaccgaacttttgagagtctttttagaataaaagggcgagtcctcaggagtcccgctggtacccctgaggggaggtgagccttgagggctcgctgctaggtttccctgtctggtcccagacatcactttccctttctaactgtctcctcagaggccgcttctggaggtaatttttagctgccaatgctgaggaactattggccagagcatgccaccctgcttcttagagaatacaactgccaccattgaaaacctaggctgtctaaccagtgagctcagggcgtccgcctgtctccacctcccttttcctcctgtgctgggatttgcatgtgcacagccatatagagtttatagagtgctggggatgtgaactcaggttctcatgcttctgtggcaaacccacgaaaccatctcccatccttagttttatatatttcactatacattcatattataatatacattatatattatataatatatattatataaaacatatgtaatatatattataatatataataccatggtattggcagtgcttagaataggtgccccagattttcgtaactttttctttgttttctgtttctcttctaatcttttttttttaagttggttattttatttttttacatttcaaatgttattccccttcctggtttcctctccgcagcccccacaatcccatccccctcctccctgcttctaggagggtggctaccccacccacccacccactcccacctcactgccctggtattccccttcactgggcatcaagcctttactggaccaaaggcctcccctcccattgatgccagataaggccatcctctgctacatatgcagctggagtcatgggtccctccatgtatgctctttggttgatggtttagtccctaagaactttgggaggtctggttggttgatcttgttgtttttcctatggagttgcaaaccccttcagctcctacagtccttgccctaacttttcccctggggcccctgggctcagtccaatggttggctgcaacttaaacagctgtcccacaccatggttacttctccagtctttaattgcatttgtttaacaatttattttaacaatttattttcttatgtaatatatgtgtgtgtgtgtatacatctatatatatatgagagaagagggcatcagaaaacagagggtatctgatccctttacaggttgtgagccaccatgtggtcgatgggaattgatttcaggacctctctggaagagcagccagggctcttaacagttgggccgtctctccagcttgtatttgtttgtttacttatgtattcatttacttatagacagggtccagctatgtatcctgaactgacttgcagtgtagctaggctggcctcaaactcatggtaatcacctctgtcagccttctgagttctgggactacacatgcaggggaaatcccacagatatccatttgaaacaagccctcacgattacaacttgcttctcagaaggctctgtcttttttcagaagactgtgggcgggatttaccaatttagcagtgctccgctaaaaatatggccccctcccaagaaatccgtttctaagatttgaggggaaaactgtctttagttttcagagaaagaggaggaatatttcttcccagacttttctctctctctctttcttttttaatctgataacactttaatttaaatcaagttgacattctgtggtaagtttgtggttaactctttcaagtgctgaagcttgttttctgaggtgactggagagttagaaaaagacaggcagcccaaccactgtactctgtaagcattacaggctcctggatgtgacaatctagaggccgctctgtgagacagagggcagttctcagctccttgcctgggtttctctttctaagagcaaattcctagtttctgtagacctactgtttgttgtttgtgtaactactgccaagaaggcacagggttttctccaaaatggtcttactagtgagtcacacattcctgccttatggaaacccaggctttgacgaagcctgagagaactgggcctcagaaacgtgtgtcagatgacaacaggactcacagacacaaaaggctaaccaccgttctgcaaatattgttatttcagtgtttcccctttaattttaagaaacttttctttaataatgacacacacacacacacacacacacacacacacacacatttttgacagggtctcactgtgaagccctggttgtcatggaactatcctggaactcattatagagaccaggctgggctagaactcagagatccacctgcctctgcctcccgagtgctgtgattaatggaatgtgccaccatgtctggctttcatgagtattctttcaatcatctttggattcatttcctgctattggcatggccatataattttccacctttaaacagagtcatatcaagagattttccactagtgaaccatccatcactgctgagataaattctaattgatcagaatattagtttttgtcatacctggctagaaccaagtacaaatattgtaatcgatattctgttgtctgtttttataagtgagatggtcttacggccattttctctgcagttcatcccaagtttaataggaagactaacataactctgtaaaaggaattagaatcattgaagtgtctgtgctggtctgaatgagaatagctgccataggctcatagatttgaatatttagtccccagtgagtggaatttccagtttgggaaggattaagaggggtgacctttattcagggttttgaaagactcatgtgatattccagggttgttttctctctctctctctctctctctctctctctctctctctctctctctctctctctctctctctttctctctctctctcatggctgtggacagagatctgagctgtaagctgttcctttactctaccatcatggattcaaactccctgaaaccatatgccaaattaaatgttttctttgtaagtcctggtaccctatctcagcaatggaaaagttaactaagatgccctctgaaacagtttgtattaagcatctgctacctatttcatatatttgttcacaagttgattttttcaaatgattggtttattaggtataattctcctctttcttcagcttctttctctctttctaagacaaaatgtcgccatgtacctcaggctgggcttgaactcacaatcctgctcatttttgagtttttggtggatcagtagttacacctcccttttcttcaaactgatgctctgttgttcttgctccttctagtcctgactattttcagaatctacttaaatgaatagtttttaatttggaggacattctctgctggttttttttttttcatcttggtcaatctttcatttacagttttgatctcctttctttaacattattccatggttttttaacttcctccagtaaatattaaatgggataatgcctgttctttgaacacgtattttcctttgaggttgtagacatccctggagaggctgtgctggctcagtactgcagggtttgtggttatcatttttgttgctattcggtgcagaatattttacagaatgagttctgagtttccctttgatccatggatttgtttggaagtttgaggtttcttttttaaaatgtgtgaagttttattgttgtttgtggtttcgctctctgtttttaacttttaatttcattgcgccatgattagaaaatgaatctgtgtgatgcttattctttgacacttgtggaaaccacctctggtgcctagtaggagctcagttctctttaccactgtcccatgcgtgataaagagagtgtacattgcctatgtattggtcacacaactacataaatatgcacaaatcaagcttactgacaactaacagaccttcttatagagtaaccttttcttattagtggtccttgcaacatcagtttgttttgtagtgagttctgggcttaattctagttgggttactttttgtggtttcccttggcttcctgagctgtatttggtagcatctgattggctgacctgcttttactataggattcccatgagtgtggtctctttgatagttcaggagttgtgttctagacactgcagtatgtgaaatgtattatctttggttattgccgtagagtctgtgttatgtaacttggaagagtgtagggtgatttacagcagtgcctcccttgtgtggagacagcacagtgtgttacctctttctgttgttacatccagtgttgagtcttcagccttgatcctaaccccactcactcccctgcatcttgggtcttttgtctccttcattattcatgttgagattttgtctaagtttgaggaggactaagtaatgaatggaatatggtataagttctctcatctgggatggaagtatatcttacctcctaccttgtgtgttcacagtgttgggcttgatctccagaatcaacaggaatgtcaatggttcagaagcaaatatgttctacaacatttatttgcgtttatacaataaaaccctactcaagtaacatctacaacaccaatgaccgtaagaaagtgaggagctaaaatcaaacacacagaagagatatataataatgaaagttacttatgcttataatatttctaattatacttataataattataagtatacttatacttaattatacttatgttaattctactttcattatttaattatttaattatttaattatttaactctactctctctataaaggcccgagttagattattaataaatacaactagataaaggagtgagaaaagactaatgatgggacacaaggcaaacttaacaggcaaagttaagcaagctgaagcttccctcttgcgtaggtgatgaagatgcctctttccccagcttctgttttcagagttcactgtgcttgtgtgtgtgtgtgtgtgtgtgtgtgtgtgtgtgtgtgtatgtgttatggcatgtgtttatgtttgtacatgtagtgtgtatttatgtggtgtgtgtgtgtgtgtgcgtgcatgtgtgtgtgatatatgtggtatgtgtggtgtatgtggtgtatgtgatgtgtgtggtgtgtgtgtgtgtgtctgtgtgttgggggtgggccttgtcttctagtcaaacaggtcaaaccaaacaggacagcacctgtttggtgctgtttggtgccgacagagactcggttccagatgccttgacaaagtcactgcaaggctatattcacacccctgagctaccctagcaaatcccaggactctgtgaggtaggagtcacaaggatgctattcttggtatgttttgtgatgcagcaggaggggttgctttagcaggcccatggtgaggcatcccccacctctggtatcagccgtaggacagctctagtataaaatggagtttatttgggacatgggagtagaggcagaggaaggaaggggacagagaagaacagaaagagagaagagaggaggagagagaaaaagggaagaggccttccaggaacatgctgagggagtgggagagagagagagagagggagagagagagagagagaacagggagagagaggaggagaaaggaggaagagggagggagaagggggaggaggaggaggaacaggaaggagagagaggccaaacaatcctttttatagcaagtcaggctagtacctggctgttgctaggtaactgtcgggcagagcctagaagaaaggctaacaattctcactggccattcttgtccctgtgcctgcaggagtgaaaaatgcccatgtcgttggctaatcctccaactgtctcagaacctcagagcaggagaccatgaccaagccaaagcatttagtgctgaggtgcaagtgaggggtcatcactgactgactcattgcctcctccaaatccccgacagctgcccttcccctgcttattaataagcggcatgtagctaggcataatgctggagaaggagctgagaggttgacgtcttgatctgcaggcagcagaaagagatgtgtgtcacactggtcatagtttgggcatatgtgacctcaaagccaaccttcaaaataacacacttcctccagcaaggccacacctcctaatagttccactccctatgggtctttggggggccaattacattcaaactaccatagtgccttggtcagggtttgtattcccacacaaaatatcatgaccaagaggcaaattggggaagaaagagtttattcagcttgcacttccatactgttcttcatctccaaggaaagtcaggactggaactcaagcaggtcagaaagcaggagctgatgcagaggccatggagggatgttacttactggcttgcttcccctggcttgctcagcctgctctcttatagaaccaagactaccagcccagagatggcaccacccacaatgggcccacccacccttgatcactaattgagaaaatgctttacagctggatctcatggaggcatttcctcaagggaggctcctttctctgtgataactccagtttgtgtcaagttggcacaaaaaaccagccactacacacagctacccttaatatccagatagtttctcactagtgtgactcctgtgtgcttgcctcctgtgtgacaattaaaaaggaccatcacgctaacctactatatgcaagggagtgcagtaaagaaacagctaacatgatttctcccatggtgtggttaaagtttttactgtagagatgagaaaaagcagagaggaaaagaagcagactgatcatggccaggacaagggaagcaggagagaatagtagtgctcgggagggaccaagagatagacgacagagcctagtaagagagggtaagtgaatagagagaaagagcaggaatagtggagaatagtgggttataaggaggctgcataggcagggagagggaacagcctggggactgtcacggtggctttgaaacatataacattgttgaaataattaagtaataagttaatcccagcaccggttacttcccacctcaatggtttatgttcccgaacaaaagatatacacacagtctttatattttaatatgccttaaacagcacaatagctgggtcactgccaaacctccatgaggttaatcctgaattattacttactaattctgtgttctatcttggctgctctagaccaagttgggcagccccctaggccatgctctcagtttcttcacaagatggctatgcctctctgttctccattcttcccccatctctcctctcctccacactccccctacgtggtggatcatctctttctccctcctcagggtcccaagcctggtaatctttaaatcctgcttctgtctgtcctcttcagccattggtcattggcatcttaatttaccaatcagaatcaactatatgtaactttatatatcagtaaacaacaaaacaaaacaaagcaagattgggaagtaatctaagcagccattaagacttgtggaggatttgtagataataaagcaacaagagattatttcaagggggggtgctcatcttcccgccctttccagcaagagaccctccttgtagtctactgaacacagcaatgcatttgtgatgattaatctccttgttgacttgaggagggttagagtcaccatgaaagcaaatctcaggcatatctgtgagggacttttcagattaggttagtaagtatgaagactgaccctaaagtgtgtggtgtcatttccagtagctgtagtcctagttggcattaaaaggagaaagctagcatccatgaaaggatggatctctagcatccatctctctctgattcctgattatggatgcggcatggtcagtggcttcaaactcctgctgctgggacttccccccatgatggactgcacctgagccaagataaattctttctttctttctttctttctttctttctttctttctttctttctttctttctttctttcttcttttctttctttctttctttctttctttctttctttctttctttctttctttctttctttcttccttccttccttccttccttccttccttccttcgcttttgttgggtattctgttacagcaaagaagaagttggtaggctgtgtttcacaacgcctatgctaggatggcttgttttgtttgatctgaacacccgtcaagccagggtaaacttgaacctggctatgaggcaggggccaggattctccccaatgggcaccaatgtcaaaagcccagaagcacaaatccatatggcgaaaggcaatgtcttagagagtttgggatgctgttctcatcatatcgctgattgacggttcaaggaagctgccacatgctgtttgattggcatttggatgcttaacataaagcaataacaaagtcaaccttacttgccaagaacttagcatatgttagacaaaaacttcctgggtcaaaagagagcaaagagagggttcctatccggtggttaatcacaaagcagaagggcacattgggtttcacttccggttggtttgttcagatggtattatggaggcagttgatagggtagagagaagtggtacagagagaaatggtgagatgctgttgccacagaggtggacagttgctgagttgtatgggagtcttgaacgttagtggagagggagtatgaatgccagagtattgtggctcttgggaactgagcggacatcaagaatcagaaacatgtggaattggctcagatggtgacagtcactaagagaagcaggtcagaaagggaacagggtggtttgtatgcttatttctagctttttgtttcaagagcattggagattcacactctgtcctcattctctttgttctgtattacacagtgagttttctatttaaaataatttcacgaaggtaaaagggaatttttaaaaaaaggataaacataaaggcagccattagactcctggctttcagttccccccactatgaaaatgcggtttgggtagcctgacctcttgggacctcagtctctaactgtatgaagccagttgagaatatcttccctttgtggctgcacagagcattggaggtaatatacacaaagtggagttcagaaattaggtctgttattacatatcttaaaaatccaagcagagggacctgggtgctctaacttcacagataatgatctgaactgaaccacaacatcaataaacactgcctggtacccagatggcttagacagatgagacatctccctgaaagtgacagctgtcagatggggagtgggggcaacctgtctcctggaggttacatctctctgacatggaaggaagatttctgaacttggagaactcagggttttccacaattcacagaaagggcgcagaaagatcagtttcttttttatgagtctatcactctcagagcatttgatcatgttaaacaatattcatcatgttctactgaatcgtctttcacatacccaaacacacacacacacacacacacacacacacacacacacacacactttctgtaaggcccaaccattgatttggtctggagacaaccctgaccttggctttcttatctgatctgatgaggaagaggatggctctcaggcaaaagccagactgttcatcaggtgactcacactcttttttcttttttcttttttcttttttttttcgagacagggtttctctgtgtagccctggctgtcctggaactcactttgtagaccaggctggcctcgaactcagaaatccgactgcctctgcctcccgagtgctgggattaaaggcgtgggccaccacgcccggcgactcacactcttgttacactcatgagtcccttatatagttcagtcaatacctgtcccgcagacaccatgcttggtgagtgttttctaacctcccttctcactcccagtatatggaaaagcaggaggcagcagggagaagaagcccttactcagcgttggctgagctacagacaaaacatttccttaacgactcctttctcaaactctgtccactttcttagggagccctcctttggagtcatttacctagggcacaggagtccctatcgttctcatcttaaatatcatagataaaccaacgctactgtctcccagcctacctttcctcgggctaccgactagatcccgagtaaaaatacaaagcactctgaaggcacgttccaaagcacgaagggtctgctcagtgtgcgctggaagacaagagtagctgggcagggagtacagacagaaagtagggtgcagcagccagaagttccccctcaaccttaactatctgctgtgtgacagtcgacagaaagcatcagcaccgctagagggctcacttctccagcccagtctgtctcttcaggaggtttgaatgcctgccactgggagctctctggtcgtcctccatttagggggcgctgtcttattgataaaagaaccacttgcctcccgagaacgcttcaactgtcaatattgctgtttaattcaaggggcacagaagaattcaaggcacaattaattctagtttcattttgtttctaaaaataaaactgttaaaaaaaatcaaggggaagcttttctatctgaggagtggaggcgaagccataaaaccatgtaaggaggatggcagttagggtaagaagtacggagccatgtctgtgctccttgatcttgttactacatatagaggtctcttcctgggagcagaagggtttggcgagaaaagcacaaatgacctcatcccacagcaaggctctacccctaaaggttctgcgatcatcccaaacagcgccccatgctggggaccaagtgttcaaacataggtgcctatggactgacatccacattcaaaccacaacaagcacctttccctacctgccctgtgctgcagcccacagggaggaggctttgtaattcccagagtattcgctgaaggagtcacaagttcccagaacgtcttgtattccatttttcctggagacactagatccccagataattgctgcattatggtcttatttcagggagagtgactggggagagatttggcaagcatgggactacccctcatacaagatgggcaacatactccatcctggaagagtttggcgttaactttcccagtgtaggtctctggtctgaacccttgtattgggttgattaacaactgctggccgcttctttggccctgtgcctacatgaaaggcaaaaccacatccaagtacctcggagtctgagataggagtctcccaggagccccatatcccaagaattaaggtggaaaaaggctgggaggtgaatttgggagaagtggtttgggagtattcaggaggtaaaagtagagagggaagacgccagtcacctgaagtcattttagacaataaattaggattccttttttaagttgtgtacatggaattctccttcatgacctcccagagaagcttgtaaacaaattatttttactcatttttggctgttgcgctgatgtttcttttatgacaccagagcaacaagagctaagaatatccccaatttactcttaagggattaaaaagaataaaatctctagggctgcctttcccatgggctcttctgccttggagtctttgaataagttttggaacacatttggcaaggcctttcagggagagagaatcataagcaattctgagaaaggttcttttagaaatggaaaatctgtgagagtacaaaattctacaactgtctccgtgaccccacatgacctccttggacactggactagttccggatgactgtggaaatttccatggcaaagccttgtctagaaaaacatcaccgaactctgaggaatgcttaggggtgcaatgtcatcccaaagaaaacttatctgacctttcttaaagttatgcatgtgaaaggtttcttagcttgtggtttggtaccagattccaaatatgatcaagatgaatccctgactatttgcactgacgagtagttactcaagaattgctaaattaattggttttgtttcagtgaaattagctatagaggagttattcttaaaaggttttatttattattttaatgtatttaatgtgcgtatctgtgcctgtgtgagtgcatgcacacttgtgtgcatagaagcacatgcctgagtgttattaatgtccataagatattccggtgtgccattctgcctattcctttgaggcagagtctctccctgaacctgaggctcagactctctcagctagtctggaagctagactattcgagctgtcttcctgttcctgtctgcacttcccctccgggctagtgttccaggcttttgcaggaagcccccatcttctgcaggggccctggaatccaaaatctggtccttgtgattgtggggccaagagcaacagcggatctgtctttccagaccccaaacatgcaggctttattttactaatcactattgtgggggtggtcattggggtgtgtgtgtgtgtgatgtaagaaagaccttatagggaagctatatgaataggtctgatgcaacttgatgagttttgacaactgtgcgcaagaatatgaagaacactcggttgtttttttttttttgctgtctccttcgagttgacgctgcctactacaagaaaccactggcctaatttctctctgtttaagttctctaccccctctccctctctctccctctctccctctgcccccccatttacatctaagtgaatcatgtaagtgaagtcatgtaagtaagtatgactagcttctttagtttgtttttttttggagatttctctatgttgtgtggcaggaattcgttcttttgaatgctttggtgcatttttgaatttatactctattctcacaatgataggtacatatgttactgggttggttttgttgctttagagataaggtctggagtagcccaggctggtatcaaactcataactctcctgctccagcttccggagatctgggattataagtatttcccaccatgtcccaacttgggttcgttattaattagaagtctgtgtcaaattctctcttggtgcacattatttcactactctgagacaaatacttcagggtggaattgctagacaggtgtatatttaacagtatctgaaatatattctttaaattattttagatttatgatgtgctcatgagtattttgcccacataaatatatatgcaccatactcatgccgggtatttgcagaggacagaagacagcatcaggtccccctggaaatggagttacagagagtcttgaaccacagtgtgagttctagaaaccaaatcttcatcctctacaagaatgccagctcttaattcctgagccatctctcctgttccattttaaataccttaaaccattggttcaaaaccttcctgatgctgcgaccctttaatacagtttctcatactacggtgagcccccacccataaaattagttcgttgctacttcataaccataattttgctactgttatgaatcggtatgtaactatttttggagctagaggtttgccaaatgggtcacaacccacaggttgagaactgctaccataaacagtttgcccaagtaattttatcttgtgctctcaacactatataaaataattccagcagctcagattccccttcacatttggtgcagatttctgtctattttttttttttttctatttcacccatcctaacgggcaaattcatggtggttttcaatttgtgggtttttttttcccttgaaaaagttatttattatttgtgtgaagtgcataagcacacacgtgtggaggtcagggagcaactttcaggagtgggttttctccttcatccatgggttctgttcagttaacttgggccatcgggtgtgggggtcaagcacacctagcttgcctctctctctctccccatctccctctctccctnnnnnnnnnnnnnnnnnnnnnnnnnnnnnnnnnnnnnnnnnnnnnnnnnnnnnnnnnnnnnnnnnnnnnnnnnnnnnnnnnnnnnnnnnnnnnnnnnnnnnnnnnnnnnnnnnnnnnnnnnnnnnnnnnnnnnnnnnnnnnnnnnnnnnnnnnnnnnnnnnnnnnnnnnnnnnnnnnnnnnnnnnnnnnnnnnnnnnnnnnnnnnnnnnnnnnnnnnnnnnnnnnnnnnnnnnnnnnnnnnnnnnnnnnnnnnnnnnnnnnnnnnnnnnnnnnnnnnnnnnnnnnnnnnnnnnnnnnnnnnnnnnnnnnnnnnnnnnnnnnnnnnnnnnnnnnnnnnnnnnnnnnnnnnnnnnnnnnnnnnnnnnnnnnnnnnnnnnnnnnnnnnnnnnnnnnnnnnnnnnnnnnnnnnnnnnnnnnnnnnnnnnnnnnnnnnnnnnnnnnnnnnnnnnnnnnnnnnnnnnnnnnnnnnnnnnnnnnnnnnnnnnnnnnnnnnnnnnnnnnnnnnnnnnnnnnnnnnnnnnnnnnnnnnnnnnnnnnnnnnnnnnnnnnnnnnnnnnnnnnnnnnnnnnnnnnnnnnnnnnnnnnnnnnnnnnnnnnnnnnnnnnnnnnnnnnnnnnnnnnnnnnnnnnnnnnnnnnnnnnnnnnnnnnnnnnnnnnnnnnnnnnnnnnnnnnnnnnnnnnnnnnnnnnnnnnnnnnnnnnnnnnnnnnnnnnnnnnnnnnnnnnnnnnnnnnnnnnnnnnnnnnnnnnnnnnnnnnnnnnnnnnnnnnnnnnnnnnnnnnnnnnnnnnnnnnnnnnnnnnnnnnnnnnnnnnnnnnnnnnnnnnnnnnnnnnnnnnnnnnnnnnnnnnnnnnnnnnnnnnnnnnnacattttttcaggtgcttctcagcccttcggtattcctcagttgagaattctttgtttagctctgcaccccatttttaatggggttacttgaatttctggagtccagctttttgagctctttgtatatattggatattagtcccctatcagatttagggttggtaaaaatcctttcccaatctgttggtgtcctttttgtcttaatgacagtatcttttgccttactgaagctttgcaattttatgaggtcccatttgttgattcttaatctaacagtacaagccattgctgttctgtttaggaatttttcccctgtgcccatatctttgaggcttttccccactttctcctctataagtttcagtgtctctggttttatgtggagttttttgatccacttagacttgagctttgtacaaggagataagaatgaaccaatttgcatgattctacatgataactgccagttgtgaaaatgctgtctttttttccactggatggttttagctcccttgtcaaagatcaagtgaccataggtgtgtgggttcatttctgagtcttcaattctattccgttgatctacctgtctgttgctgtaccagtaccttgcagtttttatcacaattgctctgtagtacagtttgaagtcgggcatgatgattccaccagaggttcttttattgttgagaatagtttttggtatcctaggtttttgttgttgttgttgttattccagatgaatttgcaaattgccctttctaactcagtgaagaattgagttggaattttgatgtggattgcattgaatctgtagattgcttttggcaggatagccattttgactatattaatcctgccaatccatgagcatgggagatctttccatcttctgagatcttcttcaatttctttctgcagagacttgaagttcttatcatacagatctttcacttccttagttagggtcacaccaagatattttatattatttgtgaagggtgttgtctccctaatttctttctcatcctgtttatcctttgtgtagagaaaggccatttgttttagttaattttatatgcagctactgcactgaagctgtttatcaggtttaggaattctctggtggaatttttggggttcacttatatatactatcatatcatctgcaaatagtgatattttgacttcttcctttccaatttgtatccccttgatctccttttgttgtcgaattgctctggctaggacttcaagtacaatgttgaataggtagggagaaacgtgtattttcttaacagcttggtgagtgccacttcagtgagtgtgtgtcttcaataatcacaatattttctttggaaacatgactattcgagtgtttgttcatctatcgattcagttgccctttagtgttgctatgtaggtttttgtgtattctggaaacaaatattgtcatatatacattataaatggttttctcacagcctgccacatctcctccattttctcatggtctttggattagctgatacttttgtaatttttttttcttttataaaatctttaacctggagcagggcatgggagggtggactcagaccctctgatgctggggttacaggtgcttgtgagctgcttggttcaggtggctgggaagcgaacattggtcctctgcaaaggtagcaagcattctcagcaactgagccatctctccagcccccttttccttttatattcagtgcatgctctgtcctaagaaatcttcacctatccacaacttctaaagctgtctgcctttatttccttttagaagttttacagttttaattctatgattgcatgtgatacacacacacacacacacacacacacacacacacacacacacacgttcttattatggaagagaaataagttttctctgtggaaggaagctcttttcccttttcacatttatccacacgactcaagagtatttgttgagaacgttgtcctcttttcatgaattgctttggtaaatgggggggggggcagtaattaaatgttcctgagtttctagaatgtatattctgtcgctgtacttgtttttctcccagttgcttgctgtcttgatggctagctttatagtaacagatgttatgagtctcctatcatacactttatcttacagttatcttagatacttccaaggaagtttgaaaacaattttccaattttactaatatgtacatcaaaccagtgaattgaaggtaaactgacatgtcttttaaaaatcagccctccaatttataaacagtgtatgtttctctgtttatttcacttaaaaattttttctcagcagaaattcttttgcaattttcaagtctgttcttgtaggtgtgggtgaatttattcttgagtattttatgattctgatgtgtaattacaattaactttagatcttaattaattcattcagtttaaatatataacaagtgatttgagatagccacacctacctacttacatacgccattatgtagaattctcggtactttcatggaaagaggcatttttagctgtgttaagtgccctttcccacaaaactactttctgatagtaacatagcccatatcagctttcctatgcttatctctgcatatctttttctattctttcactcaattcattttggtttttatattttagcattttctttgtgagatagtatgcagttgttgtggtctgaaagtttctattttagaaaaaattgttcatttatgtttactataatcactagtagtgggttgacgttgatgtctgccttcttgctctttcttcgtgcttcttcatttcacctaaacagatctgtttaatacatattggaatgttctgtttaatttattctgttatcttttaatgtgtgctcctggtagtatttcattattgggtgccttccctggaatatttactatgcattcttaattttctatgttctatttagttagcattgtaccatttcagacatgctagaaaaatttaaaaagctaaaggcccatcaacctcagctttcttgcccaagttgtcacgttttacatttaagtaggtactaagatctgtcctgtagggaccagcacggtggctcagtggctaagaatgcatgcacactgctcttccagaagatctgagtttagttccaggcactcacactgtacagctcacaatcacctgtttctgacgccctcttctggtctctaggagaactgcactcaccccctcccctaacacacacagttaaatcaaaaataaataaaagacctaccatacagtgctattttttttttattttagacatctctttcaagaaaaaactggaattttctcatgaatatatacttactaatgcccttcattattcccagtagatttctatttttgactaatataatttccctgggtcttgacattttgtccttagctttcttttcacttttaatatgcactataagtgtgctagtggggttttgtgaactttcttttacctgaaaatgtgctaaccccatcctcatttttgaagggtgtcacgtctaatcaggattgagctgaaagcctgtctgtgtgtctgtttcgaggctggctctgtttccctgttattttctggctccctttgctctgtggtgaagtcagttgtcatccatcactgttcccactaatgtgtgtggcctttccctctggctcctttaagacattctctttagatttttggcagcttggcattagatgcataacaatttgcttttaaaagtctactctggtgtcatgaacatcttggatctgtaagttaacatctgtcttcaagagtcagaaatgagctggcaagatgggtaagtgtgtacaggtgtttcctattggtggccctcccacatttcatccttcccaaacagttccaccaagcaggaccaagcattcaaatatataagtctatgagggacattttctttcgaaccactaaacagagggatagaaaagggggcggggactggatgtgtgggttggggtgatagatagaacatacttctttgccttctacttcctgtcccagctacatctccagctgactcttgggtgcctgcccacactgagggcggggtcttttccctattattttgctgacctgtagtcagtcttctcaggcaatgtgcttacagatacacccagaagtatgtttcaaattctctaggcatccattagagccttcagtcgacacctcaaactagccgtcatgatactcaccagtctaatgtataagcaggtgcagtgttggcctcggtgttggcctcagcatgccgttccagatggagcaggtgggcaggatggcagcttgattacaaccaccttcacacactcagccatcatgccatgacagccccctgctttcctgccactcccactccttaccatcactcactcccccctccaccccccacctgctgtggtagtctcctagtcacctgatgtcttcaagcacaagagcttgttgcaatggaatggttttcacttacatcagggtccctcttcccttcaagagtcgggcatagagagctggctgtggcagtgtgcacctgtaatcgaaagacttgggactgaaagcaggatggtaggagttcatcctcagctacataacgaacttgagcccaattgggcctacaggagaacactccctctcaaaatgattacatgggaacctctatttctggtgatcatgctaggacacctgacctgtctcagaagctttggcccacccaacctctctcctgtgtatgctagacacaaagtaccttcagagtgaaattctacttatttgtacttattccttctacagtttgcattttatactgtagaggaacttgagtgaacactcctatagcatctctgacacaaatatttatctcttcagttttatacaatgggtttcattgtgacttttccatagatgcatataatgtattttgatcatattcacacacacacacacatacacacacatacacacatatcatcctctgtgctcccactgatcccgaggaggtagagtacgtaccaatcctttaaattgagagaagaagcatgtgagcaagctactgcacaatcaaactcatgtctcaccaacattctccttgcctttgcagaactgtgtctgtatgacccacccgaggtccccaatgccacattcaaagccctctcctacaagaacggcaccatcctaaactgtgaatgcaagagaggtttccgaagactaaaggaattggtctatatgcgttgcttaggaaactcctggagcagcaactgccagtgcaccagcaactgtaagtgtgacccttttgtaacctggatgggaaaggatctagagataaaaggtgacagactccagctcccattaatttgggtcaacagataaaaaatgtggataaatctatgaataacagattttaaaggcttctgtaatatccactcacctaacgttatttaatgacgtctacttggtctaagagctaggcttactaagttcttgactaagcctgagtcaatctgatagatgcacgactttgctgttggcttcccctcttcattgagttcagactgctccttcacacagcctgtatccagactcagtttcttctctattttggggtgtgcatgtattttttcattgcatatatctattatatatagcactgtgttacataagaatattatcatgcaggtataaactgtagaatgagcactttctgccctgacctgaaacagccactctcttctatattccccctcccctctgttactaacttttagattccttagacagttttctttatacttttgggttatatagacatacttatgtttagttacatagagaaagtctaggaactgcaaatgaaagaaaacatatttctctttctgaagctggcttaatttgcttaatattgttatctctaggtgcattcattttcttctttatggctgaagaaaattccatcctagctgctgagctgagggtaatggcacatgtctttaaactcagcactcagcagccagaggcaggtggatctctgtgagtttgaagccagtctggtctatatagtcagctctaggcaaatcaggaccaaataatgggatcctgactcatgtgtgtgtgtgtgtgtgtgtgtgtgtgtttatgtatacatatattaaagaaaaatccatatattccacatttgctttaatcattcctctactgttagacacctaggtgggtcccataactgatctgttgttccagtctcctttatttttgaccatgaggatggaatgggtcagtgagccaacctatgggtggagggcagagtttaaagatgactgctctattgaagggcttggcttcctcattttccaaccatgtcccttcatccaaagctggatttctattgtcctctcactgaggtgcttgcctgtaacctctctgccagtttttcacaagggccagagttttctgatcattgccttaagagcacatttctccaacttgaactgctttgaaccaggagaggggagtggaggagttaaataaacgttgtggagttagattactcctacctgtcatgtgccacactggtggcactagtgacaaggaacaaagccacttatgtttgatccacatgcacacaaggattttctaggagagaatcttgcatttttttctaggaatgtgttgtatccaatgccaatatgtatatgagtatggagaggtcagtgctagtctaggtgtgctggccctatccaagatgccctactgagccctgcctggctggggtgcctgggcacagatgacgtgctgctcaggggaggcagaaggaaaggcagaatgatggtacacagctcatcttttctctgaagggcaaacggcagagtctgggatagatgccatgtttcccagtcacctgtgtatacctgggtgccacaggtggatcactgtgagtcaggaatgtgggtcccccagtccacacttcccccttagggtgcccatatgccaggcaggaaggggaaggcagagcccaagtgaaacccggtttgattcagagtgagtgctgggacaatggagtggctggaagagagaaggccttctttagagattcaggtgtggctctttaagaccagggagatgatctttgtctcttcatactggtttatttgatggtgggtgtgactacatacactttagtcagggtgaaccagggattaaatcccttttgccggaaggaaggaatacccaggaagagcagctcattggctgatggctaagggatacctcattagcaaggagaagaattccaggtgcgtatgctatgtgactcagtggccatggttctcagtggagtgtcatggttacatattccagagcaggtagaggcaagcagggaatggcttcactcctgccattctcaattctgagattcccgggatttaagctcattcaagcttgccatttctcatgcctgtctggtaacaaggtccctcatgccctacacaggagcggtcttttgcttatctttgcacacccagcacagatatgtctctgggcaccagagaggtgtcccagggtaaatgaccgcatagacagctctttctattctgaacatttgggaacttacttgcctcatttctcccatattctccagcccatgacaaatcgagaaagcaagttacagctcaacttgaacaccagaaagagcaacaaaccacaacagacatgcagaagccaacacagtctatgcaccaagagaaccttacaggtaagacgtgcatctcagcaaccatcctctagccggctcctgggaactgagagagattagtcctgttctcaacaggcaggtgcaacccattctcctcctcctctcagatttccatgcagatgacagcattgctgattgttggcaggctcgctgcttgggagcataagaattcaactcctatagactcaattcaactcaaaaccatgtgctgggaatatctgccatctaagcaccacccacagaggaaacacatcgaatagacaagggcctctgcccttacaaattgctcctattttctcttaagcacatgccaatggacttcaagcaaaaccattgataaaaatttgccttttacagcacagagttctaaaatggtaaccccacacacttattcactacttaatgtggtgtggatgtgtgggctctgtgtctacatacagtttcccagatggaatgataatacttaaattaagccataatgtcaagaagaaagaggcttactagtgttagagccggggtttcagagatcagtgagccttaagaagaccctaatagtcttatgataaagttataaccttacaaagaacattattacatcatgtatagtccatctgaacccacagctgagtgaaccagcgaataggaagatgttccttgattaccaaagaaactaagacacagagccttgaaacggcccagctacagtcacatcacagagggaaagcaaaacctctagtccccctttcttctgagaccttatttttagctacttaagaactagtcacagcatccagtattggggtggggggataaagtccaatctagaagcattattgcaatgtgatgctttcatttccctttctttcccagctctgtcctggaatagtgtttttcaaatacatttaatgttttctctgctctcctggtatctggtgccaacctcgacagttactgaaaggtctctgttggtggggtgtcaatatttgttcttactcaaaagacaatcagatgaacttggcatggttgtacatgtctgtaatcaagcatctgggagcagaggcaggaagatgagaagttcaaagctgtcctgaattgtatgataacctcttcagccccaaataatgagggacggagagagaggggaaaaggaagggagggnnnnnnnnnnnnnnnnnnnnnnnnnnnnnnnnnnnnnnnnnnnnnnnnnnnnnnnccctttttggccctggtattcccctgtactggggcatataaagtttgcaagtccaatgggcctctctttccagtgatggccgactaggccatcttttgatatatatgcagctagagtcaagagctccggggtactggttagctcataatgttgttccacctatagggttgcagatccctttagctccttggctactttctctagctcctccattgggagccctatgatccatccattagctgactgtgagcatccacttctgtgtttgctgggccccggcatagtctcacaagagacagctacatctgcgtcctttcaataaaatcttgctagtgtatgcaatggtgtcagcgtttggatgctgattatggggtggatccctggctatggcagtctctacatggtccatcctttcatctcagctccaaactccgtctctgtaagggatgttttataatttgtaatagtttggggtttacagaaaagaaaaattaagttcaaacaggttccatcaactataatgtttcctggtcttaaaataatttgttctgagactaaaactcagtcccagtgttgttacacaaagtgcaatgtaacagaaaatggctcaggtcagggccacccagcttcctgtgggggcagagagcttgaatgtggttcttttggggattgttttgggtagtcaggtgttttgaaaatctggaaggttctaaacctacgagtaatttatgattcagagtccgacagcatatatagttctgtctgattaaatggaaggccattgatagggaattccaagattaattcagaataggccacgatctctgcggccaaagttcagccaagcctgggttccttccagtgagtgagaagttgctgggtgtcggggatctttagaagggttgacatggtcgatgtgggtcgtgcttcagctgtggtttaatcaaagatctatttctctgagattctctcagtgactcccctcctccagacattagctttgtccttggtcagctcccccaagtcctaggctgaatgctaacaatttgtttgttcctcctcacgtgttcagcagctgtactgagaggtccgtccatctgctccacccagctgctgtgtctcagcagagtctcagggtctttgcagcatgggtcaaatgaaaagcacattccacctgggctcccggcaagcatcccctccgcacctgccgctcccactgccggtccaccttcctctgtctttctcacctcatcacctatccgacccttgtgggagtgaccaccatgtgacttttcctggggagacctgaacaaacatctggtcactagatagagcaatgactgcaaactaaagaaatgattccacccaagtatcatgtaatgaaccaatgaattcactgggcttactcttgggagcaaggatagttcaaattcagctgcttcatcagaaaccccaccccagcttggataaaaaccctcgtaagctggtttgctggaggtcccagggggaccggcggacagccccaacagtttgagtctccttctctcccgtcattgtaactgcttatgtaacagtaagagaagaggggcggtgagctgcaggagcatcctgtcatctgtggggtttgtttattttatttttctgagtcttaaagagccgctctccaattcaggaaatagctgcgcatccctgggttccatgccttcctacaatgcctacatttctgacagctggaatctatcaacacttgtaggttcagtgaaagcaaaacaagtaaataagaaccgatgtccagttttagccaccagagttgttctgggtgcaagaagtaacctagaggcatttgctgtgtcttcccaaacttgccttcaaaattctcttcctcgtccaggtcactgcagggagccacctccttggaaacatgaagattccaagagaatctatcatttcgtggaaggacagagtgttcactacgagtgtattccgggatacaaggctctacagagaggtcctgctattagcatctgcaagatgaagtgtgggaaaacggggtggactcagccccagctcacatgtgtagatgaaagagaacaccaccgatttctgggtaagttgttcctttcttgtgtccttcccattctttcctcatctggaccacactgccatgggatctgggaaagccacgtggccttctgggtctcaccttttaaaacacagaaagaacactcgaaatgctgaggttcccttaactctacatagagatggttaaaggcagggaaatgaggatctctccggtgctccgaaccatacaggatgctgtctctaggacagagtgctatcctgtgtctattgaagccagagcttccacaacttctgcccatcaccaagatatcctattgttcacaagggaaagttcagaatcacacccatgactcttctttgtacttatatgtcatttgtactgtgttccatggtcattacagtccccttaaaggtccccctgattttcgataaaaagtacaagtgtgtgggaagtgacttgccttaggatgggccttcacatgcccagtcctgctcacatgcaacctgcctgtgcagaggtcttcagccatcattgtttgaaaccttactacttccatcatcaaaaggtgctcatgagtttttctggtttctttggctactgccgtctgtcacatttcatgacttcctctgtggttcccttgggatgctgtttgcttctcaaaacttccctccagagagtcacccccatggccagggcataccaatacttcctagcaagaccctgggtttctgagttagggttactattgctgtgataaaacaccatgatcaaaagcaacttggggaggaggaggcttatttgactttcatctccacatcatcatttatgatagaaggaagtcaggaaacggcaggaacctggaggcaggaattgatatcatggccatggagtcatgctgcttattggcttgctcctcatggtttgctcagccttgctttcttatagaacccaggaccaccagtccagaggtgtccccaccaacaatgggctgacccttcccacatcgatcacttattaagaaaatcccctgcaggcttgcctacagctcaatgttatggtagcattctcaattgaagttctttcttcttcaacgactgatcacaaaggaactgtcaaagctctattcgtctccatttggtagtggtggtgttctctctctctctctctctctctctctctctctctctctctgtgtgtgtgtgtgtgtgtgtgtgtgttattctgacccatttccaagtcaggggtggaatccagggctgggtacaaagtgtggagagaaagatttgtccacagttccatagatagccactgtcagggttagaattcccgtttacatacttttctatggtcccttaactgttttcagtgccctagtgtggacctgtatcccagagacatgccccagaaaagctgccaatgttttagcgggtatttctaggaacaggagccccagatggtgagtggaagaaggcattagatcccatatcaccatctttgactccagatacattgctttctttcttctgcagctagtgaggaatctcaaggaagcagaaattcttctcccgagagtgagacttcctgccccataaccaccacaggtatggagaaaacgtccacgaacagacagacatttggccatcaagcaaggctatgcaagcccctcaagcgatgaatacaaagaggaaaggaagctagccctacttgcttccttcttctccaaagcaagaatatggccatagcagcataatcaacccaaggcagtctgggaagatggctcagttggtaaagtgcttgtcatgcaaagcacgaggacctgagtttgatccccagaaatcacactctatttttaaaagcgctagtaaggcagtgattacctataatcctggctctgaggaggcagagacatggtgatctctgcagcttgctggccatcagctagtgtagcagaactaatgagctcaggttctgtaagagatctccaagaaataagatagtcaattaagaaagacatctgatgttgacctccggcctccataggcacacatgcacacgcgtgcacacacacatgaatgtgtacaccctctctccacacacacacacaatctaaggaaggagaaaccacaggacagaggttgaagtctccagacactcacctggccctcacatcgcttccctcaacctgagttgtagccggcggcggccacgaattactgggttcctgaaaggaaagctgggcatggatgggaaggacggtgagagaaataatgagccaagacaaagttctctggtcaagactcaatctttaattgtagggtcttggatttaaaggaaggagggagactcatccccaactttgccaggatctccattgctttgtcaggttctcctcaggaaagcaagctcagctgctcagcaggtagcttcatgcaggaagctgcagatgtggcacacaatagactttacctaggtaggaagactccaccctaggtgggctagccagctgtggccgaaataggtctgattcagccgctcaaggctgggggaagggcgcactgagtggctacctactgggaagcccctcctctcccagccttgtgcagtcctatgctagccataaaataagtatcccctcatctctcttctccacagacttcccacaacccacagaaacaactgcaatgacggagacatttgtgctcacaatggagtataaggtagcaggtgggccagctcatttactttacggacaatggtgaagcatgcaaagacgtgggtagtttagctggttgaaacggccactaattctttcactaatggttgtaagggtaaagaagactttaatcgctatcattgctcaaaatcccatgggtcagctgtagtacgttgggagttgtatcagctaccttttgtgttgctgtgaccagaagcctgacaaaacaaaccgaaggaaagaaaggtttgttctgactcccagttctgggatccagtccatcactatgggcaacccgtggcagcaggagactgagcagctggtcacagtgcatctgtggtcaagaaacagagaaaagctagccactgtggtgtaaacctttaatcccagcacttggaaggcagaggccagcctggtctgcatagtgaattccagtatagccagaacgacatagtgagaccttgtttcaaagaaataaaagaatttttaaaaagagaaagataaatgtttgttcccagcttactctcctttttatggaacctatggaatggggccccacatttagagcagtctccctacccatttagcctaatcttgataacctctcaaggacgtgtccagaacgttatctctaatgtgactcgaaaacctgtcaatcaacataaaccaagagcatcatcagagttaaatcacccaaaaccagtttctcccacatacattttcaagaacaatgcctcccaaactttggtgagagacaaagcaaggatccagggagagaaaatatagtgtccatacgcacctcagttattcctggtaggaggcaaaagcaggccttcctgaaccacggaatcaatggaagcttctggaagattcacatgtcagcatttgggaagtgtgagcacttccaggcgatatcggtgtgtttaggatttcttatcttgtttcaatagttcctttatgaaggatgatgctgctaatgaggactatcctctgggccttcctcaggttgagctgttctgtcaagtaccagcctctttctatggctgttccttctatgccccctctgctctttgaaggctccttgatccttctaagaaatacccagggagaagaggaaagaaagaagaaactgcaggccccagctgttcaggaggtccttgatcacctacagaattttctcacctgatctacagatccaacccccgatccatgcattcccaaagcatggtcctgacctgaactccatctccctctcttgacagtggccagctgcctcttcctgctcatcagcatcctcctcctgagcgggctcacctggcaacacagatggtaagtccaacactggaaggacccagcaccccagtgtctggtccctggcctggcatcgtgaacattgcctagagcttgacctcagctgacacgctgggaagatggctccgacgaaagcatgagatgggtgtgcaattcctaaaagctttgtttaaaaaaaaatcgaatgtgatgatggcatttgcctataattgtataattcaagagctgaggaggcaggcagaggtggatccctcatactctctggccagccagcctagagaaactggtgaactccaggttgatcaggagactctatttcaaaagtaatgtgaataatatactaaggaacaagattccaggttgacctctagactccacagtcatttactccctgacacacgtactcttactgaatgtgtatgcccggtactgagtgggttacattagcaaatgtcacccctactctcagaggtctgtgctgtttagagattaggaaaacctaggcttcccgaatgtgcagatagcaagagtttgaatcctatttagagatcttcaaccttgccatccatccaccagggctctaccaaggtcgctggaacagaccatgccaccccaccctccctccaactccgctgatcatccactagaaaccagcatgggtagcaagggatggagagaggagacggggaccatggctagaccaggcttgatggtatggatgaaggttgctagatactcacaaggctttaaaaaaaacattcttgcatttatcattaaatacagtgaaaagctcccggatagcaagagcagggggaggctctgtattctgtgtctgtgtgtctggctgtgtctgtgtgtctgcctgtctgggagttcccttgttttttaggccctaagtatcttggtcagtgatatctgccatggctcatataatgtctttttatggataaacatattttcaagccatgattaagtaaagagttttgtgtgagacagaaaccagaaatcagaaatctaggtgaacatacaaattgcacgtgcatgtgtgcacacacagacacacacacagacacacacacagacacacacacacagacatacacagacacacatagacacagacatacacagacacacaaacacacagacacacagacacacacacacacactggggggttggaggaggactgtgtatcatggtacattccattgatctcagcacacaagagttggagacaggaagatcatgagtttgagtttgaaagcagtcgggctgtatagaaattcgaatgccagcctcatagtgagagctgtctcaaagtaaatgagtaaataagatgccaagggatgtagttcatttggtagagtgagagctgagcatgcccacgaagcccggacttgatctcagcaccataagaaaccaggtatagcggcataagcctctaataccagcgctcaggaggtagaagcagggaaatccaaagttcaaggtcaccctgggctacatgagatcttatattaaaaaactaaacacattattttttaaagatttatttatttatttattttatgtgagtgcactatagctgtcttcagacacaccagaagcgggagttggatcccatttcagatggttgtgagccaccatgtggttgctgggaattgaactcaggaattctggaagagcagtcagtgctcttaaccactgagccatctctccagccccaatacattatttaaagaagaagaagaattagaagaagaaggagaaggaggaggaggaggagaagaagaagaagaagaagaagaagaagaagaagaagaagaagaagaaggaggaggaggaggaggaggaggaggaggaggaggaggaggnnnnnnnnnnnnnnnnnnnnnnnnnnnnnnnnnnnnnnnnnnnnnnnnnnnnnnnnnnnnnnnnnnnnnngaggaggagaaggagaaggagaaggagaaggaaggagaaaaggagaagaagaagaagaagaagaagaagaaggaagaagaagaagaagaagaagaagaagaagaagaagaagaagaagaagaagaagaagaaagagttaagagtataaaaccatcttgagaaaagccagatacatcctcattagagtcagctgtgtgagatgttctgtccctgtctttgtttcatttcctgtgggtgatataaaataccccaaccaaagcagcttaagagagaaggggcttctctgacttacaggtccaggatgcagtccacccttgtgtggcagctaaggtggccgaaacccgaagcctttactcatatcacaccctccatcaaaagcagggatcaatgaatttgcatgcacacttatcccagctcacttcctctttctatacagtctaggacccaaatccatttagactgggttttcccacatcgattacagtaataaaaacaatcccctgcaggcatgctcacagatgacctaatctaggtaatccaccattgagattcccttccggtaactttaggttctgttaaattggcaattaacactaaatcatcacacgcctgacgtcaagggtgtgcccctcctgcccgagcaggttctggccagccctgatactttaaatctttaataacagagtcataggtatgtgggtgagaatccagtttcttccattcttttgttgttcatctggcctccttctcattttcctcaagtggagcaagaagcagaaggcattgaggtccacatgagggtaccccgatagttgctgtgctaagagttactcatggccctgacactctacccatttccttaagatgttcttttagagttctgggagataaaacgtgatgtaatatgccttgacagtctaggcccctcagtccttgtgagaccttcttcctgctcaggacgagcatctacctggcatggcattttcgtttggtgaagacaccagactcagaaccagaggacagggctcttcatgagcaacaatagcttagagtttacaatgtgaagcaaggagctgtctaagactgtgagattcccctagacctcccagtagcggggccattagggagactgaaatagaatctcaatatgacccctttggtcaaagaatttgtccaagaaaacaaaacaaaacacttctgaaatcccagccacaaggagtccagcataacaaggtcctgttgcagacacataggtgcctgtgctcacgtttgtacatatatatatatttacatgtgtgtatatatgtgtgtatatatatgaaaaaagtttactttctagaagctaatttcatctaatgctgccctcttgtggccaattggaaatcttacctctgaattctgaaaatttcagtctttgccactttggaacacttaccaggagctaggagggcactggctggctcacattagttacgtttttaggaatttcatgggttttgttttgtttcgtttcttttctttgtttgtttgtttgtttgtttgtttgtttgtttgtttgtttgttttgagacagggtttctttgtgtagccctggctgtcctggaactcactttgtagaccaggctggcctcgaactcagaaatccacctccctctgcctcccgagtgctggaattaaaggcgtgcaccaccatgcccggcctcattttttgttttaaatgttcgccctgggaatttaatccaaggccttgagcatgctagacacatgttctattcagctatgatccagccctttgaactgttttgttaatacttttctctctttttctgtttcgtaatgttgatttttgggtgggattggagcacgagcatccggaagttagaggacaagttttgagagttggttttctccttcattcactaggattggtgccaaactcccttactccctgagacatctttctcccccagtcggattgttaggttttgtgtgtttgatttggtttagagcagtagtccttagccttcctaattctgtgaccctttaatatagttctgtatgtttaatggctaatcttactccaactcagcagttattagtccacaggactaaatgaggaaaaatccacaactgccaagtgtcagacattgcaccgcaggccacagacatgcacaacccagccctgctcgtaggaactagtagactggaagaaaaaaaaaacttgaaatatttttgtggtgctgaggatacaggtcaatagtagaatgttttctcagccctgggttcaatccttagtatagaagaaaaagaagaaagggagatatgggtggaaggaaatacggagggaggaagggaatgagggagggagggagggagggacatttgttgaaagtctaagatggagatatgtaagcagaaggacatttaatctacatgggaatcaaaagacagctgactgagctggtatactctgaagtgtcagataaaacgagccaggaaacatctcctggaagaggaagctggggcacctatggaattgtgaatctgtgtggtgatgtctgagagaaggttgagttgtaggacataaaatgaatgggcaccatggccacaatgataccacactgcccagacagtcagaaatactgtcatggaagatgaggccgcattgaggagctgggccaagatgctgatggtggtggcacctcagatcacctcacctaggagagaaaccgttatcttggccttctgggtgatctgctgcgtagaggcttaccgtgggcaatgtgttgacaatatgattgcattatggtggaataaatccacatagaagttggtgactgtgcttttgtgggtctgtggatctgagtgaatggaggaaacaaaccaaggggtatagaaaagaattgagcaaattagtatgactggtaagctggataaaaagatggagtatggaagaaggatgagtcagagaggggccgtgggtttctcagacagggagcctctgtagccactacatcctacagtgaaatgcaaattgggggtctcaagcaatgcatcccttagaggttagccacaagcatagcccagtaggacatcttgctcagacccactcagctctataaccggcctagagttagttgtgttgtgagatgaccttctgtttgtttgtttgtttgtttgtttctcaaaacactgggttgaattgccagtgcacagagcagagactgagtgcacagccagtgttgggcccctgggtggttgctggagcttgaggctgtttttcgtcaggtgggagggtaacaagattctgaagtagaactccaagttagactctcagctagggggctcaaggggactgttcagatggaatgggtttgggtggagaccatgttgttctcagtatacaatggcatgcatggctgtgacagggttattcttcttccaggaggaagagcagaagaaccatctagcaagctagaaaagtcagagcccaggcaagcggatgggaatcacaaagctcaagccaaatctgagacgccaagcattcacctaacggctgtttccttctgatccctgggtttctagaacattctgaagtcacaggacataacagcaactctatcactaaactggactttgccattgaagaataggatctaaccacttcagcacagcagttctaaagctttaatgggagagagggcccaacagtgctctgtgtgttttgtttttgtgtatatctgttgatgggagctgagatggtgtggtcacttttcatgtaacatatagtatagaaaaagtagctttaggttgacttcattgttacaacccagtttggaaagcccaagtaaaactcagcactaatgtaaataattcctcctcctcctcctctctcttttcatcctccgctccatcttcctcttcttcctcctccttttccacctcctctgtccctacccacccccacccatccactttccttcttcctttctgctctcacaagctcatcctagctacacgtgcatggctggctcctttttcaacctctgtttgcctaactggctcttctgatttcatcacttactgatcagcctttaaaactctgagctggcaaagatgactctatctatgttcttggctcagtcccagaaggaaacccccttttcatgaagcttcagttttgacatcctgaagaacagaaactgtggcagaacaatcttcagataacatcaaaacaaagtggagaagccacgggaactgtggagctctggtattcagaagcctgtgtctagggtctgcgccaggagcagaaggctgaaggaagtcccaggacgtggacttagatgctttcccagcaggccactctaagcgctggtttctttgggacagctgtcaattgtacgctcaatttagcctgcactaatctgatgcttacaggtgaacactcaaggcacaggtatggacttggtacataccgtgaaaacactggaaagaaaagaatactttcaagtttacagaaggaaggaaggaaaaaggaagcagaggtggtgattatacaaaagattagctgtagactggatatcccaggcatcctcggataatgcccccgccccagcaccctgatccaggtcaccaaagccttgtgagatcagactgcagagccagtctgtctctgagtcagtaaatgtagaatttggatttctcacaagttcctggcggtgtcttttttttttttaatattttttattaggtattttcctcatttacatttccaatgctatcccaaaagtcccccataccctcccccacactcccctacccacccactcccactttttggccctggtgttcccctgtactggggcatataaagtttgcaagtcctggtggtgtctttatgctgatctctagcccacactttgtgaggcactgggctatcccagtgtgctctcctcttccacagataccaaaagcacctgggtttgatgctcagacttctgagcacgttcttgttcaatctcttgcgtaagatttcctctcagatgagttgagtcagattctcatgtttaacagtgttttaggggattcacagaagcccaaactatcagttttcatttctgaaaaggctggaaaattttatgaaaaactttcaaaggtcagacagagccattttgagtcttttatgtgaccaagtatgaaccagatctttcctatctatggtctcccctttccaaaatatatcttttgtggggacacggcaaggaggaaagttaaatagaatctcaagctactaattttagaaaagaaaaaaatattaaactcttactaaagagctgtgggtagtggtacacacctgtaagcccagctctcaggagactgaggcaggaggattgcagtgagtcagagatcagcttcacctacaagcaaaaccctgccttacccctcaacctttccataaaaacagtcttacttgtgtaaaattaatttttaatacatatttgtgcacgatgtgtgtgcctggtgcccagggaagccaaaaaaatatgttcaatgtccctggaataggtggttatgagctgccatggaggtgatgggatttaaacccctgttctctgaaaaagcagctagttctcttaaccactgagccatctctacagccccattaaattgaattttattgtcattactcaatatgggagatggggtaatgataacaattttttttttataatactaagatgtttagctattttactctccttcacaagtgtagagtagaattttctagaagctacatgcatgatattatcgctctggtgttaacacataatggatttatcttgttaataaaagaattagtaaataatattttaaattttttctttgttttagttttaagatgattaatatctatagatactagtgtacattaagaaagcctttgggatcctcaatcattttgcatggttttagtaattttttaataacataaagaaggtctgacagattatgctaaagagctattgtggtatggattagaaatggcccccacaggctcctgtgttcaaacatcagctagcagtgctgctttgggttttggaacctttaagaggtggggccttgcttaaggagataggtcactggaggtgaaccagacttgcttccagtctccctctctgctgtcccaggaagccatcatatgaggagtttcacaacatacttctgctgccacagagtccctccagtaaggcacgtactggccactgtgtagtgtaccctctaaaactgagctagagctcccctctcctccctacactatctctgttgatgctttgtcacggtgatgaagaacataagtaaggcaaagacaagacatagtttggagactcacgtgagcatctcagccagactcaggcacagctgcgatgtgggaattatcaagcatgagatgcaaagcaatggaaaatgaatcgttatgacagaagcctacatctagtcttcccttcttcccattagtaataatagcccgtgttttagaagaacacatctttttggtgttctaggtagcttatattgcaaatgtggcacaatctaagagaaatctgggatgagggaacctcagtgaaagattctccttgatcagattgtcccactgatgattgatatgggaaggcccaacccactgtgaaaggcaccacccattggcaggatgactggggttatagaagcaaacaggctgagcatgagccagtgagcaagccagtaagcagtggcttctctttggaagaagcatggctttcttccgtggcttctgtttgatctctctcaatgatagattgtgacctagaagtataagctaaaataaaccatttcttacccatagttgcatcggttgtggtgtttatttcacagctacagaaaagtgaaacagaacatctttctcccaagctaatggtgtttgccagcctccttcagctacctgtgggcatgtggttaagctctgaacacagaggtgtgagtagaagcagtgtgtgacgtctgggctgtgccttgaagagaacataagtggcattttctctcttagctcttcaaaccagcaggcacatggccttgtcttgggagctagaaatcccaatggcaagaaccccattttaagtttgacaaggagacaaagttgaagaagtctagacatttgtctgatgccagggaggcattgcaacatggctgattgcattggactgaactttggtaaaaaaacaaaccagttgaggccatgacttttaccttgtgaggacaaaattaacgatcactaacaccggtactgttaccagctatatacaaaccctcttcccataacaaattttttcttacggtaatactggcatcaaaatattttgagagagagagagagagagagagagagagagagagaacgaacaattacttgttttgtgttgaatgactctgcctgagagttcccctccagcaggcaagttcctgagatgaaatgcatgagttcttatggagacatcaccatctctcggggcttctgggtaagtcatgaatcgaaaatagaaagcttctggggtccctaaagcccttcctcttatttccattccactcctcaagcgtgaaggataaaatacattccctgttctgctgtaatattaaggatttggattattttagtctggttccttggccatatatcaaaaccttatagtaaggggccagtgagatggccagtggacaaaggtacctgcggccaagcctgatgactgaattcaatctctagaacccagatgtttagagacctggtgccattaactccacatgtgcaccatagtacaggcttttttcccatcacacatgcacacacacacacacacacacacacacacacacacacacgaagcccttatttgtagcagcaagtttagctacacacacacacacacacacacacacacacacacacacacacacacatcagttaatttttgactagctcaaaggctgagcactcctaaacctccctctgctagcaaatgctcccttctggtattcctgagactcctgaaccttcccctgtcaccccaggcccaatgtagaagtggccagtggctactcacctgaattcttacatggctggttggctttctctcctgcagtgcttccgttctatccttctcccctgagtgttcgccattctctgtcttcatttctcccagttcctagcctgcgcaaatctaaaggtcccaccttagtctacctgtccagccattagcttttggctctttattgattgaacaaaaaccaattggggacaaggaccttcagcgttaggacatgcagattcccaatttggggggccagattaattcaaagcattggaaccaatccccaacacttatatattagaggcagaacttggggatacagtctccttgaagctaaattgttctttggataaacaacactactggtgacatagaagagataaaaaccctacaaacttggtgtttttgttattgagacagcgtctcactgtgcagcccaagctggccttgagtttacagtcctatttcagctctctggtatttcaggtatgcatcaacttaccaagctataaacttggctttcttgagccttgaacttcctatgtattgacaaatacccttgaacttctggtcctcctgtctctacctcctgagtgctgggatcacagacacataccaccatgctccatttacacaatgccggagatagatcacagggcctagtgcagattaagcaagtactctggcaaaccagaccaaaaaaaaaaaaaccaaaaaccaaaaaccaaaaaccaaaaccaaaccaaaccaaaccaaaacaaaacaaaacctgagacagacaccagtatattaggatactcttgaatcctccctttttcgtcccctccaaaattgcaactagagttgtaagttctgccccccatgcaaacaaacagtccagataaactgaactctagtggtaaatgtcaatgagggggacctctgatccacatatgtcaagatggaggtttggaaacactacatgcagaaactccatagctgaagtcacaggatggcggggtgacactctgtattccagctaacaagctagggaactcgactgtgtgcacgtcccttgtaaccacctacacatgaactgggaaacctaagatccctggatgttaatctgctgggttgaaaaacattccacctcctgtgtgaccagagaagtgggggagcaggaaacaacagaactggtttccttcctacccactcacagcctctctgtgatggcaaagggaaagatacagagtacttaaggccaaagcttgagacttcttgaagctttgtgagttgtggaggagagacagttctaatcccagagtccttgttaagctgaggtacctgagaatttagaatggtctagctgtgttttgagaccaaccactatgaatacaagcccggcagactggacttggaaaaacaagggaaaattagagacgtcctctgaattttcctttaataaatatggctcaaacaagatccaagtgttcctacctgcccaacttgtaaggcatggttagctgaggacacaaacaggcatacctctcaggggaaagagctcagggaccctgccacaggcctgcagcaaagtgagtctccagatgggcactgtcctgggaattgaatggacacccacagacatgcaggctgctacctgctacactccctctccattatacaacatctttgaccccaaggtcaaaatttaaaccaaattcgaattgagttaataattaatctaggaaattcctgcagtggataaaggaaataaacttgggatgaaaaatattcaagcgaggacactgagggcttagaatcagatattaaccactatgactataaactattgttcttaccctaggtttggaggccaatctgttcccttgtcttaggaaaaatacataatattttgctccacaaaggacacgtttgggagtcatggccatttcctttcctctccaacaatttccatccctgaagatgtcttgtgtgtatgtgtgtgaatgtgtgtgtatgtgtgtgtgtgtgtgtgtgtgtgtgtgtgtgtgcatcaaacactcaacaggaagcaacttaagggaaaaaggtttgtctggaattgctgttctagggaatgtggctcatcttggcagagaaagtatgacaagagatgtagaagaagcaggtcacatctaaaatctagaaacagagggatagtgatggtcagtttgcccatgaaacggtaccagacatttcagatggttcttccctattcgcaagcatcttaatagacccacacagaggtgcgtttccatggtgattctaaattcaatcaagttgaaaatcgtcattaacaattacaaattcaaagaaatcctaaaagacacgttatggaatacaaggcgaacccattatgctatctcaaagcaggtacgaatgtccatccgtcgttggtggtccacaaggggaaatactcttcaccacactcgtatttttaactgaaaaatacgatcgatgcatgcgtatccattcctgtgctggctggttttgtgtcaacttgacacagctggagttatcacagagaaaggagctttagttgaggaaatgcctccacgagatccaactgtaaggcattttctcaattagtgagcaagggtttggaaaggccccttgtgggtggtgccatctctgggctggcagtcttggttctacaagagagcaggctgagcaagccaggagaagcaagccagtaagtaacatccctccatggcctctgcatcagctcctgcttcctgacctgcttgagttccagtcctgacttccttggtgatgaacagcagtatggaaatgtaagctgaataaaccctttcctccctaacttgcttcttggtcatgatgttttgtccaggaatagaaaccctgactaagacaattccccaagctgaaacttaaaagagacagcacctgcttcaccaactactctttgctttccttgcctggtaagtttaaagatacgttgttttttctatcagtgtttcagggtgtaaagaccaattagaatatactcagtcaatttttcatacaatgtagctcaaatacaaaacacatttgtatggttacaaaccatgaatgagctgtcatagttactgaagctcacctggctggttgtgatggatatccagacttccggacccacatggaaattacagctgtgctagctgtcttagtgttagaagatgctactacgtaggctgagggagaattctttataacagtcttactcagttatgagtcctgtatgttatactactgacctggcaggcaagatatgctcactggttcaagagcttcatgattgatgagcaactactttctgattcaatttgaggcctgttccattcaactcatgtctggtacagtaaccttgatcaaaagtcagagtccaggcaggccataggtaccactagagaagnnnnnnnnnnnnnnnnnnnnnnnnnnnnnnnnnnnnnnnnnnnnnnnnnnnnnnnnnnnnnnnnnnnnnnnnnnnnnnnnnnnnnnnnnnnnnnnnnnnnnnnnnnnnnnnnnnnnnnnnnnnnnnnnnnnnnnnnnnnnnnnnnnnnnnnnnnnnnnnnnnnnnnnnnnnnnnnnnnnnnnnnnnnnnnnnnnnnnnnnnnnnnnnnnnnnnnnnnnnnnnnnnnnnnnnnnnnnnnnnnnnnnnnnnnnnnnnnnnnnnnnnnnnnnnnnnnnnnnnnnnnnnnnnnnnnnnnnnnnnnnnnnnnnnnnnnnnnnnnnnnnnnnnnnnnnnnnnnnnnnnnnnnnnnnnnnnnnnnnnnnnnnnnnnnnnnnnnnnnnnnnnnnnnnnnnnnnnnnnnnnnnnnnnnnnnnnnnnnnnnnnnnnnnnnnnnnnnnnnnnnnnnnnnnnnnnnnnnnnnnnnnnnnnnnnnnnnnnnnnnnnnnnnnnnnnnnnnnnnnnnnnnnnnnnnnnnnnnnnnnnnnnnnnnnnnnnnnnnnnnnnnnnnnnnnnnnnnnnnnnnnnnnnnnnnnaagaaaatgagctgtctataaacgctcaggaagcccccttattctttacaatggagtgttggtagaccctatgcaggttgtgagcatgtaatcacagcttctgagtgcaatacacatacacacacacatacacacacatacacacacacacacacacacactctgtggaaatagaaagagaactatctgtaatgatagaagagatcagtggtagaggacaagcgagtaatgagcatgaatatgatgcaagtgcatcctatgtacatgtttatctgtgagaaaagagaccatcagcaggagggaggggacaagagggtaatgacccaaatgcattatatatacacgtattaaaatgtcataatgaagtctatcattatatacatcattatgtacacaatgaatatatgtatcaactttaattttttcaaaacaagaaattacagctttctcattgaatctagagtaaatctggcctcatccactagttggcaggaaagcaaaaagtcttgtctagtttaaacaattctaataggcattgctggatttctaatgaacaaaaatgcttcctccagatcagcaaaatggctcagcagggaaagcacttgccacgaaacttgacaactagaatttgatccctgggatccacgtggcagaaggagagaaacaattcccacacgttgccctttgacccgcttcttccaagcaatgtggagacagctggagagaaaactggctccatccaacttcacagttctgtaaagagtcagagtctacagaggtgaccgtccacaaaggcagtgctcccagatgcagacactgattcagcctcacagctcacagttcattgtgaagggggagtcgggggcaagaagagctcaaggcaggaagtgnnnnnnnnnnnnnnnnnnnnnnnnnnnnnnnnnnnnnnnnnnnnnnnnnnnnnnnnnnnnnnnnnnnnnnnnnnnnnnnnnnnnnnnnnnnnnnnnnnnnnnnnnnnnnnnnnnnnnnnnnnnnnnnnnnnnnnnnnnnnnnnnnnnnnnnnnnnnnnnnnnnnnnnnnnnnnnnnnnnnnnnnnnnnnnnnnnacactgtagctatcttcagacacaccaaaagagggcatcagatcccattatggatggttgtgagccacctcatggttgctgggaattgcactccagaactctggaagagcagtcagtgttcttaagggctgagccacctctgcagccctatagcacccggggcaacctgtgtagggatgatattgcccacagagagctcaattgtccctcatcgatcatcaatcaagaaatgctttagagacttgcacctcctcagatgag

SEQ ID NO: 110 - DNA, 1370 bp, Mus musculus
aaaagccaagatgacagactgagagcctgagcccttgtcttgcattctcccaggaagatgcagtaaaggggttgacccaatatactgcagagaatttcatccagttccctcctccatcctgatcccatgtgccaggaagatggagccacgcttgctgacgttggggtttctctcattaaccatagtacccagttgtcgggcagaactgtgtctgtatgacccacccgaggtccccaatgccacattcaaagccctctcctacaagaacggcaccatcctaaactgtgaatgcaagagaggtttccgaagactaaaggaattggtctatatgcgttgcttaggaaactcctggagcagcaactgccagtgcaccagcaactcccatgacaaatcgagaaagcaagttacagctcaacttgaacaccagaaagagcaacaaaccacaacagacatgcagaagccaacacagtctatgcaccaagagaaccttgcaggtcactgcagggagccacctccttggaaacatgaagattccaagagaatctatcatttcgtggttggacagagtgttcactacgagtgtattccgggatacaaggctctacagagaggtcctgctattagcatctgcaagatgaagtgtgggaaaacggggtggactcagccccagctcacatgtgtagatgaaagagaacaccaccgatttctggctagtgaggaatctcaaggaagcagaaattcttctcccgagagtgagacttcctgccccataaccaccacagatctcccacaacccacagaaacaactgcaatgacggtgacatttgtgctcactatggagtataaggtagcagtggccagctgcctcttcctgctcatcagcatcctcctcctgagcgggctcacctggcaacacagatggaggaagagcagaagaaccatctagcaagctagaaaagtcagagcccaggcaagcggatgagagcccaggcaagcggatgggaatcacaaagctcaagccaaatctgagacgtccaagcattcacctaatcggctgtttccttctgatccctgggtttctagaacattctgaagtcacaggacataacagcaactctatcactaaactggactttgccattgaagaataggatctaaccacttcagcacagcagttctaaagctttaatgggagagagggcccaacagtgctctgtgtgttttgtttttgtgtatatctgttgatcgggagctgagatggtgtggtcacttttcatgtaacatatagtatagaaaaagtagctttaggttgacttcattgttacaacccagtttggaaagcccaagtaaaactcagcactaatgtaaat

SEQ ID NO: 111 - DNA, 819 bp, Mus musculus
atgtgccaggaagatggagccacgttgctgatgttggggtttctctcattaaccatagtacccagttgtcgggcagaactgtgtctgtatgacccacccgaggtccccaatgccacattcaaagccctctcctacaagaacggcaccatcctaaactgtgaatgcaagagaggtttccgaagactaaaggaattggtctatatgcgttgcttaggaaactcctggagcagcaactgccagtgcaccagcaactcccatgacaaatcgagaaagcaagttacagctcaacttgaacaccagaaagagcaacaaaccacaacagacatgcagaagccaacacagtctatgcaccaagagaaccttacaggtcactgcagggagccacctccttggaaacatgaagattccaagagaatctatcatttcgtggaaggacagagtgttcactacgagtgtattccgggatacaaggctctacagagaggtcctgctattagcatctgcaagatgaagtgtgggaaaacggggtggactcagccccagctcacatgtgtagatgaaagagaacaccaccgatttctggctagtgaggaatctcaaggaagcagaaattcttctcccgagagtgagacttcctgccccataaccaccacagacttcccacaacccacagaaacaactgcaatgacggagacatttgtgctcacaatggagtataaggtagcagtggccagctgcctcttcctgctcatcagcatcctcctcctgagcgggctcacctggcaacacagatggaggaagagcagaagaaccatctag

SEQ ID NO: 112 - DNA, 70251 bp, Homo sapiens
  misc_feature (40192)..(42808): "n" at positions 40192 to 42808  can be any base
ctgtgcctaggctggagtgcagtggcacaatcggtagctcactgcagcctcaaccttccaggctcaaggatcctgccacctcagcctgctgagtagccgggactactggcacgcaccaacacacccagctaatttttaatttttttctagagaatctggtctcactatgttgcctaggctggtctcaaattcctggtcccaagcaatcctcctgccttagcttcccaaagtgctgggattacaggtgtgagcccccacacccagcccacttccgctcttagggagaggcgagtgcatttcagagagcactcgatgctcccaaaagaagaagttgacagagcccacgtcccctcagcccttcacacagcctccccttgtcttcctctcctactcagcactgtggctgcactaggacccctcatgatgaccaagatcctcataaagaggacaagaagttcatccagtaccagtcaggccaatatcccaaaattagcataactggcagaaatgcagaggcatcaacaactcctcttgacaacagggttggtagaagaatcaagggcctaattttgatgcctggcacaggttatgggagcagcagagtacatgctgcccagcggcttccagaagctcctggtccaccccgtcaagaagccggaggtcctgctgaggtgcaacacatctcagtgtgctgagactgccctcaatgttgcccccaagaactgcaaagccatcctggaaacagtggcccagctgcccattggagtcaccaatcccagtgccaagctgtgcagcaaagaaaaggattagactgctcatgtgcacgttttatttgtttttaaattaaaaaacaaaaaaaagaaagaaggaggaagtggaggaagaggaaggaggagggaggaggaggaggaatttacatcagcaggccgatcacatactagtccttgaattcatggttgaatgtactgaccattctccctacggacacttgaaggtttccatcaaacccttcataacatattgcataattgtggactctagacttgggccacaactgagtgattttttttttctcaaacccaattccacaaagtaaaagcctgatgaaatacagtgaaggctgatgccttattaactgtgtttcccaaatccagagctctaaaaaggttctgcatacagtcattcattcaatgcttaacgactgagcattaattccatgctaagtactgaactcagcactaggaataagaaggcgacctagaggcatatcctctctctaaagatgcatagagcctcattggaatgatcagccgtgtctccagagagctacaaggcagttttcaattggtaaatgccctgagagtgatgggcttgtggcatgtgtaagggttagacagacctgggacctagacatgacaccactcctgacgaattatgtgagtgtgggtgtttcacaaccacaatgagatgcaatgcctgcacttgtaacatggaaatagtgatggcatgccggccccgccagattgctgtgagaagtcagcggcagagacatgcaacattctcagcacagtgcttgccatgtagtaagggcctagtcagtgctagtgattcctttcaatattcctaagatgcagataagggaacagcccagaggagggggagcacttccagagggagggatgcggtgagacttccttcagcagggtagcactggagctgggtgttaaggagtgagtgagctttgggcttatggatttaacagaggaaaccaagaaaagaggaggcggtgttgcaggaacagtgagcagttgatgatttttattttgttctctggtctgcttgggaacatttttgtggcaaagacagcatgaaggatagcgaagaattaatactgaagagataggccagggcaggttatgaaggattttgaataccgggctaagaaatgtgggcttaatttcaaagacattatggacactcctaaaatgttacgttgtagataagggaaaagtattcttccagaagattaaattggggctgggcacggtggctcacgcctgtgatcccagcactttgggaggcgaagtgggcagatcacctgaggtcaggagtttgagatcagcctggccaacgtggtgaagccccatctctactgaaaaaaaaaattagccgggcatggtggtgggtgcctgtaatctcagctacttgggaggctgaagcaggagaatcacatgaacctgggaggcagaggttgcagtgagccaagattgcaccactgcattccagtgggcgacagagcaagactcagtcaaaaaaaaaaaaagattaaactggaagcaatgggtaagaatggtggagtggagagacacatttgagtgagggaagccagctgaaaagctgtacagacgtctagacaaaatgtgacacaagcatgccttcacctccctgcaaagaccacagaccactgagctccaaagggggtttggaatccttgtcctgggccgccattggtaactcatcagtgctggcttgagagataaactctattatccatccctgaactaaaatcatgacagaagtggccagggagctttgctgctatccccccaggaaacacgtcctccactcaaatggaaagaggaccctctgacaacatctgtgggacccaacagcactggtcaccacaagccacaaaatgttaacaaagtcagttttcaattgttagggacggaggactcagttcatgattcatacaaaccaactgttctctcccagtgttttctgggtggcacaacccacaagtcaacagtggcttgggaactagacatttgagtagagttgggttatttgattcatagtggattttggttttccacgggacccctgtgcccttgtctagtagaatctggtggaaattacaaactgcagaaattcaactcagtgccgcaataacaggatgcacctgtagatttcgtagaattagcagcagcattctttcaataccagtttgagagaaataaccctgtttgcatagtgccaactggggcagaatctgaagtgtcttgcctgcctctcggccatgggaggcaccgatctcagcaacatctatccaaccgccatccacttaacaagcaaagatggaaggccctcgtgctccaggctatcctgcaatggttcatttgcttttgatgggattatcactttgacagatgtgcttgcaattaactgggggctttctgcttccaatccaaattcccacaggtggatcactggctcttggggagcaaaaacccttctttgtttgtttttgcttctcccagagcctgggcagagctccccattcctggatcctacgttgatatgcactgaattgaattatactaaagggtgcacccaagagtgcatgagctaagtaaaatgtaatttgtgggacctcatgtggacatttcaggtccatgtgtacaagataaaggagagaaaatcctgggggacaccacaggcctgggaaaatgacctcctactaagcctaacaagaacatccagtacataaacagcaggctctctgcaaccgcttcggtccttccactgccacgctcccagaaagcaaagggttatctcctgttcggattttggctctgagaccacagctcagcacatcactcctctagagaaaagaaagtctaagatgagagagtgaggctgctttcatgtggtgccagcgtatagtgcagggcaggcctgattgctgaacggatccctgcagacgtgagcggtcacttccccttttgagggcccatttcttttcctctttgaggagactgtgagcgtcctcagtgcagggctatgttttagcttcttggctctcctcacaggttctagcataattctttgattaattgcagtcaacgtttattgatggattatgtgacagaggtgaaattctttgatctgggtttcagcttttcctttcccccactccctcctttttctttttttttttttttttttttagaggcgaggtcttgctctgtggccctggctggagtgcagtggtgcaatcatagctcattgcagccttgacctcctggggtcaagcgaacctcaacgtcttggcctcctgagtagctgggactataggcatgcgccaccacgctcagcttcaccttttcctttccttgtgctcccctggcagatatgctggtaaacaatgaaccagtcaagaggacagcaacaggaggaaaatgggagaaaccccattattcgtggactaaacaggcttcccactagtcctggctcacagaggaagtcatgctccatgtttcaaatgtcctcaaagctcgttcaactccaaaatgcatgaagacaaaatgggaattttactcaagatttttgtgggctgttggggagaagagttaacattgcaaagcatattgcaaactcttatcttcaaatgattttaaaattttcttccaagctctttattatttctccagagctgccctgctcttcccactctgggtcctttctctgccactctcctcagcatgacttctccctaatcggccagcatttcttttattctatagagcaagttttcttgccctgggcacctctcatttgcatgttataccaccacaccaagtgagcctcagagcaccagtgttttaatccctgaaaacagtccttacgggattcagcacagaggtcctcttggcagcctgtagtctccagagtgacacgtcctcaacagtcaaagtgagcaagctatggtgcccatcaccaagtggggctcaccatttccctctgcgttcacttctctcctaccttcttccttatcccatccttcctccttcctttttttttctgcattcaattattcatggttattcatttcatacgggcatctgtgccacttggttctacaggcattttttttttttgagacagacttttgcccttgtcccccaggctggcgtgcagcggtgtgatcttggctcactgcaatctccacctcctaggttcaagcaagtctcctgccttagcctcccaagtagctggaattacaggcatgtgccaccaagcccggcaaatttttgtatttttagtagagacagggtttcaccatgttggccaggctggtctcaaactcctgacctcaggtgatctgcctgcctcggcctcccaaagtgctgggataacaggcgtgagccatcgtgctcggccggttctatgggcattgtggaagtgaccgttaacaagccccaagggtaagtaaaggaaaatgaaaggtgattgattcctcaccacctctccccttttttcctctactctttgcccctgctccccaatctagactctaataaacagaaatgatttttgttgcaagctgaaaactcgttcttgtggttggggctaggggggtggcaagtcaagctttagagttgtctggataataaatgctgtcttcaaggactgtccaacattgtaggaacaagagaacaacccaagtgaacaactaactcctgttcacaaatgctactgcctctctgccatcccctaacctcagcctcacacacttgaatttcgccaatccatttgatgagctcaaatcagtgaattttctcctcgccaaagctcacaaattctgttccccgcttcttgccccacatccaggcattaccaactgcattttccctttgcctgatattctggcatcaagcctccttgccattccaatttatttcaccttcctccagtccttatgatttccttcctgaagagtatttcagcatctctatgcctcaatcttccctgcacaccacaccagctcggcctcatcatcacatcacttggctatgtcccgcctgggttagacagcttcagtggctgaagtccatagatcttattctgtttttcgaggtccacctgactctgaatccagctgatatttctgcccttagcttctacccctctctacttctggttaactatggaccacactctgcttcctcaggaaccacctaccaaggccgtatccatccttcaaggacaatacgtgggcctttcctgatcacatcagctcaacaacttttccctcctacatttcaattgctcttcttaccataatcattagtattcaccccactgtacgtctagaaagaaagtggtcttaaacctaagggaaggcagtctaggtcagaaatttgttgtccgctgttctgagcagtttcttctaggaagtaccaaacatttctgataatagaattgagcaatttcctgatgaagtgagactcagcttgcactgttgaccggctgtccctggatgaacctagttacttttaaccaaatgttcctttcttgaacttgttcctttcttgaacttaatctaccaatgttatctagataactttcctcaaaaaaaaaaaaaaaaaaaaaaaccctctactaggaaagaaatctttgaaccggacttattggaaattacctccttgcagcaggtttgaaacaaaactttgaatttgcctcacaaagaatttgtctgaaactgctttagtatatgctagttatatttgtatgcacatgtggcttcatacatagtggttggacacccatatgtgttatgcactttgttaggtgacgtaagttcacagataaactggacatagggctatcctctagaggcccacagtttgacaccttaacctgagatccttggacctttgaagttcagagtgcccacaaccgctgggtgtggtggctcacacttgtaatcccagtactctgcagggctgaggtgggaggatcgcttgagtccaggagtctgagaccagcctgggcaacatgacaaaaccccatctctacaaaaattacaaaaaaaattagccaggcctggtggtgcatgcctgtggtcccagttacttgagaggctgaagtgggaggatcacttgagtcaaggaggtagaggctgcagtgagttgagatggcaacactgcactccagaaaccccatctcaaacaaaacagagcaaaacaaaacaaactgcccataatgctcctgaaacttcctacggatttatccagagtatgtgctgatgtgcattttttccaaggagggaaaccaaaggttctatcaaattaagaaaagagtttttaccattgtggaagacagtatggcgattcctcaagcatctaaaatcagaaataccatttgacccagcaatcctattactgggtatatacccaaaggaatagaaatcattctactataaagtcacatgcacccgtatgtttattgcagcactatttacaatagcaaaatggaaccaactgaaatgcccatcaatgagactagataaagaaaatgtgatacatatacaccatggaatactatgcagccatgaaaaggaatgagatcatgtccttggcagggacatggatgaagctggaagccattatcctcagcaaactaacacaggaacagaaaaccaaatgccgcatgttctcactcataagtgggagttgaacaatgacagcacatagacatagggaggggaacatcacacgccagggcctgctgcagggtggggggtggggtgtgaggggagggaacttagaagacaggtgagtaggtgcagcagaccaccatggcgcacttatacctatgtaaccaacctgcacgttctacacatgtatcctggaacttaaattaaaaacaaaaaagagtttttaatccaaaaaagattaacagcaactagaagaaagaaagagatataaacagtgaattgcaatgcagcacggcaggtgttatgatggagtagaaaggactggaaaaggcctcctggaggaagggacactcaagtgtctttccatttcacctgtaaactcattaagggcaaaagctttgctacagcttcagtatgagatcctgggcaatccgtgacaaaatgggtctgcttttgcacccccaacttcttctcacatccctgcatcgtgccatgcagcatcaactggaaacctcagcatcagcaaacgacgacagagcgttcatccgtaaggtgaaccagaaaagccagttcaatgacttgtttaaccatggtccatctcagaaccaagagttgggcctcttatttaccagaaaaattgtgggggctttgtgatatggctttaaaaaaatcttgtaattgccaggcgtggtggctcacacctgtaatcccagcactttgggaggccgaggtgggtgaatcgcctaaggtcaggagttcgagaccagcctgaccaacatggtgaaactccgtctctactaaaaatacaaaaactagctggatgtggtgacgcgtgcctgtaatcctagctactcaggaggctgacgcaggagaatcacttgaacctgggaggcagaggttgcagtgagccaagattgtgccattgcgctccaaaaaaaaaaaaaaaatacattaacataaatttaaatattttataatgacaatccacattaactacttaaagcataagctattttccaggagaggcagcaagtgcattctactcccatgcccaagaagaaaggagcgtgactttggtgggagtactaggagtttctactggagcacttgcccgcagagtgagaaacgttcctagagaggaagttatacctgctgtggaatttaagagaatcttgtcatattttgacaagttttttgagatggaagtctcactctgtcgcccaggctggagtgcagtggcgcaatctcagctcactgcagcctgcacctcctcggttccagctattctcttgtctcagcctcctgagtaactgggattacaggcgcccgccactacgcctggctaatttttgtatttttagtagaaatggggttttaccatgttggccagactggtctcaaactcccgacctcaggtgatctgcctgcctcagcctcccaaagtgctggaattacaggcgtgtgccactgcgcctggctaatttttttttttttttttttttagtagagacggtggtttcaccatgtcatccaggctggtctcaaactcctgacctcaggtgatccacccaccttggtctaccaaagtgctcggattacaggcatgagccaccaggcccagtcaacgtgatgtgttttggaaccctgaattccttggcttgcccggagggttttctttttgttaatatctttgcttgctttctagtatttaaaaaattgtgttttgctctaactatgcaatggctttaagtcttagacaaatttccagggagcaaaacacactcaaccatttcataataatcagaagagagctctgatcaataaataagcaagactgaattttacaaaataatccaaagtttaaaaccaaagcccactttttgcatgatcctttaagagaaagaaatctggaagcaaaacaccttataaaatgacaatgcactttcaggagcccagggcactgtggtgaaatgatgatggctagtacaggttataagccttggggaattatttatgaattctcaggatccttcagttcgccgcatccttctccattatttgaatattggaggctgcctgaccagaatcttgtcaggactttgctccttcatcccaggtggtcccggctgactcctgaggacgttacagccctgaggggaggactcagcttatgaagtgctgggtgagaccactgccaagaagtgcttgctcaccctaccttcaacggcaggggaatctccctctccttttatgggcgtagctgaagaaaggattcataaatgaagttcaatccttctcatcaaccccagcccacacctccagcaattgaacttgaaaaaaaaaacctggtttgaaaaattaccgcaaactatattgtcatcaaaaaaaaaaaaaaaaaaaaacacttcctatatttgagatgagagaagagagtgctaggcagtttcctggctgaacacgccagcccaatacttaaagagagcaactcctgactccgatagagactggatggacccacaagggtgacagcccaggcggaccgatcttcccatcccacatcctccggcgcgatgccaaaaagaggctgacggcaactgggccttctgcagagaaagacctccgcttcactgccccggctggtcccaagggtcaggaagatggattcatacctgctgatgtggggactgctcacgttcatcatggtgcctggctgccaggcaggtaagggcctgtgggtgcccccggaattccgggaaggctgatgggcatccctcttcccagccacagaaccagagggagtccccaggtagatggttccaagaagggagttgaatcttgggttccacctcttgcctgtgacccacggggaccccagtttatgcctcactgttccttggtctgtcaagagagcctgaaatagcattaggttctcctgtccttctcagtccttgacaattaattctgggaagaatagtgtggcatgatatttgggatatttggatgttaacagggtcccgatgagcaggtttctcaagaaattatcttttattcttcaatgaatttccttttattctctgcactcccaccccccaactaagaagctatcaggaagctctttaagttcaggttaatttgctggagacatgagtactcatatatcaaacactgggagaatttaagatctcagaaaagtttagcttcaaggatgtatacactgcttttacgtcttaggaaataacacctaggaatttccttacaagtgcaactttacagaaatttttaaaaatatgcatactcacttttagaacattactacttctcataatcctatgtatatacatgatatgtatatgtatacgtgtttatatatgcaaattttaaatttcattccttgtttcaaatggattttctcgaagattttttttttttgacactgtctctgtcagccagactggagtgcagtggcgcgatattggcttactgcaaccttcgcctcccaggcttagcgatcctcccacctcagcctcctgagtagctgggactacaggcatacgccaccacacctggttaatttatttttttgtagagatggggtttttgccatgttgcccaagctggtcttgaactcctgggctcaagtgatccactcaccctggcctcccatactgctggtactacaggcatgaaccaccgtgcctggccaatatttttttttaaagaaataaaaaaccaccaacttctacctcaaaccactcttcctaattgagtgtgaattttctaataatgtcttccctttgcttactcaggaagacagataagaaagtttatagtgttttttgaaagtctataatggcaacaagtagaatgctaactggctgtagaaagaatttattaagaaatgaaacataatgatgcatttcaggagtctgcttgcttgtttaggggaagtgcccagtcatgctgggctgtgtactggcccagatgtaggagtgtctttaaagagggcattttatttacttattacatttttatttattttttttttactttttgagacagagtctcactctgttgcccaggctggagtgcagtggcgtgatctcagtccactgcaacctccacctcatgggctcaagtaattctcgtgcctcagactcctgagtagctaggtttacaggtgcgtgcaccaccacgaccagctaatttttgtatttttagtagagatggggtttcaccatattggtcaggctggtctcaaactcctgaccttgtggtccaccagccatggcctcccaaagtgctgggattacaggtgtgagccatcgcgcctgacctatgtgttttattttaataggttttggaggacaggtggtgtttggttacatgaataagttctttagtggtgatttgtaagattttggtgcacccatcacctgagcatgtatgctgtacccaatgcgttgtaagattttggtgcacccatcacctgagcatgtatgctgtacccagtgcgtagtctcttttccctcacccacctcgcaccctttcccctgagtcctcagagtccatcgtgccgttcttataaagagggcatacttttaggaaggtttttcaatgtgatttctacatccacagggtctttgctaactcagtctaagccaagaacaggaaaatcttgacaattaatcatgctctgcctctggaagacacatttcaagtaaactcgtgttatttctagctattggtgacttatccaagggtctgagtggtcttggagggagcaggggaactagagtcccataaggactccttcacgccattctcaacatctatccataccccatctgcccctcaacactataggaaatacaaaaatgagggagatatagtcctgacacttaagcaacttataacctggtgaggaggagaaaaacatagatataaatatagtaataccagtcagagtgtggtaagatctacggagcgttgggctatcagagaaggcttcatgaggatgacatgtaaagggagccccaagggaccagtaaatttccatcaatgagattccagggagagagaccccaatgagccaaaacacaggagtgccttagggagcagcaggtggtccaatgtgctcctgccctggacagggagggtggggatatggggaattcaaactggaaagttaggatgaggtaaaatgaatcatctaaggcattaggcatttttagtctgtatattgctgggccctgggatgtggtcagaaagagaattctcctagtgataacttcttaacttcacctagtaggcaataaagaactacaagaaaatttaaaactaccatttataaagtaacttctatgtgccagatatgtgtcctattgtaatcttcatagccactttgcagtatggatatcatgaacccctagatgaagcaagaacccaaaactcagactcgcacaggcagtgagagtgccagggtttgaacctggtctccctggattgttctgtttctgttcattgcaaacagggtcagcgctttatggagatgatactggcatagagtggagagagatcaggtgcacagagacaggtcatgaggctcttaaaatagtccaatcacaaggcaaatgaggacccagtggccaaagacaatgacaggggtcaagtttctggaatcaacaggaatttctaggcatcactccagggtaagaaaccatctcatcacagactttttctccaagaggaacctagtcttgaaacaaatcagactttttattcctcagggtaagagttctctaatgaaatcagactgtcaacagatgcaatttctagctgattcataagggcagattttcattctgaaaatttccaaagccaccatttaacatggcaagggtttatgaggacatattagtcaacttgagtgtttttagtctctatattactgggctctgggatgtggtcagaaagagaattctcctggtattaccaatatggcacgttattgaaggcacctttctcagaactgtggaaattctgagagcttgtatgtcccttgatcatctttctttcattctaggaattctgtgatcaaatctttatcctctagactcaaaaataattctttaaaaaaacagtgtggaaacccattgagataatgtgtttgtgtaattatccattcttgtaaagacaactgcccacaatggaatttcccatcttcacctttgtcagtcaaacacaaaatgtttaacccttcacatttaatctttcaacttcttgagatcccaaagtattattgctactgttacttcattcatcttcaagacatgtcttgaggctgtaagggctttcctaaacattgggagctcttcataagacagttgctactttccttaaaacagcatgccttaaataggcagtttgataaatcacctgtgcatatacttcattttagatgtgagaattgaaaaagaaaaaaattgacttcacaattctgcaccaaaagaatgagtttcacgaatgcgtcagttagaggtgctaatatagaacggttgctgagctctaaaactccactactccaccccactcccctgatagagaagtattcccagactggtttttgcctaaagccttgggtattctgaatacctctttgtgatttttttttctcttcctttttgagacagggtctcactctgtcactcaggctggagtgcagtggcgagatattggctcactgcaacctctgcctcccgggttcaagtgattctcctgcctcagcctccccaagtagctgggattacaggcacctgccaccacgcctggctaatttttgtatttttagtagagacggggtttcaccaagttggccaggctggtctcgaactcctgacctcaggtgatctgcccaccttggcctcccaaagcactgggattacaggcatgagccaccgcacccagtcctctttgtgacttttttgttggagtcattcttctgcgagctatggatatcatcaaggcaggcagtccctcaacgtggcagctgttcccacccttccctgctcctcttcttgcccaaggatgagcagaaactttacagaaaaagagagaattccctcaggaaatgaggcatgttgcttgaggtcacagggaatagaattagcaggaaaataaaccttgcaggaagcagaaagtgggccaaagcactgaggagaggacacggggagggcgtgagtttttgacagatttctctctgtaaaatgaggaggtcacccagggatcttgaaactcccttccagttccttcactctatgtcaaggattccagaaaggaaataaaataagctctgcttaaaaggcattttcaagctggggaactttgggatgaaaaagtttcccaaatgaagacatactggcacggtcagggttgagcgacttttgtgtatcaatgcacccaagcctgatgtctcattgtgggttatttccagctctgaagaagtactgcctggcagccagcatgacccactgcttctgtaattgctgcagttgcaggtgtcaacgcaaaaactccactcactcaattctcaaaatctatccaatatctctcatgccccttttcaatactataggaaatgtaaaaatgagcgacatagtcctgatccttaagagagtcataagttggtgaggaggagaaaggcatagatatagtcatggtaacacaagtcatatgtggtaagatctactgagcatggggctatcagagaaagcttcatgagggtgacatggaaagggagccctgagggactggtaaatttccatcagtgacattccagggagagaggccccaagacacaggggcagcaggtggtccactgtgctcctgccctggacagggagggcggggtcctctgctgtttgtttgcttgtgtaggaattttcccctcaaacaatgtccttgtctcccatgggagaagttttacatgagtgggaacctgtttctcttctctatcccaggccattccctgagagaagagaaaggggaatcttttttttttttggacagtttcgctctgtcgcccaggctagagcacagtggtgcaatctcaactcactgcaaccttcagctcctgggttcaagtgattctcctgcctctgtctcctgagtagctgggattacaggtgtgcaccaccatgcctggctccttttttgtaattttagtagagagggggtttttgctatgttgcgtaggctggtcttgaactccgagcctcaagccatccatctgcatgggccttccaaagtgctgggattacaggcatgagccactgtgcccagctgaaaagagaatcttaattcagttgattacttctaaaagttataagaccttcttcactgaaagagttcacatagaagctgaacttgaatccagccctcttaaatttcagttcaatattccctgcacatctgcacatctttacatgaattctcagtgatattccttcatccatccattcatgcatgaggattacagagatgaagaaagttccagctcttatcctcttgtgctcacagtttaacacgggagatgaaactgctgctgaatggctcccattctgaagtcagccaacagtgtttgccaatagcccccactgaataccccaccatattctcaagtaactcactcatttaggggaaaacaataatataattgtctctagaaattttaggtattctccactctaagattactcagtgttttgactgatctcaaggcgactccgtggtttgcttctgtcaaaaagaaaacacagttcccactgggaaatgtgtggagagtaatggttcaaaacgccagctgtacattagtgtatatccaggatgctttaaaaagtgatggccaagactcataagatgaattaagcggactctctggggaacagaaccgaacatcacaataccttcccttccagttccttgaatacttccaaatcgcacttaggattgaaactcaccaaattagagagatggaataatgatttccatggttggtctgattcactaggaacaggtatgctcaagcagtacttctcaacctttaatgcatttggaaatcatccagggatcttgtcacggagcaaattctgactcgggaggtcaggggttaccgcctaagattctggtgcaaacaggttccacaggaggcctatgttgtgggtgcatgaaccccattttgagtaacaaggctatcaagtcagagaataaatacgcattgcttttacccacacagaacttgcgactgaaatgagaaaataggctgagtgtgatagctcatgcctgtaatacctgcactttgggaggccaaggcaggaggatcccatgagcccaggagttcaaaaccagcctgggcaacatagtgagactctgcctcttaaaaaaaaattagaaaaagggaaaaccaatctgggaaagatcaaatattgatcaaacattgcaaataatgccataaatgatcagaatagggagagtaacatgctacctggagaactagaaaaaaaattctcagagaaggtggccctgggacctcctggctctgaatggtggttctgaatatcaggagaggggctggagaatggtgttttctagtgatgctgctggagtcgtgtacatggaccgtgttccatgagtagtgagctgaccaattagagagatgaggggtttgccaggacaactacataatgagccatatttcaacatacatgcagttttgtgtgtgtgtgccaagcaaatgagtctcagattctcggacaaaaacgaatacttttgctcagacagacagcatgtgagtgcttctcccccagcttcaaccctgcagtgtctacaggtgtcattggtccccggtagacgtcctcggttcaatgggtcactgatcacttatcaccagcaccacatgaccctggatggcagccaaagagttcctgggtcttgtttccctacctccacatttttttcctgacccagcccgagccacgtgcacaccacagggctggagtcccagtgcttttgtcctgacagcccattctcccactcccacacccaaccagttccccggggggtttttgaccagcagctccgcctgcagccctcgacccggatccaggcatcctgcttaaggaggggttcaggtggcaggaaactccagggcaacaaagtgtgggtggcatgggtggggttgaccggaaggtcactgtgctgggaggaagaggaacgggtggagggaaggcaagatacggatcaggagtattgacatcctgtgccagtagaggggcctgccccatggtggaaggtgtggccggatgagctcgctggcccatgtccccccgtttcccaggctttttcctcccacgctgtatgcagtgcaagaacaagctggtgcaattggactagcagcaattgagtccttttacccaaaagaagaagaaagagcaatgtttcaaaagaataaaaaggaagctgcagccaggtgcagtggctcattcctgtaatcccagcactttggggggccaagaggggaggatccctggagcccaggagtttgagaccagcctgggcaacatagtgagaccccacctctattttttaaaatgataattaattttaaataaggaagtttgtgaaagccattggtttctttattctaaagagcgtggaaaataggacagtctccaacaggccctgatttcctttggtaagaaaatgagcaaagctatagactaggaaacatgactggttaaagccggcccatgcaccaactccgatactgatagttatgtttcctttcgttcttatttgcttcaagctttgatccagaaaacatttgaacactagctagaaccaccacagtgaatatccattgcctaaatgctatctttcaggtattatgttcagacatagtattactttggttaattctcaaaataaagtaggtcatatgattatccccattttctgcctggtgaactgtggttaaatgggcttacagagattaaatgggttgcctgatgtagcccaacgaggaaggggctaggataggaagcaggcgctctcattccagaacctgccttttttcctcctgtctaaactgctgctaaaggtcaaagacaaaggtgccatgtgagcagggaagttatttttgttttttacaaaggtgaagtaataggctgtgagtaatgcccactgctccttcagccccaggtacatgcagtgaggcggtacccacagagccgcgtggcactcctcaacctgctagagcagccggcctcctgcaggatggcttaaggaccacctggtccttggggtctgggttctccgggtcctgctgttccctgcagccttccttctacccccagagcagcttgggggcatctttagagaaagcggcagtgtcgcacctgccccagcagccacaaaacagaggaaattctgagcacctccgggcgtgagtcaccataccacattcaggaattgccacctctgcccacagaatcacccactcttttctgtttgggaccaaaatagatacctccttcagaagccgctgctttctgtactctcagcaataaaaaaacaaaggctaggataggtgtgtgcctctgaggcgtgagggggggcgcgttttctcccctgggaaggttttcagagagaagttgttgctacagcagtacaggcagctgatgggttgagggtacaggaggaagagggaaagtcagggagattggagacaacctcttgtgtggtaggacttccggctattggtttgttcattcctttgttcattcattcattcagcaaatgttcattgaggaactgctatgtgtcaggcacagggtttgagacacagagatgaataagagcccatccttgacctctgcacagacaattatgacacaggctaagtgctgagatacaagtttaaagaaggagtcgatggaacacacagatcgatgttcattacccctgcaaaacccagcacatctcacatcagggactgcctcattcacatcatgttagatgtgacagagaggacagcagagagcgttgttttgtcatcaactactaaaattattaaaaccaaacaccactaattttgaacttcaggtagacagaggatgtagagttttcctttgctcaagaaattcctttacagagaaaatgggaacatttcaagtgggagtatttcaattcctttaataacaacctgttttctagctcccacattccccaagtattctagaagcacctttcataatggacagctctgaccaactgccccacacacatgcatgtgaaccgttctccaatcctaaaagtctgtgacttctccaaggaaaggaggaaggaatcgtattagtccagtttacattattatatactttgtagcaaagcagcaatgtttccttaaaaaattctatatatatatatatatatatatatatatatatatatatatatatagctgggcatgatggctcacgtctgtaatcccagcactttgggaggctgaggcgggcagatcacctgaggtcaggagttcgagaacagctgaccaacatggtgaaaccccgtctctactaaaaatacaaaagttagccaggtgtggtggcacatgcctgtaatcccagctactcagggaggctgaggcaggagaatcccctgaacctggaggctgaggttgcagtgagccgagattgagccactgcactccagcctgggtgacagagggaaactccgtctcaaaaaaaaaaagaaaaaaaaaaatatatatatatatatttgtgtgtattttctcctcatgaaatgagctccttgaagcaaatcggcccatcttttcagagaaagatcagtttattacgtcaccaagtaaagggcaaaggaatcatttctaaaagtttcgtttgaagtccccggagttaaagttgacgtcagcctcttcctgccctggtgccccgagagtttcccgggagttttggggatgacacccggctgcatgcgtgacatctcgctggctgggggcaggcctggtggcttccccgacaatgaaaccaggcagagcctgcaacccagctgagcaccagtgtggtctctgcttccggtccttgtggtagcacctctgtttacagcctgatttagaacaaaaagaacttttgtaaaggagaaaactccttatattaaatggaaagcaaaacaaacaattaccaaaaaaaaaaaaaagttggaggggtgtttcagaataaaagagccgtctctccagacatctgtctgacgcccaggtggcgctgagaccacagggtgagccttttggctggagatgttgatccctggtttactgcacttcgggctttcactacctttcacccaccggaccatcagtttcactttccctctcccagcgtctctcaagctctgcttctctggccccgttttcaatctagtgcaagaggacctgtagccagggcacccatcctcctcctcctcgtcctgcactgggatcccagctctgagcactcccgggccagggaggccttgctgcgtgctctgcttctgtgatcttacagattcctcatggccaccataggagatggggactgttagcactattcccccaccccaaccaccttttttttgagacagagtctcactctgttgcccagactggagtgcagtggtatgatctcggctcactgcaacctctgcctcccgggttcaagagattctcatgcctcagcctccccagtagctgggattacaggcatgccccatcgccatgcctgactaatttttgtatttttagtagagacaggttagtagagaccatgttggccaggctggtctcaaactcctgacctcaattgatccaccagtctcagcctcccaaagtgctgggattacaggcttgagccaccacgccctgccaccattcccattttacggatgaggaaactgagaccatgaggcagtaattcactctcccaagaaagcaaggagccagtagatctgagcagaacccatgcattcaggccgacacaggaagcaagctgtcaacaggcactgttcatctcctgggcttcctaggcaggccctgaagctctggttttcagtcaccctgttattcatccccaagttaatctcccctgaaagcacctgtcgtgatgccctttcggctgcaagagctccagtcatttccattgcctcaggggcactttgctacctcctctgcctggcacacaacatgctccccagccaagactgttccctcagcacatagcacgccttggccagcaggtctcctcctgtccttcaaagggaacctcctcatttgtgatttcaaagctggactcccaggaacaccctcctcccttactggaacaatcttccccatcttgtctgcctaccggaatttttcccaaccagaaaagcgtcttgagagaatggaaaagtcttatgaatttggaaagttgacagcttgaattcaaatcctagcttgaacttgtgaatttctactttcctttacgaaaacctttgcatgccattctgtgcaggcactagcaaggtggtgggagggagatggatacagtagggtgagtgccgtgtaaagaaaagggagcaaagtctgggactgcagagaaatgccacaaagcacagacagaagagtcccggaggcttcccagagaaagatgacagccaatgggagacctccagggaaagcaggagttaagaaggtagaaatgcattagggaagtgtggcatgagcatgatggtcaatttcaatgtgtccacttgcctgggctaagggatgcccagatagctggctaaacagtctctctgggggtgtctgtgagggtatttccaggagacactagcatttgaattgaatagactgggtaaatttcttgttggtagactgagtaaagaaaatcaccctcaccagtgtggtggggatcatccaaccttagaggaccagaatagaacaagaaggcagaggaaggttgcattctctctgttcaagctgggacatccgtcgtctgctcttggacatttgcactcctggttctccagcttttggactctgggacttacagcagggcccctctgctcctcaggccttcagtcttagactgagccacaccaccagctttcctagttatccagctccagctggcatattgtgggacttctcagcctccataattgagtgagccaactcccattataaatattctcttatttatctacatacatcctattggttttgtttctctagagaaattctgtttccctgaataatacaatgaccaaggcccaagacaaaacacatggtgagctccaagagccacgcagagtcccgcaaggcaggagagctcaggcacatagtggaagcagagattttgaagttgggcatgagctgtgtcttggagtctccccatgtcactgggcttaaactgtgtcctggaaggaacagaacatcccagaggggtctcagtcagggcatggcttgtactttggagagacagcattgggtttatgtgaagaatgaaggaagaagagaaagcactgggtttatgtgaagaatgaagggaagcagaaaggcaaacccatagggcattgagtaacctccatggaagtccatgagggtagggttttaacctcggtgggcctcagcttctgttcgtataaaatgggaataacacagaccctgctgggtgctgtaaggctacataagctagcctgcctagagtgaccagagcacacagtaggtgctcactaaatgtgacttgctgggcttctagtctgcatggccaaaggcccttccctcggacctttccgtgtggatgcctcacaggctgctcagtctacacatccagaactgtcctccctccctggaacctactctttctcctctctttgctatctcaatgaatggcaccccatcctccccatcgcccaggaaatctgggcaaaatcctcatttcttccttgctgtcctccatgcacctaataatccagcctcaatttttggcaattccaacttctaaaatctcttaacgccagcaacccctcttcttgcttacttatcaccacccacctcaggactcccatgacagccttcctgtgatgcatgacgggcacatgacaagggcagttgagggtcaggggccacgggagcaggatgcagccagcacatgagggaggataggcgggaggacaggcagacacttgtgcgtaagagcacgcacttgtcaggctgcctgggtccaagtcctagctccaccactgaggggctgtgtgtctctgggcaagtcactgggcctctctgtgccttagttcctgcctctagagaacggagatgagaagaacacatcacctcataattaattactgcataagtaataattttaattatattgactattatactctattagtgtatgatgtcttttattatatatatttatcatataatatactaattatattaatgagtatactatagtattttatataacataccctaattgcttattatatatctgtataattattttatcatataagataatttcataagctaagatggtattttatatatttcatttattatatatttatatttatatactttattgtatttgaattgtgatgtctaataaaataatagatatgttaattatccttcatattcataataagctccttcattggtgtctgggaagccgagaacatttgtgcgtgtgagctctcctgtgtgttcggcatgcagtgtgttgcgtctcagctgacgtgattgctgtttttggtggcccggaggcacagggtgcatgctacaggcaggaagagctttggagcaggctgactcctgagctctcctctggtgccgtggcttctgaggcccccaggtgacaaccagcctttgccattctagtgtttcctctatgttcatcccgcgttctgagtgtggcacaggccacactcctgaccccaccagcatcaggtgctgtgcacatggtatgaggtcgggatggagtgctgttggcatgggggttgttccttgggctacctgtgtccacatggtctgattaaccccttctgcacatcagcaagggttcagcacctcctcagggttagggcatgcgcagggcatgcagggatttgagggtccttggacaatgcatgttctccatgcaagcatgcagagacatggagagggtctttgtccctttcagtcctaacattctgtggcttcataactacttgtcccacacccgagtaaaaagcaggatcttctcagcactgtgctgaggaagtctttaaaccttccagtaggacatgggatccctgcctgcatcttaagttcccatgtccttaggaaacgtggccaccttggaattcagctctccaagaagcccagtgtgaatgcccattgcaggagcatctgagctcacccccactaaccctgaggtatctgttgaaaagaatagaacccacccactgaaactatcagagatcaaatgttgtgtgttgactaagaatttgtgttaaggcagggatagttgagcaccaatgctttcaaggaactctggagaaatgcaagcctgtatttcctctcagcatggctgcagaagagggccagggcagcagacaggcattttgacccactcacagatgaatacaaagactaaactcagcaaaagccttgaggttgcatttatgtgtctgagaacagtccctggagcacaggcatgggcttttggtaccacgtaacctacaaccgtaagctctctgctctatgctgtccactccatcaatcccacagtgcctgaaatgtcattgtcttacccgatgtctggggtagcatctgtgaacacacggatttgacacttttatgatgctgtttgtctctactgaacccttcttaagcaaaatcacagtagactagcagatcatggtagtatctgaaagcgccaggaccccagaacctcaatcagtgctccccacttcccatggttttctccctgtgtttccacatttggattgtcattgtctgtgaaaaggcatgatccctgtcaacaacacacagtgtatgcaatgtgtgtcttgtgtaaaacggagtgtgaattcttgagagcaggaaggaaaaggggtacaagaggttcccctgcgagatgggtgaggagcagggcagagtgagcctggctgctgggaacccctgaggagagctctggagagggttctggacacgtgggcttggtcagcctgacaattaggatttgtgttaacaggaccggccctcacctgacaccaactggactgaggttcccaggagaaacacttagcatcatgactttggaggttgccatcatttttgatgactttttctttttccttcttttctgtttccctcttgtcaagtttctacctgtaagttatacttacttattttgtgtttctttacagtctcaggggaaattccgttgagttgaaaatttcctcagctcctcgctccagtttctcagaagagtctctctccttgcagaaaagactgtgggtgggagtcaccaatttagcatatttctactaaaaatatgactccatcccaagaaattggttttaaagatttgaggaaaaactgcttttagatttcagagaaagaaaaagagtgtgtttctacttcccccttttaaatctgataacttttattttaatcaggttgacattctgtggtgagcttgtggttaactctttcatgcccggaagcctgttgtcgaccgagaagactcccaggattagaacataaccagcgcccaacatttcatttgcagaagcatctgaggtcccaaaatgtgatggtttagcggcagctgcttgtaggggtatttttggtttcctgcttcttttttcccttctaagtaaagacaaaataactagatccctccaccccaccaccccatcatttcgttgttgtttaacaagtgttgagtaaggcacagttgttctccaaaagggtcttaccctgtgagttactcattttagggttacggaaactctgactatttgacccagtcaaccaggcctcagaaactgtgggtcagataacaaataactcatggtgcttctgtgctaattactgcagagatgtgtccaagtgctcggagatctcctccttgaagccaaggtctcctccttgaaccacaccgccttcttctcctgtcccgagggaatcaggcaacttttctttgatgacagcaacttccttaaatcccccaagccctgagacaggcactttacttctcccacatttccttcaacatttgtgcttgctgaatgaaacaaggaaggtgaatgtttgcttgaatgaaccaatcaatgggtaacagcaccagtgctaatgctaatacactcaactactcattcagaacctaccatggcccaaggcttgtgctctgctcttgggtgctgatccagcaaagagtgggtggagggggagtgggaggtgaagtccctataccaccacttatattttgcactgtcttattttttcctctggtcacatgcatacataaattttatatctctgtaattatgccatttaaaaatcttcctactgaggtagaagttgggactcaacccccgaggcagggctcagacatcggacaaaattgaggactagcaaaaacaggattggggcagaagcagctttccataagacatgctcatgagtgtgccatgtcagtttaccattgccatggcaacacccaggcgttcctgctcctttccatagcagtgaccggatgacccaaaagttactaccccttccctagaaatttctgcaaactgccccttaaactgcatgtaattaaaagcagatataaatatgaatgcaaaactgccctgacctactactctctgcctatgtggtcgccctgctctacagaagcagtcacggagctgtagcacagccggaactataacattgccacttcaataaagctgttttcttttattctaccactggcttgcccctgaattccttcctgggcaaagccaagaacccttgcgggctaagccccacctcggggctcgcttgtcctgcatcactaccaccttctctaggaagatgctctaggcttaatcattgtgttgaattcagctgctgaggactgagaggtgatttggatgattgacttcataaataaaattgggagttagactttccccgctgtggacttgccactgagttgggggagaggggggtttctttctctgataaagttccacatccacagacagaaggaaaaggccctgaactaatcacttcctttggaagaagctttggtaaagaattaacatttgggaggttgtcaagaaaaacctatttgttctataaatatttaaaaattattaaaatttcaaccaatacagaaaaacacaaagattaatataaccaacatgtgcccatcatcaggattcagtaaatgtttacagtttaccttggttgtttcatgtcctttttgtttattttaaatacatgctcttgtcgtgcgtgatggctgatgcctgtaatcccagcaccttgggaggccgaggcaggtagatcacctgaggtcaggagttcaagactagcctggccaacatggtgaaaccccatttctactaaaaatacaaaaattagcctgatgtgatgcaggcgcttgtaatcccagcttcttggggggctgaggcaggagaatcacttaaaccttggaggcagaggttgcagtgagcccagatctcgccattgcactgcagcctgggtgacagagcaagactccatctcaaaaaaaaacaaaacaaacacaaacaaaaacaaataaatacatgctgtagatacagtggagctccctctcggtccaacccaatctcattcttcccctccagtaattgttctcttgaatctgggctgtatctcatgatgcaatatacactactggtttgttttttattttatacataaatgcataatatactgtttctatttgcaactttgcttttttcactcagcagtgtttctgagattcatttttgatgtttattctttttaacaactgtacattattacattgtataataatacagagttcttgataatgccaagtttattaatctaaccttcttttgatggacaattagattgtatctgatttttccctattacaagcaatgctctaataaacagccttgaatgtgtgcacatatgcaagaatttctctaggaatatacctagaagtgagatcactgatcctagaacatggacagcttcaattttactgctatatttaaaatgttctctttgaaatcgctatgctaatttataatcctcatcagcaatttatgaaatttcctgaattcctcacatattcctcatcatcacttaccatagggaaattttaacattttttgccaatctgataatataaaataaaatctcattactatcttaagtttcattgatacctggtgatattgagaatgcttccacatgtttttttggtcatctctgtggcctccttgttcatatcctttgtccctatttttattgggttgttggcctttaacttattgatttgtaagtcttccttatgtattacggatactgagtctttggataagtatagattcttggatcttctaagtagacgttattacttataaatgacaattttattttttgttatccacttcttattcctctaatttcttttgcttgttccattgcattagctggggtgttcaatacagtatagaataaaagcaggaattgtatatgtttccaccattaaatagaaggcttttaaggtatcacgtacatgttattttctgtaagctttcagtgtctactgtctattggttaaataagtttctttttatttctactaccttaaaagttttttttcttttaatcaataatggatattcttttcatcatcattagatgctcttcttcatctattaaaatgattgtgtaggttttcttcctttataccataaaagtatttaagtacattgagagattttctaacgttaaaccattcactattgctgggataaactctgactgatcagaatttttttttttttttttttttttttttgcttaatacattgctagcatcaggtgcaaatgtgttaacattctccagtttgactgtagaattaatttctttttgtaattcttcaccttatcaaccatatgtattgttgagtgtatacatgttcaagattatcataacttccagaataatttttatttgtgaaaatgcctttttgatctagtttctcttatgttattgtagctatggagctttcttatatctggctaccttatcaacaatatgtattgttgagtgtttacagggtcaagattattataacttccacagtgatatttatctgtgaaaatacttttttggtctagtttctcctgttactaaagctatcgagctttcttttggttgctaaatatctgcatataatgtgttttccagccctttagttcaaccttcacatgtcactgtattttaaagacgtctcttgacataacaaaaatagaccttgtgcaggactttgggggaaatttttccccctcaatcagaatacctctgtcttttacaagcaagcttaattgatttatatttattgtactacatttggacttatttatgctattttactttgaacttttattaaccattatttttcttttactgttgtatttatcttttcttgtcttctgttaaattgattgagtttcctttattttctcttttccttctactggtttgtgtattatatgttttaattctacttttagaattaagtcaccattggccgggcgcagtggctcccccctgtaatcccagcattttgggaggccgaggcgggtggatcacgaggtcaggagattgagaccatcctggctaacacagtgaaaccccgtctctactaaaaatacaaaaaaattagctgggcgtgatcgtgggcgcctgcagtcccagctactcgggagactgaggcagaatggcctgaacccgagaggcggagcttgcagtgagccaagattgcaccactgcactccagcctgggagacaaagcgagactccgtctcaaaaaaaaaaaaaaaaaaagaattaactcaccctttaagttctcaaagtactcgtgatgttaaaagtccacagttaattaacatctctcccagttccaggatcttctgttcagaacttagcacatttctggcaactaaggattgacaactgttaaaaaatatcatttcccattatatttttggattggttgttgctgatatataaaaaatgttgaattttataaatgaattttctatctggccaccttatgaaactcttaatagttctaatactttaaccgtcttgggttttctaagtacttaattaaattcctcacatagaatgattatttttatcttctctttttccaacaattgtatgccttatctatgttaccagttttatcagatcactaataacgagggttcttttaaagtcaattggagtgagaaaaacccaaagatgccattaagtccttgagtgtctttggggaagaaaaggtaggtttaggaaaagagagacaaaaggcaaagtgaacaactaagacaataccatgtatcgcaaatttaggtgtgatttaatgatggctaagaaaaaattctaaattatatataaaagtgtattcgtatataaggtagtttaaataaataacaggtaatgtgggcaggcaacaaccatcaaaaatgactggaaatattcaaattcaaccatggtgatttggttggcagcaatcagagaattgactatgcttcagtagattgaaatccgttataatctattaatgtgaatacaggtgacaggaaacaaccgaatacagcattctcataaatagttcttagaatatgaattcaaaagaaactctatttcctcgttgtgacacaatcaagctttaagcaatgaacgctttaattattgtttttcagcttagaaagtaactatatattttatcattgggttctaaaaacaacaccgctcaagaggtcattgtagcaacaatcaaaatttgtggagcattttacagatttcaatgtcacttatgttatttcaactgatcctcatatttccatccttcataccctcacgattcatgcttcagcaaaacattctacctgtagtctcttgtatcttccatatgatgatgctgttttacacttttacacattctctgccagaatggcctgacgtgcctaacctgccagttgaactcccacccacctttcaggcaccttatagttaagagcagccttcattctgttgcctggctcatgggcaggggcaggattcccagcaaggggtactatgtcaagaggcctaaaaggacatatcagcatggtaaaaggaaatggcttggggtgtatgagaagctcctatggttacatgattgggaggaattcttttcatttcgtgttacagacggagcatctgaaatgagaagggaccacagtgagccagtgagtgaaagaggaggaagattctgacacccagagctttaccttcaacatttccttctgtttattccttatctagacttccattttcctaccccatagatacccactctttgcccctaacttgccttcaactcctctactgccttgtaaatgtcccatgtgtgcttgaaaaaagagtgggctctgctattgttggaatcaaatttgttaattgtggttatcacatttgattgttcttactgattttctgtctgtcctatccatcataaaggaagacactgttaaaatttctcattatgatagtagatttctaaatttatccttgttttgtcaatatttgctttgtgtattttgaagttatgttattgggtgcatagaagtacgtaagtgttatgttttcctgattcttgatttgtatattttgaagtgatgtttttgagtgcatacacatatagcatttttatgttttcctggtgaattgaatctttagcaatacgtactgacttctgtatttctattaatgcttctgccttgaagtctgatgttaatataactccttggattcaattgtccattcttttagtttcaaacttttggagcatttatgctttaagcatgtctcttataaacatcatataactgcatatttttaaaaatatatgcagtccaacattctgtaactgcagggttaatctatccacattgataattattactgatatagtttgatgaatttccactgtcttattttgttctttattttttaccttctctttctatgcatttcccccttcttttgatttaagtaagtttttatcctattttattttcttccaatagcttgtaagttattcactttactctgtcattttagatgtaatttttaacatcttaacatgaatccagactttacaaagcctagatttaaccaatatcatagccttcctctcaaataataaataaccttagaacaaattgcctccacaaaccttttctacacagttccctcctcttcctccttgcttctttgtgcgcatttatgtttgctatttgaaagaatttcctgaaagtaaaagtgagattttttagaaggctgacatgagggcagcaatagtagactttcacgtgactcctgtcccaccaccttgagctgtgtggtttagccaacttacttaatctctctgaacctcaatctcttgctttctaaagtggggatgacagtatctaccttccagagccatggtgagcattgaaggtaatatatgcaaagaagcagcacataggcagggctcagacatcatagttattattatatagataaccccaaatggagggcctgggccctctgacttcttcaaagataataatctgaactaaaccacaacatcacacaaacacctcccagcacccagatagtttagacatagctccacctctttgtaagagataaccttcaacagataggtgaaaagcacgctccttcctgaagattatgattctgggtgttggaaaagcactgaactaggagtcagggaacctggtgatctgttgtaatccaaggcttgccacaaacttgtggaatgaccacaggcccagtgttcttatctataaaatgtagaggttggcctaaatgatctttgagctctcttctagttctcatattctatgataccattaaaagggatgttctacatcccttttgcacccaaaccacttactttctatacggcctaaacttctggtttgggtttcccaaggaagcgagagacaaccttcaatattaggcatatctttggagttcttattaaacagtaaacctcatctcactatcaaagatagcctctggctccagcgtcctctttccagtctcccacagagatttcctctgggagtcaacgagcttaaggtgaaatttggctaggggtctgggaggaattcttttcatttcatattacagacagagcatttgaaatgagaaggggccacaggggggcagtgagcggaacaagaggaagattcgggtctctgacacccagaatctatctgattctgacacagaagatgaaccgcgttagagcaagaaccagatccctctttacccagtggcccaagctcttgatgcgtacctgtgtcccttgtaaagctcagtgaaatcatcacctagacatttcctgtgctccgtgcgttattctaatcttcactgggtacaagtagagcttaaagttctgatatatggacaggaaagagaagagggatgaagcctttatccagggctggctgggctaagagtaaaacaacttcacctggattcacccaaggggcagagaatcttatctcagactcggtccacatctttatcagcccccttttccctttatctttcatgttgctcacatgggctccaggggccagatgagttttctcttactttgaacatcagagaaaaaaaataacgacaaaaagttactcaaccgacaaacgtttctcacccacacacctttcctccagtcaatgacgtttccactgcaccctgttagacgctgagtgaggaagcatctgggcacaaaccgctgtggatgcagattgagcagcactcactgtgcactggagggatgggagtcctgtcctcaccaagggggcagatggagagggggcagagagagcagccggggcttcactccctggaaactctcatactccaagtgcggcctggggctctgcagccccagcatcatgtaggagcttgttagaaatagcctcaatgtccacacctgccctgacaaatcccagtctgcaagatcccgggggctctgcacacacgctgctgcgaacaacctcagcatccgtcctgccggctctagagcagccaaccgggatatccttcttcttcagcagtggtgtccgctctctaaaatgactgtcccccacatctctttccagggttggtatttctggttaactcaagggacacaaaaatagctcagggaaaaattaattttcattctactccaattctaataatgaagtggtaaaaattaaagggacagctttcagattatgggagtgcagctgcgggtatgtggcaaaatcgaagaaagagggctcataattccacgtcagggaagagctgctggcctgcccaggctgctgtttatctttactgtgaatggggcctcttttttgtttgtttgttttgttttgttttcacttaacctcagtggcaagaaaaatggggcctcttgccaggaggagcagagagtgacgcggaaggcaaagaccacctcatttcaccaagttcctcgtcttttatttgaaatccaagacatagaagctgcacatttgtccttctgggaagagtgacgagtgactgagagtggagtcgaacactcgaaaggagagagcaggtgcctgggagtcagaaaagctggcttgaattcctaaatctgtcgccgtttgtcctgggtgaggtcattctggtcatctgtggcaggaggactacaaatgcctggcttttccctttctagcgggcacacaaagagacagagaagttgaatctttagcaatccattgaaggggaaaccccacaatgcaaagagaagcattgtcgagggcccttcacctgcaccctctgttctcccagacctgttccatgatgcattccagaggaggtggctctccgtcactgtcacttgcgattgccaaggcgtcagccagacaaggcaaaagctcccaaggggtgttacccttcagctgcatacagaactcctagaggcaacaaatccacaaggaaagatacacccatgatcgtgtatttcagccacaatgatggaggtgaggtggaaaaggacgaggaacaagtgggattctgcccatgtctgtctaatgagcatccacagcaaactccaacggaagatgtgaaacacgctcaacactagaagaactcggtttgactctgtcttggtgtgggtcccaggccaaagccctcggcattttcaggattaatgatcactgctggctgtctctttttccctctgcccacataaaaggcacaaaaactaaagaggaaggccacatcaccgcagagcccgtggttcaggattctcctcctgggagccccgatttcttttcttttctcaccttaacagtgtccagagtacttttattgccagaatagagatatagcctgctcagagcctcatgtgcggcccaccactcaggaacaaagggagagacagatactaagcatgtgtgcaacagagaaaatccagcccacgaaaccgtgtgcaagagcagctccgtcctgcctgaatgtggctttgggaagcccacctagaacttggcctggcgccagtcacccactcagagcctactgccatgaaggcaggccctcactctccatccctgcccacacagggagacccagggcaaacagaaagtcccctagcgggggcccaaggaacccctggctctctcagggtcccattcaagtttctgggctagtcttgcagactaaataccactcagttgcctggtgggagtaggtgctgggcagggtggacaggagccccactgcttctcagccctgtgccaacccctttgtgtgagaccctagtgcagggtggggagccccaatttctaagccttgagtgtttaccaccctacacccccacctccaactcccgaattgatcatctcaaattttcccacagtccataggcaccagacacttcaaataatctcagaaaagaaggtgatgtctacatccagaatcgtgccaatactttaaaattacagggagaaaaatattccccttcccctcttctaaggaaaattctgtctgcctcccaagctcccaggtcccttggtgtgagctgggggagtgcgtagagctaggaattggaaaatattccgggagagaatgatttatgttgagaagacccattgggagaagcaggaagtgggtctggaaagacaggaggaagtgtaaaggcagagaaaagcccttgttagctgaattttgagaagtaatttttggcattgttagtgagtaaaactagagaatgaggacagttgtatgctgtcttaaaaaataaaagaatgataatatagggaaagatgatttcaacattttggagtcatataagtggaatcctcctgttattactgtgcaagacttttagacaaattattttttattctttttttggatgttgttctgttgctgcttttataacactacactgagaagggctaaaaaaaaaatcccaaatttattcctattagattgaaaaagagcaaccctccagcgtacctttccacacactcttctacctcctgctgccttcaggtgatgtttggcacttcctgacaaggcctttcagggaaaaggattatagccaagctctttagtggttactgagctacagacctggaggtgtcaagatcctaaattccaggaaagattctttatgaaaggaaagtctgtgagaataagaagttctggaacttccccttgtccccgcatgacctcttcagacactcgggctaatttatgatgactctgaaaatgcccatgacctcatctagaaaaacgcactctcatggaattcaagagtttctaagggcacaaaatagcttccaagacaatttgtttccttcttttcaaattgatgtgtttagaaatgttcttggcttgtgattgacatctcagattccaaaaacatctgaggtcaatcctggttatttgtgctaatgaataattacaaaagagtagctaaatatgcttctcgctcattttgttgagctaaaattacttataaagaaatgcatagatctgcggcatacaatttgatgagttttgacaaatgtgtacagctgcaaaaacgttttcatcacttctgccttctggtcaatacccacctaccacaagaaaccactgtctgctttctatctctggatataacttttgtctttttgtgaacttcatataaatgaaagcaaagtgtatgcactatttcgtgtttagcttattttgttcaacataacatttttgagatttatcaatattgcctgtatcaatagttcattattttttatttttgaatggtttctatagtatgactatatcataagctacttgtctgttctcccaatgatggatgtttgaattattgagttggttattattaataaagctactatgtactagaatggaaggggcttaataaaagaaagaagttactataaatattttataaaagtctttctgtagacacatcccttcattcctcttagataaatacctagaagtagaattgctgaattgtagggcaggtatatatttaacgtcaataaaaatactttctttttttgttttttttttgttgttgtttgtttgtttctttgtttgtttttgagacagagtctcactctgttgcccaggctggagggcagtggcgtgatctcagctcactgcaacctctgcctccttagtagagaaagggtttcgccatgttgaccgggctggtctcaaactcctgacttaaaatgatccacctgtctcagcctcctaaagtgctgagattacaggcgtgagccaccatgcctggccaaatactttcagatagtgttccaaagtaattacattacttacactgccaccagtaacataagagagttctggtagttctacttcctccccagtatttgacgtatcagtcttttatccatttcctccatttccccaatgggctatctcatcattgttttcaacttgcattttattgatatctgatgttaaatacactttcaagtgtttattgatagtcgtgtatcttctttggggaagtgattgttcaagtctttgcccatttattgggctgtttgccttttactcttgctttgtttttctttatatattctggacacaagtatttgtgacaaatatatatattgcaaatattttctctcagtctatcatttactttttcatttttttctttttttttttttgagatggagtctcgctctgtcacccaggctggagtgcagtgacgcgatctgggctcactgcaagctccacctcccaagttcacgccattctcctgcctcagcctccccagcaggtgggactacaggcgcacaccaccacacccggctaatttttttgtatttttagtagagacagggtttcaccgtgttagccaggatggtctccatctcctgaccttgtgatctgcccgccccggcctcccaaagtgctgggattacaggcgtgagccaccacaccctgcctactttttcattttcttaatgtctctggatgagtagacattctcaatttttttcttttatagtcagtgcttttgcatcctctatgagcaatctttgcctatctccaacttgcaaagtcatttgccttaattttcttctgaaatctttttagttttgccttttatggttacatctataagatatagacctagtacatagatctttatctttatatatataataaaattaattcttgcataagatgtgagtttttttctcatacatttatccatttgctccagaagcatttgtcgaaaagatttttcctttctcattgaatttccttggcacatttatttgtttaaaaaaaaagcagttgaacaaacatgagttgagtccatttcaggactttctgctctgtttcattactgtttgtccttatgctaatactacgctgccttgatttccatagttttatagaaagcctgaatatcagatgtcatgaatcctccaaatgtatacatctttacgattgtcttagatattctaggtcttttgtgtttctaaggagcttttagaaataacttccaaatttgtactaaaaaattgtgttggatttttaaactgtagttgccttgaattaattgatcaatttaaggtgaatagattttttaaatgaatgttacaatctataaagatagtatatttttccatttgcttaattcttttaaaatatgtctcagcaatatttcagagttttcagtttagtggtattacaagtttttggtagnnnnnnnnnnnnnnnnnnnnnnnnnnnnnnnnnnnnnnnnnnnnnnnnnnnnnnnnnnnnnnnnnnnnnnnnnnnnnnnnnnnnnnnnnnnnnnnnnnnnnnnnnnnnnnnnnnnnnnnnnnnnnnnnnnnnnnnnnnnnnnnnnnnnnnnnnnnnnnnnnnnnnnnnnnnnnnnnnnnnnnnnnnnnnnnnnnnnnnnnnnnnnnnnnnnnnnnnnnnnnnnnnnnnnnnnnnnnnnnnnnnnnnnnnnnnnnnnnnnnnnnnnnnnnnnnnnnnnnnnnnnnnnnnnnnnnnnnnnnnnnnnnnnnnnnnnnnnnnnnnnnnnnnnnnnnnnnnnnnnnnnnnnnnnnnnnnnnnnnnnnnnnnnnnnnnnnnnnnnnnnnnnnnnnnnnnnnnnnnnnnnnnnnnnnnnnnnnnnnnnnnnnnnnnnnnnnnnnnnnnnnnnnnnnnnnnnnnnnnnnnnnnnnnnnnnnnnnnnnnnnnnnnnnnnnnnnnnnnnnnnnnnnnnnnnnnnnnnnnnnnnnnnnnnnnnnnnnnnnnnnnnnnnnnnnnnnnnnnnnnnnnnnnnnnnnnnnnnnnnnnnnnnnnnnnnnnnnnnnnnnnnnnnnnnnnnnnnnnnnnnnnnnnnnnnnnnnnnnnnnnnnnnnnnnnnnnnnnnnnnnnnnnnnnnnnnnnnnnnnnnnnnnnnnnnnnnnnnnnnnnnnnnnnnnnnnnnnnnnnnnnnnnnnnnnnnnnnnnnnnnnnnnnnnnnnnnnnnnnnnnnnnnnnnnnnnnnnnnnnnnnnnnnnnnnnnnnnnnnnnnnnnnnnnnnnnnnnnnnnnnnnnnnnnnnnnnnnnnnnnnnnnnnnnnnnnnnnnnnnnnnnnnnnnnnnnnnnnnnnnnnnnnnnnnnnnnnnnnnnnnnnnnnnnnnnnnnnnnnnnnnnnnnnnnnnnnnnnnnnnnnnnnnnnnnnnnnnnnnnnnnnnnnnnnnnnnnnnnnnnnnnnnnnnnnnnnnnnnnnnnnnnnnnnnnnnnnnnnnnnnnnnnnnnnnnnnnnnnnnnnnnnnnnnnnnnnnnnnnnnnnnnnnnnnnnnnnnnnnnnnnnnnnnnnnnnnnnnnnnnnnnnnnnnnnnnnnnnnnnnnnnnnnnnnnnnnnnnnnnnnnnnnnnnnnnnnnnnnnnnnnnnnnnnnnnnnnnnnnnnnnnnnnnnnnnnnnnnnnnnnnnnnnnnnnnnnnnnnnnnnnnnnnnnnnnnnnnnnnnnnnnnnnnnnnnnnnnnnnnnnnnnnnnnnnnnnnnnnnnnnnnnnnnnnnnnnnnnnnnnnnnnnnnnnnnnnnnnnnnnnnnnnnnnnnnnnnnnnnnnnnnnnnnnnnnnnnnnnnnnnnnnnnnnnnnnnnnnnnnnnnnnnnnnnnnnnnnnnnnnnnnnnnnnnnnnnnnnnnnnnnnnnnnnnnnnnnnnnnnnnnnnnnnnnnnnnnnnnnnnnnnnnnnnnnnnnnnnnnnnnnnnnnnnnnnnnnnnnnnnnnnnnnnnnnnnnnnnnnnnnnnnnnnnnnnnnnnnnnnnnnnnnnnnnnnnnnnnnnnnnnnnnnnnnnnnnnnnnnnnnnnnnnnnnnnnnnnnnnnnnnnnnnnnnnnnnnnnnnnnnnnnnnnnnnnnnnnnnnnnnnnnnnnnnnnnnnnnnnnnnnnnnnnnnnnnnnnnnnnnnnnnnnnnnnnnnnnnnnnnnnnnnnnnnnnnnnnnnnnnnnnnnnnnnnnnnnnnnnnnnnnnnnnnnnnnnnnnnnnnnnnnnnnnnnnnnnnnnnnnnnnnnnnnnnnnnnnnnnnnnnnnnnnnnnnnnnnnnnnnnnnnnnnnnnnnnnnnnnnnnnnnnnnnnnnnnnnnnnnnnnnnnnnnnnnnnnnnnnnnnnnnnnnnnnnnnnnnnnnnnnnnnnnnnnnnnnnnnnnnnnnnnnnnnnnnnnnnnnnnnnnnnnnnnnnnnnnnnnnnnnnnnnnnnnnnnnnnnnnnnnnnnnnnnnnnnnnnnnnnnnnnnnnnnnnnnnnnnnnnnnnnnnnnnnnnnnnnnnnnnnnnnnnnnnnnnnnnnnnnnnnnnnnnnnnnnnnnnnnnnnnnnnnnnnnnnnnnnnnnnnnnnnnnnnnnnnnnnnnnnnnnnnnnnnnnnnnnnnnnnnnnnnnnnnnnnnnnnnnnnnnnnnnnnnnnnnnnnnnnnnnnnnnnnnnnnnnnnnnnnnnnnnnnnnnnnnnnnnnnnnnnnnnnnnnnnnnnnnnnnnnnnnnnnnnnnnnnnnnnnnnnnnnnnnnnnnnnnnnnnnnnnnnnnnnnnnnnnnnnnnnnnnnnnnnnnnnnnnnnnnnnnnnnnnnnnnnnnnnnnnnnnnnnnnnnnnnnnnnnnnnnnnnnnnnnnnnnnnnnnnnnnnnnnnnnnnnnnnnnnnnnnnnnnnnnnnnnnnnnnnnnnnnnnnnnnnnnnnnnnnnnnnnnnnnnnnnnnnnnnnnnnnnnnnnnnnnnnnnnnnnnnnnnnnnnnnnnnnnnnnnnnnnnnnnnnnnnnnnnnnnnnnnnnnnnnnnnnnnnnnnnnnnnnnnnnnnnnnnnnnnnnnnnnnnnnnnnnnnnnnnnnnnnnnnnnnnnnnnnnnnnnnnnnnnnnnnntcactcactctgtaacccaggctggggtgctcggctgactgcaacctccacctcccaggctcaagcaattctcctgcctcagcctcccaagtacctgggactacagacatgtgctgccacactcggctgatcttttgtatttttagtatagatgggatgtcaccatgctggccaggctggtctggaactcctgacctcagatgatccgcctgccttgtcgccccaaagtgctgggattacaggcatgagccaccacacccaattttacgggtctgtttctattgagcacttttttgagtaggtcaagtatgtcacattttcctgtttcttcacatgtctagattttcttttaatttgctggatattatgagctatacattataaagggtctagattatcttatggtcctttaaaaggtaatgcattttgctctgccaggcagttaaatgactagcgcatcctcttgtctattaggcttggttttaatctttgtaagggcaggtctattttggttttgaaattcatcctagggatgcctctttctctaaagcaggattggaaaactacaacccacagctcagacacctgtttttataaataaaacttagcataactcttcttctctcagccctcacaatggacaatcagggctaagtttcactgagttctgccctgttcaggttcagaccagctcttggctaagaacctgaggtggacccctatacataattttggggcgaccttcatgcagtgtcctctccagagccccaccccacaaatcccagtcatgtcacgtcaatgaaaccactctgcttgggttccacctgggtgctgccgggaaggaaagcaccccaggaaggaagccagggcaactgtgggcgcctctcacgtgtttccctcctccaaaatcatgtagccctgagctgcctgttgttcagcacctgaaagcacttgctgtatacatttggactggttttacagctgtttcagcagaaacgtaagttttggtcccagttactctgtgatggctggaagcagaagtcttcactggtttttctgattattatccatgtcttgctttagtaacagatttatcttctgatacttaaaatattggttggtgttgatccataataagtgccaacaaatggtaccagtgatatgagaagtacagagagacaaacttttgcaggagttaaaggttaaggtaaacttcagtccagtctctatctgaattaccattctcttcttctggacagtgagaaaaaggaaaggaacagaactaccatctattccatacctgttattttccaggctttcttcaagttaccttagtatattatttgctataatcattaaatcaataaaataataattattacagcacgaagctgagccttagagaagtaaaataataaaactatgtagcttgtaagctgctggagctagaagttagaaacccatctttctccttcccaccatgctgctgctcttgccttatcatgagattaccagcatttattgagcacttatgttgcctgttccactgtaatttctggcccatggagcccatttaaattgcttttgcttagtcccttgttggttagagatgggccaagctgtctgatttctccctatcttcgtttttttttttgagacagagtcttgctgggtttcccaggctggagtgcagtggcgtgatctcggcccactgcaacctctgcctcctgggttcaagtgattctcctgcctcagcctcccaagtaactgggaccacaggcacatgccaccacgcccggctaatttttttgtatttttagtagagactgtggttttcaccatgctggccaggctggttttgaactgctgacctcatgtgatctacccgccttggcctcccaaagtgctggaattacaggcatgagccattgcacccagcctccctaccttcagttcttaggggagacaggagagtcctgagccattggatggggatggtcttccggaggacaaggtgctgggcagagtctaagggcacagagaagcttcactcaacctgaatgaccaatacacaaccggccaacccacagccataagtacagccagcagccctgatcagcctccgtgtgggcttccattgacggagaggccacagactcctgctttcctgcctcttcctgtccctgtcatctccccgtccacttcctttatccagcatgtgatatttccccccaaaatctaatctcttagagcagagaacttgttgcaaagtaggcaatggaattatttttctgattagacctgtgccacttttccttttaatagtttgatgtttgaccactgcttctggtgcctttagtgagataccagagtccatttttcaggctgagggagggtaaggtcttcataatataagaaggtatttggtgaactcagaggtgggcaggtgggtgagaaatacacatttcctatttgccagacattgagtgaagcactttctgtatatttctcaaaaaatggcgcacagtcattaattatagaaagtctaacaactcgtatatccttaaaagtatcttgcacagacatattttgcccctcaattaaatgtacgtaactttgcttcttcctttcttcacattccttgaccctcctctctccatacttgcttgacatgaggcatattcggaataaaaccttgttaatttctactcatctagtttgaaatacattgtgctttggagaggagcttggttgtagttaatttttgagccagctctgatacaaagctttctaaagaacaatggtagcagccttagttgctttctcacaaaaagtagggcataccatcttttaaataaagtgaagaaatatgtgattaagtcattataggattaaatatgtgagtacttgcctggggcctcttgagttcctaataggcttcttttgctttgcagagctctgtgacgatgacccgccagagatcccacacgccacattcaaagccatggcctacaaggaaggaaccatgttgaactgtgaatgcaagagaggtttccgcagaataaaaagcgggtcactctatatgctctgtacaggaaactctagccactcgtcctgggacaaccaatgtcaatgcacaagctctggtaagtgtcccttctgtgactaccaagaacaaaagaactgcagcaaagagtgagacagagcccagcttttgttcactcagccctatagacacaaatgggccagtccagtctacaggataactaattttagtggttcctgaaaagtcattcactaaacacaattttttttttttttggagacagactctcactctgttgcctaggctggagtgcaatggcacgcgatctcggctcactgcaacttccgcctcctggcttcaagtgattctcctgcctcagcctcctgagtagctgggattacaggcaccctccaccatgcctggctaatttttgcatttttagtagagatggggtttcaccatgttggccaggctggtctcaaactcctgaccttgagtaatctgcccatctcagccacccaaaatgctgggattacaggcatgagtcacagtgcccggccacacaattttatttttatttttgagacagtctcgctctgttgcccaggctggggtgcggtggtacaatctcagatcactgcaacctccacctcctgggttcaagtgaatcttgtgccacagctgcccaagtagctgggactacaggtgtgcaccaccatgcctggctaatttttttatttttagcaaagatggggtttcgccatgttggccaggctggtctcgaactcctggcctcaagtgattctcctgcctgggccttataggcgcacaccaccatgcctggctaatattttgtattttttgttagtgatggggtttccccatgttgtccaggctggtcttaaactcctgggctcaagcagtcctcctgcctcagcctcccaatgtgctggaattataggtgtgagccaccacacctgacctagacaccctcttttatcctgagctggaatactgatcacccccctcactggggcactcagactcaactcctttgccaaactcttcacaatagagagggctgttctagaagtttccttgtcattgtgttaagatggcgtctctaacttcaagcattctgaacagccttagggagcaaaggatcagtgtgttgtggagtgagaccactcctgctgctgtcaaacaacacagagacaattgacagcaagcaaggagtcccttttggtgagagacacacacatgcacacataacatacatgacatacacagacacgtaacatacatggcatacacagacacgtaacatacatgacatgcacagacacgtatacacacgctcaaaaacatgtcgtgggcattgccatatgcacttgaatacccagaggccggtgctgggagggcatactctggtttcgtatttgtaagctcagcagccagacaccaccagacacatcgtgggccctggacaggtgtgcttctcaagtgaatgaatacatgaacagtgttttctatgaagcatttgtgaaattatctgcatcattccatctatattttctagccactcggaacacaacgaaacaagtgacacctcaacctgaagaacagaaagaaaggaaaaccacagaaatgcaaagtccaatgcagccagtggaccaagcgagccttccaggtgagagatgattctgtcctccagctaactcctgctagcgcacccttctcctgcaggcagatgatgtgtacccaaaggaagaaggtctgccctgccttctataaacacatgcatgtggctccgtcctcccaagacatcattgcagacaagaattagtgcagagttgctcagaggctgtttgctcagcaactaaagccaatctgacggcagccaatccaggtctgggcttactccctggtttggtaactggccaaatagaattcaacccaaattcaactcaacttaaaagcgtctgttgggtctgtgtgccaggccctgctgatagaagacacaaacaagagtgtgacaacgatccctgccctcaaggaaacgctctgcgtcttccccttaagcacaagacaacgcaccgcaaaaaaattacttgcttcccagtatttcttccagggcaaggttgtaaaatgtgcatgccacacttgtgagtctcaaaagctccagatgcgtgtgtcctggccagcagtctgtgcatgagtgggcactgtggctgtcccttgtctgccctctgctttcccatgactgaattgggattcagttatggtgtcaagaaaatgggctgggcgcagtggctcacgcctgtaatcccagcactgtgggagtctgaggcaggcagatcacttgaggtcaggagttcgagaccagcctggccaacatggtgaaaccttgtctctacaatcatacaaaaattaagctgggcatggtggtggatgcctgtagtcccagctactcaggaggccaaggcatgagaattgcttgaaatcaggaggtggaggttgcagtgagcagagattgcatcactgcactccagcctgagtgacagaggaagactctgtcccccctcaaaaaaacaaaacaaaaaagaaaaaaaacccacagaacctgctaggaagaattgagctttctaaggtcaggctagccttaggagacttcagagccctttgctgattttacaaccttacaaagaactgtatcagataccatcccatttgagcctggctatacaatgagtcaggaccaggaagggttacttcaacttactgaagaaactgagatgcacaaaagataaaaagatttggttaagctcacatagtagggctggaatcagacctcaggtctcccagattagatgaggaaactttctgctgattacttattttaaaagagtttgaatttacttacagcttccattattttattttttaaaacagactaatctaggggcacagttgcaacatgatgctcttactccttccccttccgactttgtcctggaatggtgtttccaagcacatttgtttgttttgttctactggctcccccatagtcaccctgcacagattattggaaggcttcaaagaggccaatgcttgttgtcctttctcgaaggctggctctgcctgagggatgtttcaaagattgtctcagtttgggtgttttcattggaaagaagcaaacccaattcaaacatgttcagacagttacgaattgtactggctgtcaaacaaccttttatcctgagaccaaaacacaagttcagtcgtgatgttcaaggtgccacatggcaggagccagcctgggacagggccacccagcttcctgctggggaagaggctctggaggatatttacagaggctctgttgggtatgcagggttggggagagtctggaagttcagagcacgtgcgcagtttcacaggctggggttagagggcacatacaattccatatgtccaggttgggggctgtgggtggggaattcagagatttaatcagaacaagacatggtctcaggccacaggtccgtcaggcctgggatgtagttgggtgagtggaaagttctggggatgggaaattttgagacgtcttgaaagggcgcatgtgtgtcaaccttcaggtgtggcttgatcagagatggtgctccatttctctgaggttccctcagcccgtccctcctcctggctttggtgttgtccccaatccttccgacatcatcccaagatgcccagccgctgcccccaagaatgcacttcctcacttgtccagcagaaatccaaggtggtcttcatgctccattggcccaaataggcttgagcctacccttgtgtctcagctgagactgccccgcccactcctgtccactgtcaacacctgcactgtcttccaagaggcagttgtggcgttcctgtctcggggccgcaccaaccagaatgaatcgctcattcctctgtgttcccattgccaacgtctgctatccttcacatgcctttcttacccaatccactgtccaccccttgcaggagtgacagggtcttcgtgccttcctacagggcctagcaaacttccccacgctcagacgttctcaacatatattggttgaatgaaaggatgagcaagcagtcaagagagtaagaaccaaggtccagtccctagcaagaggcaacctggactcactcgcggtgctgtccccaacttgccttcagagcgttccttccatcttccaggtcactgcagggaacctccaccatgggaaaatgaagccacagagagaatttatcatttcgtggtggggcagatggtttattatcagtgcgtccagggatacagggctctacacagaggtcctgctgagagcgtctgcaaaatgacccacgggaagacaaggtggacccagccccagctcatatgcacaggtgaaatggagaccagtcagtttccaggtagggtggctcccttctggggtccacaatgttgctttgctccatcaggctgaccagggtggaatccctgaccactcctgctggacaagagtggtccttggacaagacccttgatctccctgggcttccattttttctcattctgagaaaaaaaaaaaatttaaatagaccagatcagatggactctaagggctccttcaatgaaggtccccctgtgccctgagtggggagaaaggttggagacagaagagaaggaaagccctctcctaagcaccctagatgctgcctcgtagttggtcctaagtccactacttctctaagccaccaaggcctcctctggctccaagggcaagtccagtttcccactcacacatttttcctcttactggtgatcgtgtaaatgcatgatctgaacagccctccgcggtcagcatgttccttccccttgtgccattccccagctgagcttgtaaaaataaacataaaatgtgcagagtcgggacttactcagtgcacatgcgcgcacacacacacacacacacacatactcatgcaaatgctcagcccaccgatgtcgaggtctcctgctgtcttccttctgaaatcttattagtatcacgacaatcaaaagtgacttacatgcaggctgggcacagtggctcacacctgtaatcccagcactctgggaggccaaggcgggcagatcactttaggtcaggagttcgagaccagcctggccaacatggtgaaaccccgtctctactaaaaatacaaaaattatctgggcgtggtggtgggtgcctgtaatcccagctacttgggaggctgaggcaggagaatcacttgaacccaggaggtggagttgcagtgagctgagatcacaccactgcactccagcctgggcaacagcaagactccgtctcaaaaaaaaaaagtgacttacattcaaccacaagtattcctggttttcttgctcactgcacttctcatactccatgtccttctcttgggttccctagggaggctgttttgttcccttagctgcttccctgggccaccctgacagccagggaatgcttgctgcttccttggaagagggtgagaggcagggcagagccagggttgctgacccctcaggagaagtggagagcctggcacagaagcagctgtcccttagtgcatctctgctccatccagtggttcaatggcattcgtattattatgacctgtttccaagtcacagatggaaaccaggactggggagggaggctggggagaaagcattgctcagagttttggggacagctagggtcagagttagaattcagcctcgtctgctctgctgagaccacttcaccgcttcccagtgcccctgctgtggaaccatgtggggtggcatccctggcgaagtgcccacaccaggattcctgcctcctcgggcgtgtctggggccggctgcctggggcaggcggggtgggagtgaggccctgactcctgtgtttagctccaccagcatcacttactctctcccccaggtgaagagaagcctcaggcaagccccgaaggccgtcctgagagtgagacttcctgcctcgtcacaacaacaggtgcgggagaagacaaacgctggaccacagaggcctagtccaaaagggcaggggtgaccaggagccaggctcagggagataggcggaggtgacctgtaggggagaagcccacagcagcctcctctccctctgagcagggacagggcctcagcaacctgcaggccccaaagcaagtgtcagaaagagggaacccaggaccaggaccaagcacggtccccaggcagagatggaacaccttccctcaccaccaccacgtgtctcccaccagcctctgagcttctcattcacagagacaccctgacttcctttagcctcgtgctgtcctaaagtcacggtagcaggagtgtctctctttatctctttttcacagattttcaaatacagacagaaatggctgcaaccatggagacgtccatatttacaacagagtaccaggtagcaggtgagtggggcactggctttgtggacaaaatgtacaccaggctgagatatggacaggttgactggttagtaggttggttagttggttggctggtaggttggttagttggttgattggtaggttgataggtaggttggctagttgattggtaagttggttcgtaggttgggaggttagttggttagttggttggttgcttggttggcaggttggtttgtatgttggtaggttagttgattggttggtaggttggtagattggcaggttggtgggttagttggttagttggttggtaggttggttggcaagttgataggttggttggtgggttggttgataagttgataggttggttggtaagttgataggttggttggtgggttggttgataagttgataggttggttggtaggttggttgttagggtggtagattggcaggttggttggtagttttgttggtagtttggttggttagctggttggttggttagtgagttggttggtagatagattggtagattggttggttggttagtttgttggtaggttagtaggtttgttagttggttagttgattggtaggttggttggttgactgaaaggaccccttccttacactgcagaatgtgtgagtgaaagactaatccagatactgacgtaactcagaattcgcatgaaccagttacaggatgctgtgagcaaagtctcaagtcagccctatcagctcctctcaagctgatctggaagggctgtaccccgggcctctgccaggggtcaagagtgggaggaaggagccacgtagccagtcagagaggacaggcttccagaaacactgccattgtttcctggtaggagggaaaaacagactctgagtctgcatctgcctagaaagtaaacaaatgtcagcctccaaaacctcagcagagcagcatctggaaaacccgacctctttcaggagatgttaatgtgcttctcatcatcttcatatttcaacatttcttttaccaggcgctctcggtgtccttaaacgaggcctggcctctgagcctttctgaggggcttttgtgagagaagggtgcctcctgaggggaagctccctccaccctcaccctgtcctccctgccctgttcctcaagactcctaggaaatcccatggggagggacctacttcctgagacagggaagagaggctgcagcctccgccttgctctttggggatgtcctcagcctgccctgtggccctggctcctgctgcccccatgccaagcccagggccctttgctgaactccctctctctattgacagtggccggctgtgttttcctgctgatcagcgtcctcctcctgagtgggctcacctggcagcggagacagtaagtgtggcatcaccaaggcagcccttggtcagatcaaagtcctgtacccagccccaccctgcctcccccctaccccctccatgctctctctaatcacctgcagttcagggagtggcaaagggagaggccaatccatgcctcggaaagagtcagttaaaaagaattaaagcaccgccgggtgcagtggctcacgctggtaatcacaacactttgggaggccaaggctgagtggatcacctgaggtcaggagtttgagacaagcctggccaacatggcaaaaccccatctctactaaaaatacaaaaaatcagttgggcatggtggcaggtgcctgtaatcccagctacttgggcggctgaggcaggaagattgcttgaacctgggaggcggaggttgcagtgaacagaaatctcaccactgcactccagcctgggtgacagagcaagactctgtctcaaaaaaaaaaaaaaaaaaaaattaaacgaccagggaaatgggaaggcaaaggagcctcacattcattgagcacccactatacaccaggcttgatgcttgttttataaacattattgaaatctaccttctcagaaacctttggaatagctgtggcctagagagatgcaacagcttggagaagatggcacagcagaggccagcactgcaacatgaatctagagcccatgattttcccacccagcccctacctatagaggacccagggcagcatctatgctgagctttgcctatcctgtgctccccaccctcccgtccacagaagctcacaccggcatccccttgaccaggaatgtaaaccatgtgtggtctttttgcattaactcagattttcaaccctgcatgcatcttagaacatccaggagacagtcttctaaaataccagtgagtggcaagatatgagtaaattccacaggaaaaggaaggcagtccaaagggctgtgcttctcctgtggctcagtgttattcatagctgtgacatcttttaagagaggtttacaagagggaaatcctgtcaccaaaaccattgtgacccactttgaatttggggggaatcttcatttgcaacaatagaagaacaaatttgttgcaataggaaatatttttgtagcttatgtaggttgttcagccaaaacagcataataatttaaaaagttaaaagatagcccaggagttgtggctcatgcctgtaatcccagcactttgggaggctgaggcaggtggttacctgaggtcaggagttcaggaccaggctggacaacatggtgaaaccctgtttctactaaaaaatacaaaaataagccaggcgtggtggtgggtgcctgtaatcccagctacttgcgaggctgagacaggagaatcacttgaacccaggaggcggaggttgcagtgagccaagatcgcgccactacactccagcctgggcaacaagagtgaaactctgtctcaaaaaaaaaaaagaaaaaggtaaaagatatcaatgattgggctccagtcagaatgtctgggggtgagcccaagacatcagtacgtatttttaattgagataaaattcatcatttaaccatcataaaatgtacagttcagtggtgtcttagcccattttgtgctactgtaacagaatgcctgagactgggtaacttataaagaacagagatttataaagaacagagatttataacttataaagaacagagatttcttaccattctggaggctgggaagtctgaggtcgaggggcccccatgtatcaagggcgtttgtgctacgtcatcctgtggcagaaggcagaagggcaagagagtgagagacagcaggaggggctgaactcagcttttatcacaaacccactcctgcaataacaacattaatccattcatgaggcagagccctcgcgacctgatcacctcttcaagatctcacctgtcaacattgctggattagggattaagtttccaacacctgagctctgggggatgtattcaaaccacagtaagtggtatttagtatgtttgcaatgttgtacagccatccccactgattccagaatacttccatcattcccaagagaagccccacactgccaagttccccattctccccagccccgggaaaccaccactctatgttccgtctctatggatttgcctattctggacatttcgtgtaaatggaatcacgtggccttttatgtctgggatagtcgtacgttttaaagcccctcagatgtatctaatacatatgcatccaggtttgacaaccctacacccggccattggttttcaaacttgaactagcaccagaatcatctgtaggaacataaagaaacgataaatgtttgagatgatggatatgctaaataccatgatctgatcactgtaccttgtaggtatcaaagcatccctacatacctcataaatatatataactattatgtgtcaacttaaaaacatttgttgaaagaatcatctggaggccttgttaaagcacagattgctgggtcccacctgtggagtttctgacgcagtcgtcttgcttaggtccaggaatctgtatttctatcaggttcccaggtgatactgacgctgccgttccagggagcagactctgaggatcaccgcactaggctaacagcattaagaatcagggaagctggccagactcacgcttgtaatcccagcactttgggaggccgaggcaggcggattacttgaggtcaggagtttgagaccagcctggccaacatggagaaaccctgtctcttctaaaaatacaaaaattagctggctgtcatggtgcgcacctataatcttagctactcgggaggctgatgcaggagaatcgcttgaacccaggaggcagaggctgcagtgagctgagatcgtaccactgcactccaccctgggtgacacagcaagactctgtttaaaaaaaaaaagaaagaaagaaaaaagaaaagaaagaaaaagaaaaagtaaactctagaaactccctctgtctctctcttgattatccagggcctccctgacccctgccagcatccactctggccaaccctgatacaaactccacagtaagaccctgagaaaatacagatccactcccccaaaaccaaagcccttagcccagccagagagaaaaataaaatatctcttcccttcttatatgggtcatcaggtccataacatactcctaattttcctcatgggaattaaaaagtataaattactgcagtgcaaatgataagccccctagggttattgtagcaggaatgattcatatacccggcagtctaccagtttctctaaggggttagctgactcctaaggtgtcattttaggcttccaggaggggaaggatgtgacgtggctgacatgttgtacgtgtactcagtacttgcatcctctccttcctcaggctgaacacctgacaagccttaacaccttgcaaggatttttttcatttgttagtttgaagatcaaaagccttcgggcccagaggacaaagctatttggaagtaggaatggttcagtgtttatgttgtgaaacaaataactgtgtgaacctatgtgagttcccacaaggtctcccagaactacaatctttggggagactcaaacatacatctagaaatgacccctctagtcagtttgtccaaaagccttcctagaatctgatatcaacccatggtgccctcttgtggcaacagaaatgctgcatttgaattaccgaaagatcactgtagcccagccagagagttttggttggggaaatattttttgtttgtttcgggcaatgaccaggagcccgtgatgtgctacagaaggctcacagtggcttgtgagagccagcggttaaattttcgggacttctgcaaactggtttttaagcatagccattatggaaaattaaagtatttaggctgggagcagtagctcctgcctgtaattcctgcacttcgggagactaaggtgagaggctcgcttgagaccagcctgggcaacaaagtgagaccttgtctctacaaaaacattttaaacttagctaggcgaggtggcacatacctgtagtcccagctactggtaagggcgaggtgggagaatcccttgagtccagcagttcaagattgcagtgagctgtgaccatgccactgcactgcagcctgggtgacagattgagacgctgtctcaaaaaaaaaaaaaaaaaattaaaatatttaaatttacaatttaataaattatattaaaaacaaaggcaagaattacttacaactgatcacttcctaattatttgctaccttttactgttatctttgttcgctgggtggtttacatctattgtgtccgcatggtggaaataccgtttgacggtggctaccgcgcatctcttcccaaccgcgtgatcagtgatgtcacattgccagctggaagctgtgtgtggagggaggattgacaccagggaagacaggcaaccgtcatcagagagctgcttgttaaacatcaccagcacacctctgcttggagtcttgtgctatgggaactctgtgcaaagtagggagtaattagaaattcccatgagccaaataagaactgggaaaaggctaagaccgtattgtccaatacagtagccactagccacctgtggatacttaagtgtatttaaactcaaataaattaaatacaattaaaaattcagttcctcggttgcactagccacatttcaagcgttccctagccacaggtgtctgtgttatcggacagcacaactgcaaaagatttccatcatctcagaaagttctatagcacagtgctggctagaaaccaagtgctttactgcatgcacatcatttagcacagttagttgctgtttattattcctgttccacagctattgtctgccatataaaaacttaggccaggcacagtggctcacacctgtaatcccagcactttggaaggccgaggcaggcagatcacaaggtcaggagttcgagaccagcctggccaacatagcaaaaccccatctctactaaaaatacaaaaattagccaggcatggtggcgtgtgcactggtttagagtgaggaccacatttttttggtgccgtgttacacatatgaccgtgactttgttacaccactacaggaggaagagtagaagaacaatctagaaaaccaaaagaacaagaatttcttggtaagaagccgggaacagacaacagaagtcatgaagcccaagtgaaatcaaaggtgctaaatggtcgcccaggagacatccgttgtgcttgcctgcgttttggaagctctgaagtcacatcacaggacacggggcagtggcaaccttgtctctatgccagctcagtcccatcagagagcgagcgctacccacttctaaatagcaatttcgccgttgaagaggaagggcaaaaccactagaactctccatcttattttcatgtatatgtgttcattaaagcatgaatggtatggaactctctccaccctatatgtagtataaagaaaagtaggtttacattcatctcattccaacttcccagttcaggagtcccaaggaaagccccagcactaacgtaaatacacaacacacacactctaccctatacaactggacattgtctgcgtggttcctttctcagccgcttctgactgctgattctcccgttcacgttgcctaataaacatccttcaagaactctgggctgctacccagaaatcattttacccttggctcaatcctctaagctaacccccttctactgagccttcagtcttgaatttctaaaaaacagaggccatggcagaataatctttgggtaacttcaaaacagggcagccaaacccatgaggcaatgtcaggaacagaaggatgaatgaggtcccaggcagagaatcatacttagcaaagttttacctgtgcgttactaattggcctctttaagagttagtttctttgggattgctatgaatgataccctgaatttggcctgcactaatttgatgtttacaggtggacacacaaggtgcaaatcaatgcgtacgtttcctgagaagtgtctaaaaacaccaaaaagggatccgtacattcaatgtttatgcaaggaaggaaagaaagaaggaagtgaagagggagaagggatggaggtcacactggtagaacgtaaccacggaaaagagcgcatcaggcctggcacggtggctcaggcctataaccccagctccctaggagaccaaggcgggagcatctcttgaggccaggagtttgagaccagcctgggcagcatagcaagacacatccctacaaaaaattagaaattggctggatgtggtggcatacgcctgtagtcctagccactcaggaggctgaggcaggaggattgcttgagcccaggagttcgaggctgcagtcagtcatgatggcaccactgcactccagcctgggcaacagagcaagatcctgtctttaaggaaaaaaagacaagatgagcataccagcagtccttgaacattatcaaaaagttcagcatattagaatcaccgggaggccttgttaaaagagttcgctgggcccatcttcagagtctctgagttgttggtctggaatagagccaaacgttttgtgtgtctaacaattcccaggtgctgttgctgctgctactattccaggaacacactttgagaaccattgttattgctctgcacgcccacccactctcaactcccacgaaaaaaatcaacttccagagctaagatttcggtggaagtcctggttccatatctggtgcaagatctcccctcacgaatcagttgagtcaacattctagctcaacaacatcacacgattaacattaacgaaaattattcatttgggaaactatcagccagttttcacttctgaaggggcaggagagtgttatgagaaatcacggcagttttcagcagggtccagattcagattaaataactattttctgtcatttctgtgaccaaccacatacaaacagactcatctgtgcactctccccctcccccttcaggtatatgttttctgagtaaagttgaaaagaatctcagaccagaaaatatagatatatatttaaatcttacttgagtagaactgattacgacttttgggtgttgaggggtctataagatcaaaacttttccatgataatactaagatgttatcgaccatttatctgtccttctctcaaaagtgtatggtggaattttccagaagctatgtgatacgtgatgatgtcatcactctgctgttaacatataataaatttattgctattgtttataaaagaataaatgatattttttaaaaagtcttggtttttattataaatatgataaatattgctagctataatctacataaccaaaaacctttatagttttttggtgctttttttttgtttttttgttttttttttttttgagatggagtgttgctccgttgcccaggctggagtgcagtgcacaatctcggctcactgcagcttctgcctgctgggttcaagtgattctcttgcctcagcctcccaagtagctgggactacaggcacccaccaccaagtccagctaatttttgtatttttagcagagacggggtttcaccatgttggccaggctggtctcgaactcctcacctcaagtgatccacccaactcagcctcccaaagtggtgggattacaggcgtgagccacggcacccagcctggtatcctctatagtttttaatagttttaaataacatgcaaagatcctgtgaaatggccaacaagcacatcaacatcactggtcatttcagaaatgcgaatcaaaaccacaatgagatactacttcatacccattaagatgactttaagaaaaagaataggaatgctcacagatggctggtaggaatgtcaaaatgtgcagccactgtgcaaaacagagtctgttttggcagttcctcaaaaagctaaacataaatttgtcctataacccagcaattgtattcctaggtacacacccaagaaagacaaaaacgtgtctaaatacaaacttgtacacgactctttataacagcattattcatactcaccaagaggtagaaacacccaaatacccaacaacaaagggatggataaaggccgggcatggtggctcatgcctgtaatcccagcactttgggatgccaaggtgggcagatcatttgaggccaggagttggagaccagcctggccaacatggtgaaacctcatctccactgtctctactaaaaatacaaaaaattagctggtcatagtggcgcgcatctataatcccagctgcgtgggaggctgaggcacgagaatcccttgaacctgggaggcagaggttgcagtgagccaagatggtgccactgcactccagcctgggcgacagagggactcttctctccaaaaaaaaaaaaaaaaaagaattgataagcaaatcatggcatatccctgccagtggagtattagccacaggaagggatgaagtattgatccatgctgccatttagatgaacctcaaaaacattatgctgagtgaaggaagccagacacaaaagatcactactgtatgactcatttaacatgaaatatctagaataggcaattccatggagacagaaagcagataagtgtttgccaggggatttttctggggtggtaaaaaagttttgaaactagagggaggaggtagttgcacaacatgttgaatacacgaacagccactggattgtatactttatcatggttaattgtgtgttatgtgaatttcgcctcaactttttaaaaaggagatcctgaggccaaaatatttaaatattgcttatcttattcttgatgctcaaagaagggtcatcagcccagaaggatcctcctgaagtctttatggtgactttagtattctactaagtgagttatcaggggaccctgaatttttgttttcaaaaaccaaaattagcatattactaaagtttatggaagactccactttggtattctatcgagaacgtaaaatttgcatagctcccaggaaggctgctgttcctgatgcatcaccagaactatcgtgagttggtttcagtttttactcgctggtattccttcagctaaatgatgaattcctgccagtgattttcatggaggggttgtgttggctggctcccaacgtgcataatcaattaatttgctgtgggttgaaaatctgaacaaactgaaagtcaataactcttcttaggtctgtagaagtaagtaagattacagggtagctcactgtccccaatattggagaggcagacaggctgatacagggaaatcataacctcctggaccagaaacccaggaacaaaccctgctactggaaccagcagaggggcaggaaaacctaaactggaactgacaaattgctggaggctcagtgtggacacttctgagagataaaaatttcaggggagcaacccagtcacagggggtccccactttcatgacctttccctccaggaactcaatgaggtcttcacagtgaagatgggagaaaaacttccttgtgcttttgacgggggaaagagaaaaggtactgtcacacgcatccgtgtgaagagagtccaccaacaggctttgtgtgagcaacaaggctgtttatttcacctaggtgcgggcgggctgagtccgaaaaaggattcagcaaagggtggtgggattatcattagttcttatagatttgggataggcatacaaagtacattcacaagggtggggagaatattacaaagtaccttcttaaggtcaggggagaacatatcgtatcagttagggtggggcaggaacaaatcacaatggtggaatgtcatcagttaaggctattttcacttcttttgtggatcttcagttgcttcaggccatctggatgtatacgtgcaggtcacaggggatatgatggcttaacttgggctcagaggcctgacaggtaccattctgaaatatgccagagcattcagtacttgtccaacaaggcctgccctcaagaaacagtattttcctcactatcttaaattttaccatagtctaaccaacctaaattttaccagtgtctaaccaacctgaaagaagggaaataaccagctctagcctctctgcccttcttgtctcatctaagggaggaggcgaatgaaaagcacttgtgaaggtcacagcccaggggtacaggcttgctgaaggctgaacctaatcataagactatggaatggttcccctccccctgcaccttaccaccacatcagtggggctgttgtgcgctcacaggggactacagtggaaacaactgcacatttcagtccctctttaagaagcagtctctagggaagcccaaagatgagaggggagacaaaaacaaagacactagagggaattttagcctctgacatctacagctacagcaaatagcaaacacagcctaactcctaaccagataaacataaaggctcacactaaaggcctatttaccttggttccttttatgctgtatatcaggtccagctttcaacaaaaaattacaaggcatgctaaatggcaaaaaaacacagattaaagaggcaaagcaagcattgtaaccagactcggatactaccatgttggaattatcagactgggaatttaaaacaactacacaaataagccattatgacagagatttctatggtcctgtagatccattcttcccttccaccatcagtaataaaatccccaaattttaacccaacacatttctgcccctagctaaagacaacactttctagcctcccttgcagctaagtgtggtcatgtgactaaatttggatgagatgtaaaccaaaaagtatctgagacaggtctaaatccattcagaggtttatattgccaagattaaagaccatgacctgtgatacagcatcaggagttcctgagaacatgtgaccaaggtggttgagttacagctgggtttgatattaatgcattttaaggagacagaaattataggcgaagacataaagcaatacatgtaaggtatacattggttcagcctagagaggtgggacatgtcaaagtgggaggcttccaggtcatagttgattcaaaagttttccgattggcaattggttgaaagagttaagctatgcctgaggagttgaagtcagtaaaaagaaatgcttgagttaagataaggggagtggggttgtggaagacactgtccttgtcatgtacacgaagcttccagatagcaggcttcagagagaatagagagcacatatatcttattggaacttaacagacgtcagactctctggaaaagacccattaagagaagggagattcctccagtatgaaaattaagagacagctttgcagggccacttcaaaatatgtcaaaaaatattttggggtaaaataattttatttccttcttggcctgttatatgtcatgtgatgctataccagaatcaagctgggattgggtatcttgttgctaaagcatctgtttcttaggtcttatgatctctattttaatgtaatcctggtcagttgatgcctgaattccaaaggaagggattacaatgaggcgtgtcaacccccccacttcttgtcatgacctgaactagtttttcagtttcttggggatgcccttggccaaaaaggggctcatttagtcagttgggggcttagaattttatgtttggtttacagagatatgagcagaagggacgtgtgtgacgcccagggtgtgcccttgaagagaatgtgcacaccctccttcatctcctctcactggtggctgcgtgctcttgctctcgtgagctagaaccaccgggaggatagaagccacacatgaagcctgagagggaaaaaaaaatccaaggaggctgggagtctgaccccatgaggtgccccagcagcagtgcacacactcggactgcatatgagacagaaataaccctcccatttgctgcgatttttgcccttgttagggcagcatcctaactgtatcaatcacccacactcctactaaaatgacaccctcggctatcgtttggatatggttttgttaccacaaaggggtcctgctccagaccacaagagagggttcttggatctcatgcaaaaaagaattcaggacgagtctgtaaagtaaagtgaaacaagtttattaggaaagtaaagggataaaagaatggctactccatagacagagcagttccgagggctgctggttacctatttttatggttattccttgatgatacgctaaacaaggggtggattattcatgcctccccttttgagaccatatagggtaacttcccgatgttgccatggcatttgtaaactgtcatggcagcggtgggagtgtagcagtgaggacaaccagaggtcactcttgtctctattttggttttggtgggttttagccggcttctttactgcaacctgttttatcagcaaggtctttatgacctgtatcttgtgccaaactcctgtctcatcttgtgacttagaatgccttaaccatgtgggaatgcagcccagtaggtctcagccttagtctatccagcccctattcaagatggagttgctctggttcaaacacctctaacagttgtttatcccaagcaaatctcatgttggactgtgattcccagtgttggaggtagacctaataagaggtgtttgtgtcatgagggtggatccttcatgaatagatgattgccctccctgggtgaggggggtgagtgagtgctcattctattcattcccgtgagagctggttgttaaaaagagcctggcatctccccccaccctttcttcctctctcaccatgtgacctctgcacacaacagccccccttcacctcccaccaggagcagaagcagcctaagacctttcccagtgtagatgcccaatcttgaactttccagacaccagaactgtgaggcaaataaaactttttctttataaatgattcagtctccagcggggcatggtggcgcacacctgtaatcccagctactcggaggctgaggcaggagaatcacttgaacccaggagttggaggttgcagtgagcagagatcgcgccactgcactccatcctggccacagagcgagactctgtcaaaaaaaaaaaaaaagagagagagagagggagagagagagaaaggaaggaaggaaggaaggaaggaaggaaggaaggaaggaaggaaggaaaaaagcaaagaaagaaagaaagaaaggaaagaaagaaagcaaagaaagaaacaaagaaagaaaaagaaagaaagaaagaaagaaaaggaaggaaggaagaaagaaagaaagaaagaaagaaagaaagaaagaaagaaagaaagaaagaaagaccagtctcaggtattctcaggttacagcaacacaaaacagactaagacaccctctccaccaaaattctgtttgtatagcatattagtatcaaaatcttttcaatggaaaatggactccagaatcaatattcaacatgacagcagagtttcaagtaaatacatgttttctgttccataaatattatctgaaaaagatttccctacaggagataaacaagtagataagataaaataacattggttctctttattaatttgaatactcccctacttttcttcagaaaatcactgcattcattctccaacacccctgaagcctttctgaaatgttggctcacatggagatgttccttttgcctgatgtcttctggctaagtcagaaactgcaaagggaaacctgctgaagttttaaaaacttttccctgttatttccgtttctcctcttaaagagtgcagtgcgaaacacgtgtcctcttcttctacgatgttgatgaacataccttcagagctagcctattgatatgaaggtaaggatgaaaagaaatctgttatctcagggcagtaggattatcaagcaccatatcagcaaatgcatcactcgaaactaaattgtaaatatagccatgcaccgcataacaatgttttcatcaacaacagactgcatatacacgacagtggttccataagattataataccatatttttaccataccttttccatgtttagacacacaaatacggccaggcgcagtggttcacatctgcaatcccagcactttgggaggccaaggcgggtggatcatctgcggtcagaagttccacaccagcctgaccaacatggtgaaaccccgactctactaaaaatacaaagttagccaggtgtggtggcgcatgcttgtaatcccatctacttgagaggctgaggcaggagaatcgctcgaacctgggaagcggaggttgcagtgagccaagattacaccgttgcactccagcctgggcaacagagtgagactctctctcaaacaaacaaacaaacaaacaaaaagatacacaaatatataccttagtatcacaattgcctgcagtattcagtatagtaacctgctttacaggtttgtagctagggacgacaggctatagcagccccagagtgcagtaggctctaccatctaggtttgtgtaagttcactctgcgacgtttgcacaaaaacaaaatcacctaacaatgcatttctcagaaagtatccccatcattaagtgactcgtgactgtaatagaaaatgaaaacccactgtctctcataactgtgtaccctccagtggtgcttcctgcatggctcagcaaccttatcaagaacctggttatgggtattttttcttctctcttttctgtctccaatgatgtcaaatttattcaaagaccagcttagcctcgtgatagccaacaggttgtagctattccagaattaatatcagattatcacatctagaaataagaaaagacataaggttccctcgttggagcttccagcaaatgtcttctccagtcttgttgactcaaactaggtctcatatctactcctgcactgtgaccagaagatgtgagatgattctgatttcgtaaggcccaagccacagacctcactcctagaaccagtaataaagagaagatcttaaaagcagccagagaaaaacgaacctttgcagagaaatataaataaggacgacagccagacccgatggctcatgcctataatcccagcactttgggaggtcgaggcaggtggatcactcgaggtcaggagttgagactagcctggccaacatggtgaaatcttgtctttactaaaaatacaaaaattagccaggcatggtggcacatccctgtaatcccaactactcagcagactgaggcaggagaatcacttgaacccaagaggtggaggttgcagtgagccaagatcgcaccactgcactccagcctgggtggcagagtgagattctgtctcaaaataaataaataaatgcagatttctctctggtaacagtataagtggagcaatatctttaaactactgaaagaaaaaactgtcaacctaaagttctatatgcagggaaaatagccttcaaaaatgaagatgaaataagtatttttagacatataaaagttgaaagacttcataaccagcaggcttacatgccaataaatattaaaggactcggctaaaatttcactgggttgaataatgtctccccagaattcatgcctacttggaaccgacaaatgtggccttgtttgaaaatagaatctttggaaatgtaacaagttaagatgaagtcataccagattagggtggaccttaaacccaatatgactggtgttctcataagaagagggaaatctggacgcagacccacacagagggaagacagccaggtgaagacagagtcagagattggaggattttttttttttttgagacagagtctcactctgtcacttaggctggagtacggtggcaccatctctgctcactgcagcctctgcctcccgggctgaagagattctcatgcctcagccgcccaagttgctgagattagacgtgtatgccacgacacctggctaatttttgtatttttttgagtagagaccgggttttgccatatttctcaggctggtttcagactcccggtctcaagtaatccacttgccttggcctcccaaagtgctgggttagagaagtgagccactgcgccccgctggagaggttggagcttgatgccacgagctgaggaacaccaaggattgtcagcaataatcaggttatacactgtttgactccatttatataaatttctagaaaatcccaactgccctatagtgacagaaagcagatcaaacactgtcaggggaagatgacaaaggaacattatcttgattgtggttttaggggtgtgtactcatgccaaaacttaccaaactgtgtacttcgaatatgtgcagtttttcaatgttcactaaacccccaataaaactctttctcaaaaaattacctgtttgaaattcct

SEQ ID NO: 113 - DNA, 2308 bp, Homo sapiens
gagagactggatggacccacaagggtgacagcccaggcggaccgatcttcccatcccacatcctccggcgcgatgccaaaaagaggctgacggcaactgggccttctgcagagaaagacctccgcttcactgccccggctggtcccaagggtcaggaagatggattcatacctgctgatgtggggactgctcacgttcatcatggtgcctggctgccaggcagagctctgtgacgatgacccgccagagatcccacacgccacattcaaagccatggcctacaaggaaggaaccatgttgaactgtgaatgcaagagaggtttccgcagaataaaaagcgggtcactctatatgctctgtacaggaaactctagccactcgtcctgggacaaccaatgtcaatgcacaagctctgccactcggaacacaacgaaacaagtgacacctcaacctgaagaacagaaagaaaggaaaaccacagaaatgcaaagtccaatgcagccagtggaccaagcgagccttccaggtcactgcagggaacctccaccatgggaaaatgaagccacagagagaatttatcatttcgtggtggggcagatggtttattatcagtgcgtccagggatacagggctctacacagaggtcctgctgagagcgtctgcaaaatgacccacgggaagacaaggtggacccagccccagctcatatgcacaggtgaaatggagaccagtcagtttccaggtgaagagaagcctcaggcaagccccgaaggccgtcctgagagtgagacttcctgcctcgtcacaacaacagattttcaaatacagacagaaatggctgcaaccatggagacgtccatatttacaacagagtaccaggtagcagtggccggctgtgttttcctgctgatcagcgtcctcctcctgagtgggctcacctggcagcggagacagaggaagagtagaagaacaatctagaaaaccaaaagaacaagaatttcttggtaagaagccgggaacagacaacagaagtcatgaagcccaagtgaaatcaaaggtgctaaatggtcgcccaggagacatccgttgtgcttgcctgcgttttggaagctctgaagtcacatcacaggacacggggcagtggcaaccttgtctctatgccagctcagtcccatcagagagcgagcgctacccacttctaaatagcaatttcgccgttgaagaggaagggcaaaaccactagaactctccatcttattttcatgtatatgtgttcattaaagcatgaatggtatggaactctctccaccctatatgtagtataaagaaaagtaggtttacattcatctcattccaacttcccagttcaggagtcccaaggaaagccccagcactaacgtaaatacacaacacacacactctaccctatacaactggacattgtctgcgtggttcctttctcagccgcttctgactgctgattctcccgttcacgttgcctaataaacatccttcaagaactctgggctgctacccagaaatcattttacccttggctcaatcctctaagctaacccccttctactgagccttcagtcttgaatttctaaaaaacagaggccatggcagaataatctttgggtaacttcaaaacggggcagccaaacccatgaggcaatgtcaggaacagaaggatgaatgaggtcccaggcagagaatcatacttagcaaagttttacctgtgcgttactaattggcctctttaagagttagtttctttgggattgctatgaatgataccctgaatttggcctgcactaatttgatgtttacaggtggacacacaaggtgcaaatcaatgcgtacgtttcctgagaagtgtctaaaaacaccaaaaagggatccgtacattcaatgtttatgcaaggaaggaaagaaagaaggaagtgaagagggagaagggatggaggtcacactggtagaacgtaaccacggaaaagagcgcatcaggcctggcacggtggctcaggcctataaccccagctccctaggagaccaaggcgggagcatctcttgaggccaggagtttgagaccagcctgggcagcatagcaagacacatccctacaaaaaattagaaattggctggatgtggtggcatacgcctgtagtcctagccactcaggaggctgaggcaggaggattgcttgagcccaggagttcgaggctgcagtcagtcatgatggcaccactgcactccagcctgggcaacagagcaagatcctgtctttaaggaaaaaaagacaagg

SEQ ID NO: 114 - DNA, 819 bp, Homo sapiens
atggattcatacctgctgatgtggggactgctcacgttcatcatggtgcctggctgccaggcagagctctgtgacgatgacccgccagagatcccacacgccacattcaaagccatggcctacaaggaaggaaccatgttgaactgtgaatgcaagagaggtttccgcagaataaaaagcgggtcactctatatgctctgtacaggaaactctagccactcgtcctgggacaaccaatgtcaatgcacaagctctgccactcggaacacaacgaaacaagtgacacctcaacctgaagaacagaaagaaaggaaaaccacagaaatgcaaagtccaatgcagccagtggaccaagcgagccttccaggtcactgcagggaacctccaccatgggaaaatgaagccacagagagaatttatcatttcgtggtggggcagatggtttattatcagtgcgtccagggatacagggctctacacagaggtcctgctgagagcgtctgcaaaatgacccacgggaagacaaggtggacccagccccagctcatatgcacaggtgaaatggagaccagtcagtttccaggtgaagagaagcctcaggcaagccccgaaggccgtcctgagagtgagacttcctgcctcgtcacaacaacagattttcaaatacagacagaaatggctgcaaccatggagacgtccatatttacaacagagtaccaggtagcagtggccggctgtgttttcctgctgatcagcgtcctcctcctgagtgggctcacctggcagcggagacagaggaagagtagaagaacaatctag

SEQ ID NO: 115 - DNA, 96598 bp, Mus musculus
  misc_feature (19896)..(19915): "n" at positions 19896 to 19915  can be any base
  misc_feature (40802)..(41603): "n" at positions 40802 to 41603  can be any base
  misc_feature (46852)..(46982): "n" at positions 45852 to 46982  can be any base
  misc_feature (89077)..(89415): "n" at positions 89077 to 89415  can be any base
  misc_feature (90784)..(90803): "n" at positions 90784 to 90803  can be any base
tcttctgaatatcatgtttagattatgtaagtattcaccggctttctgtcactataaaccaatacctgagttgattaatgaataaagaaaaaaaggtttagttgatgagttttgaaggttccagtctaccagtctgttactgcagacgtccaccgtgatagtatgtcatggccagagcacctggcaaagcataaactacctgctcgtcaatcaggaagcaaatagaaaagagaactggttgcggtcccacaacatccttccaggtcatgtcttagtagagcacttctcccaggagaagcaccctgttggccttgccgtcaacacatgaacagcttggggactcctactgaggtaacagtacccattctgcatacattccctgagattaactgagacttgattcatggcccgctgttttgtctgcctttgtgagtgttctgcttgcagccctactaaacacagatggccaatgtggtattcagagtagtgggcctttaagaggttatgaggtcatagcacataccctgcccctgccatgaataggattttaaagggggctgatgaaggagggttgtcccctctgactcttccacctttactgtgtgacaatagagtgattgtttcctcgtgacattcctcatttgcgtgctttgaccttgcacttcttgcctccagagtgataaaaaataaacttatgttttttataaactacccagactcaagtactgtttaacagtacagacatatgaagacagttggtcgtgtttgtagtcagcaccgaaagaggaaagttgaaaacttccactctacttgtggatttctgtctcttccacaaatgtttaggtctactactttgtacttcatgtattttggagacctattaataagtgcatgcaggtggaggtcattatttttataagggctcagtagtgcatacatataaggttccaacactcagcatctagaggcaggagggttgctgggagtttgagcccagccagagctatctatagagaccctgtcataaaacaacaaaattattactgcccattgatgacctggcccctttattcttatatatatatccttctttgcccttagtaatattccaccccctgatcttctctattggtggttatgatataaactactttgctgtgtttagtatttgtattattagcacagtatcccaggcttctgcttttaaacactttgcgtctttcatgttaaaaataattcataggaaaagcattttcttgcgtcttgctttttctgtactgtttaccatgaatgctttttatagctgagtttattttatttgcatttaatattggacctcttctttatccacattttgtctttcattgtcatcttttaaatgaaataaacgtagcacttgaagagttccattttatctcccgtctggtagttctgtaaaacggtggctttctgtagtaggactttctgcatcctgcgtctatagcgagtgaagcgctatgtacctaatgtggaagctttgatttgttctcacctctctgctagtgctggtagacttttttccctccatgggttcagaatactccataatatattgtgttgttcaatgtgtttgttgtacagtaagtttgaacatactgcaaagcgaaagccccatgtgcccacacctttatcaccagtagtgttttccttgtttcttaaaggtccaattctatctcatttcccttcaccacaaagatctgcttttaggatgtcttctgtcacttctacgcgttatgaattctctcagctctgctttattagaaagtgtcagtttacctttattgtcaaaccattctgggacaaagctacctgcttctttgtggcttcaatgtttttgttgttcattatagatatcatgatgtgaagagtttgcatgtttttcttttattcagagttgagttttgtcctagtaggccttactaagatgcatttaaagtcgcccttattttatgatgtgttcttgactcttataacacggttttcccctagactgctataagcacacatgttcagaacgtttactgatgtctcttcagcccacgtgattgcaccctcagtgtctctcagctctgtatggcgtctgtaatcttatcagagcatttatagaacaacagtggctttcactgagctttttgggatctctgttaggatttcatcagagtaaaggtgggctgattatagatttttgaggctttgcacatataccatttctctgaccaatgagatcactgctctttatttgaactctgcttcctgtggcctggattagaaagtgccctcagtcagaaggtgagcttggagttcacttaaactgtgcagcctgtatctcttgtttagtgtctcaggctattgtgtttcataattacatatgaatttggcaagatcaaatagtggttgatttataatgactgaaattagatttgtgtggatttttaaagattttttttttcaagacagggtttctctgtgtagccctggctgtcctggaacccactctgtagaccaggctgatcttgaactcagatctacctgcctctgcctctggagtgctaggattaaaggcatgctccaccactgcccagctgtagcatgctattaatgattttgaaagacattattccagggcatttatatattcaatatgttggctagctagcatttctctacagctttgttttgaaactttctcatcatcccagaagagtgccttgaatgtggtaaatgatggctcccttcccagtcttcactcactcccctggcctctggcaagcaatgatgtgttcctcttcctacgaatgtgcttgttcttggtattcaatgtgaagggaattgagtataggtgagcgaccctttctgtctggtttcagtataaatcatttagtctactggttttgaaatacaaaatcaaaactcccattgctggctgtaaggcacaccatttaaggagactgtaaatatataatgtatgattaagttgcatagaaacagtgaaccatagtgcaaaaccaccaggaaatgttatagaccttatggactgaggcgataacagtggaagagaaaatacaggttttatggaagaagttgattttgaagtaccatgttgtggaatacataatatctaaacaggatagaatctcgagtgtgaagagatgtacacactggaaagaaatgacatagagctgttacatgtgtgtgtgtacacatgcgtgtgtgcgtgtatgcagtgagcattcacatgtgtagaggtcaaaggacaattttggaagctggttctttccttcgagcatgtaagttccaagtaaggacttaggtccttgggcttagcagcaagtgtttttacctgcagagccctcttgttggccaagcaatgcatctttaaatgattgatttccctatagtaaagtgcttgtgttggatcatggtgatagttgtggtgcttatataatatataatataatataatcatatgctgagtagttgctctttggacttcactatgtaaagcacctggctgtgatctgaaagatatttaatcaggaagataccctgccatgggggtgagcggtagaaaagctgtttctgtcagagtgaggtaataaggtctgccctagggtgtggctatggacatagaaaggaagtgcacacacaagaaacagtgtgaggaaagaagtgagcgacaacaagactgttcactgcattggttggagaaggctacatttgcaagaatgagacagtcaggagtcgggcttgttgtcgagtagtaaactgtagacattagggttgatgggtttaatgtatcattaacttgttttctaatggcatcgttacctaaagctaacaggggctcattaccaaatacaccttcagagccttaacagttctaatcatgtactgatgtcacgggggttgggctcgtatcttggatagcttgggttttttgttttgttttgtttctttttgctctttcctttttttaaaaaaaattatttattttttgttcaattgagaactcagtagccgatggagaaaagccagtgcaaagtccagaccgtgactaagagtgtaattaaagctgtgatactgaattgccagggtaattaacccatgctccacacgccctctgttcccatgacactgaccaagctgtatcgtgtaggctgctgtctttccatttactaaccgttctgattggctagcctttgctgcggcgagataaatcatgaagaagcacatagaaacacagatatgcctcatttcttgcgacctgtgactgtgtgtggtgatttgtctggctgctctgtggaggtcctcagctgctctgccaccgagggctcagcctgggaagtcttggctgagctctgctgcgtttccactccacacgtgggttctcatcctccactgggctggccaggcctttcccttccaggaaagaaaatccagtcattgaacggcttcttgaaagccatgttcatgactcatgtctgcatcctcctgttggtcagggcctgccaagggcctgacaacattcaaggggcagagatgtcaattttattgtccctgtgttgtgagggatagaaaagggcagtggccattgttttgagcctactacagctataagccctgagttcagactatgccactcttgtgtagttttgtttctttggaaactgacagggtaggcaaacctctttctgatgggttgatgaagggccaaaaacatccaggtaacatttcaaacatggtttccctgtgatacagaccatggcatacacaagtatcacaaatctgttcctacagcactgtggatgacacacacacacactctctctctctttctctctctctctctctctctctctctctctcacacacacacacacacacatgttttaatttttagtttagctaactgtggcttttgtgagatattctctctctctctctctctctctctctctctctctctctctctctctctctctctctctttctctctctctctttctctctctcccttcacgtttggattgccttgtaagtagctcatctgaaattcatgcactgtaaggtcctattctgttctctgggttactctgtagaagagttctatgggctcaccaggtactagatgtaggaacagaaagcacactcgggagaaggcatgttgcagaaacgagagaaacatgctgagactcctaatgtgcatctccccagtggagacaacacaatttgactggacagtgtgtgcatgaaggctaaagagcgctcagggaatatagagggagcctcttcccgctccagtcaccgtgacagcatgctacttcgtgtgttggcatgcacaaaattggcagaacgcctcaagtgtggagaattcaccattataacaagattatagtaagcaaaaaatcactccacatcacgtagaagagggagttggcaaaggcggctggtttaaagcagctctttgcaatcttctctagagggtcttatctgaaagcaaacaaaaaacaacaggaacagcttgaatgttagcagttatcctggcaggcagcactccaacccagcccagcccacccagcccccagcacaggtgtgtaaccctttagtagcctacttaatatggctgaagagatagatggcttaactagtaagagtgcttactgctcttgcagaggactcaggctggttcctaactcccacatgatgactgacaacctcctgtcacgctggttccaggggatctggcactcccctccttgcctctgccagtacccttacatttgtggtgcacagtcatgcttgcaggcaaaacactcaagccacataaaataaaaattaataaaaccttgaaaaaaagatcctagctagcagttaatatcatgagtagactagctccagccagaacttttgagaggcttgaagcaaagatgtttttaaatgaataatacttctgtcaagaggaaaatcacatcacccattacgctagtacaagggccataagctgtgcagttagagaggccagctctagtctgtcagcctgagcaaatgactcattctctctgaagcttggctcttcaggtggactctactttctgggctcagcatagcaagagggcagcatacgtaagcattacctccggttccttagttatgtggaagcagtctgtcaagcttagctttccccatacaaaggagagcacttgtcctgaggccagagcactcactggcttctcctcctcagcgtaactggcaccagggattaggtaaattgtccctgggttaatcctgagccttccaggatctttggatcacttctagaagatggtaggaccagccatccagtcctgtgagcccagaatacttcagagaataacttctaaactccccctcagggaaaaatacaagttatagggtaatggcatgcaaccacttcagactcaaatatgttagactgtcagtagctattggcagaaaatttatctgtctttgctacagttctattgctgtgaagagacatcatgaccaaggcaactcttctaaaagaaagcctttaaatgggcctggcgtacaattgtagacgtttagtccattatcatgatggcagagagcagaggacacaggcaggcacagaatcaggagctgagagttctgcatcatggtctgtaggcagagaaagacagactctggacttgggatgggcttttgaaacctcagtgctcctcctcagtgacagacttcctctaacaaggccacacttcgtaatccttttaatcctttcaaatagtgtcactccctggtgactaagcacacaaatatatgagcctgtgtctttctcaggacaacgaaaagtttatcttgcatctttcttcctataatttatcatgagtgagctattagactgtctggtgagttaacatatgttctgtatctcccactcactaataagcttcgcatggattagctagctgagtgtttcccatgggtctgccagcccattaggctgacactccatcatgaatgggtttcttcgtcagctctcagatttgcatttgcagtgcgtgcatgtattgttctaggtcattgtcacgatgctcctggtgaaataatattgaaaataaaagaagtgggaaaccaggttctgtaaatctcagtgtggtagcatgcacagaaacattgatttatttttaaaagaaagcttttagaaatcagcattactgaaaaaaaaaaagtccattgccagcctttatcattagtgtgacatactgtcagacaggaggacacacagaaagggggacgcttctgaagagcagtcaggaataattaggagtgttgacgaattcatacttcatattttatttaacactgtcagggcattttaggttcaatgatttaaatttagattcagccccctttttattctaatacatgtctaatgtgtattagataaatttccatgtcactgtacaaatctccccattgttatagcaattccataatatttaacttacagttgtagaacaagaatgcaaacagttagatcagagcacatcacaaactcctgaaaatcgacttgcagaatttacgccctctgaatattttacatggtatacactttatgtggccatagcccttacattatgttttcttcaaaaaattctctatggaaaagaaactttaacattttataatttaatctttagcaatttattgtgcgtgcaagatacaaaacaaaaaatgttgtgaaaagtctcttttcccagtatctttgccccattgctaaacaaaacagtacattaaatgacacctaagtgacacctgttatggttactagaattttaaaccaccctgccaccccaccccctccctgatttccaagtgcaccttctagctggtgtctgaccgcctacttttcatagtgcgcattgtggttctctttggattatggtattttaatgggtttggaaatttagagagccttttcccccaaagaaatcgaacagaacagaaagagttgttggtgttggtggtgttgttgttggtggtgcttacagtgagtcaggcctcggctgcctatatctctgaacctagatgctatatagttactgacaggaattctcctgactttgtccttgatggcatacagccatgcctttagaatttctccactcagtccagctgcttcaccaagatgcccctgtgtcagattgagttactaggaagattgccacaggaatgcaggaaacagttcgttcagcattcatagaatatgtcacatactcaggacttggctggttttgttacattgtgctttgtatgaaaaccacaactccccggatatttgctgagacctagctacattttctgcgtctccttatgtggtgagaagatccctaaagattcctggttggggtagacaaatgcataaatgagacccaggcttgtgtctccctttgtgtctcaaggtccttcctcaaaagcgcaaaaggaaagtggggggaaggctgagaaagcaggggtacataagggactttcccactgctttctcatccccagctccaaagcttagtcgatatttcaacattttaggtataaacttgcttttgcaatcaatgcaaatattactcagtgattcatcctttccaagtgactctcggtttctttcttttgacatttaatttaaaattagaaattagcatttatatcatgctagagctgcacttacctttcaacgcctcagtaatggccaaggctttatgcgtcaagattctaaggcacccgagtgttccttgagcttctgtagtacctgacggagttaagtttttagccacatataatctagaaaccgtaggagagggtgccatgatgacaaggtgcccagtatggtcgtttgtcagacatttaaagtggagccgtcttcattagggcctcatgtagggaatggaccaggaggatacccttacgtctgtgaagtgcggttggagttgaatcttccaagttggagtgagacttctttatgttaaattcccccactcaaacttctacaaatcatccaattttaaagaatgatttttaagatgataatatattatatcatttccccttcccctgcctccaagttctttcatgtacctctctctcaaaacttcatgacctctttttctttaattgatgtatctttttctaagtacaaaaaaaaaaaaatcaatctgctccatccatctaatgttacttgtatgaatgtttccattggcattgagtaaccaatcagtgtacatttttgggaaacacaatttctcatgctctcagctttccctatgtgcctgtagttcttagtctagggttgagacctcctgagcaatctccctttcacattgcctgtctgttggtgccatccttgttcaggtacacacagaatcaatgacataaaggtactaagtgggtttggacagtttaataaggcaataatgtcacctccaccttagaagattgtctttggattgttaggaaagaatatcatcacccaggttaatggaaaacctagagtcataaggatagtgtaaaacattgtttgtggaaattaattagtatccaaagtcacataccagacagtggcagaaccctggtattttcaatgatgtcatacccctttactgcatcaagtcaaaattcccctgttttaacttttttgtctgaataaatatgtttagttgcagctgcttagagagttttgttttgtttgtttcattttgttttaagacaagaatcttactgtgtagccctggaactcaccatgtagaccaggctaacctctaccacaaagacatctacttgcctctgcctcccaaatgctgagattaaaggcgtgtgccactacacccagctcgtgttttctttttaagtatgtatgtaaattgtgtgtttgtgtgtgcctgcataagtttatgtatactttatgtgtgcaggtaccctcagaggccagaagagggtgtcagagcccttgtaactggagtttgacggtcgtgagctgcgcatgtaagtactgggaactgaatcagggccttctgcacgcttaactgttgagccagctctccagcttgtgtttaaacattttcaagtgtttcttgttttaaacaaccccacttccttgcacacacctttgtgaagttgtgccaaaggacttagagctcctacttttcctttagttggtgctggccctgctccatgtggccctgggagttctccagagcctcccgtgcatcccattagtcacgtggtgttatagcacagagcctttcactggaaatgaagcctcaagttatgggaatgtcccgagatgtttttattagtgtaagataggcttttgatggaggctagacagtacattggattgaaaactaactagcctccattcttccatcagcctatgttcaagctccaaggtgggcacaacagccccatcctttgatacagagtctgttccctcatgtgctagaagccagggcttttctacatttgggttttattcagcatggaacgcagttttttaaaaaaagatttatttatttatttaatgtatgtgagtacactgtagctgtacagatggttgtgagccttcatgtagttgttgggaattgaatttttaggacctctgctcactctggtcggccctgctcactccagcccaaagatttactattatacataagtacactgtagctgacttcagacgcatcagaagagggcatcagatctcattacaggtgggtgtgagccaccatgtggttgctgggatttgaactcagggccttcagaagagcagtcagtgctcttacgcgatgagccatctcaccagcccagaatgtgattttgaggtgcagatagatggttctatgtgtttatcagggtctctgggtgcctgaaggccgctgaggctgcttatattaatagcttgctaagttcagtaagtttgagactttcaggtttgatgttttcactggttatttttttagtgcactctttagagttacagaattttcattgcactttgacaaaggcagaatgactctcaccagtcctcacaagagggcagggggtgtcgttctatgcccactcaagtgttatgtaaaatggtatcaggacttcctcagcctctcaaccgagtctagacagtcctaggaccatctcagagttcatgagaaaaaaaatgcacaaagtagaagtggccacagggttccatctggacctgatttttacccagaggtaggaccagctgtatcaaaccgaggaccctgagcttagccaaagggtttagatcccgtggtctccctacaatgagaggtagatgccaaggaggtacagcacgcatgatgccctcctacagaggtcttttttgcagacatttgtggtccctgtagaaatacagcctagccctgcatatgtgccagagttgtaggatctttaagattcactccagtgctacagctttcatttcttgttctgttttgtacagcttcaccatggcagacgatgatccctacggaactgggcaagtaagtcctcagctcactagcaactttgtttcaacgcgttcttatcccaaacacacagaggcaacgctagtaactcagtatcaagcaaaccctaaattagtaaacactactcttaatttattttcagtttttctgttcttccagagttggagagggccctttcttatgtatttttgcataaaaccgtatatactacatgccagaaagtagccactgagtcagttgtggtgttgaaggtctgaccccagtatttcatatggtgactggtatattaaaaaaattgctattcagtgagatttctagggctgctattaacatcgctacaaacctggtgacttgacacaatagaagtgtatcctttcataggtctggaggcaagaactctgaatttggggctggcagaatagttcccacctcctaccactgctgggtgtgtttagagatccttggcatcacaccagccacagtctgttgttgtgtggctttcctccacgtcttcacacataccatctcctctgtcttaaaaacacatcactttttggatgtaggatccatctctgtctagtgtgaattcatcttaacatatataaaggcaaaggctgccgtgtccaaataagtcacatgaaggaggagcacttatgaattctgaatatattttttttcaaaggtactgtagttaagcccactgcagtctgtgggagtgagtgtgctttgagagcggagcagtgtttatcatcacgtcattgtcgctgtcatcataggtgtgacagcagccatgacacagactgacacgaggatatctgtatcttcactttccttctagttttttctcttaaaaaatctaaacccatagaagtgttagacagtctgatgatacttccatttctttctcttctccccatagagaatatagggagcatagaactgattcttgaaagcagtttctagctgctagcatgattacagtggcaatattaaaagtggactctaatggtctattaaattatttaaaatactggtatctctttgctcctcagctatctactgagactttatagaagactttatgcccagaacattagcatcctagagacgaagggacaggtgatatgctcactgggctcaggactgcatcccggctggagtaacggaaccacactttacacagtctgtggatgttgccatggttcactgagagacagaagcagttggagggattgctgtgtgttcctttagggaaagagcaggttaaggatgactttgcaaaggaggactaagctgagctttgaaagctacaaccagtgcaggggcactatttaccaaggtagccctgccacaacattcattactacttcacatttaaattttggtggtaaacacccgagactaccatttcccaaatttatgctcgcaaagagtcagccaaaaataaaactgaaaatgaaatatttgggggagacctggtgtttctatagtcacacagccccagagccgcagtcagagctgccatggcctgcaccgtagtgacagctgcagtggcctcagagctgcagtcagagccgcagtggccctcttcttctcacccagcgggcggagtgagcatgcaccatccgctcctgaccatgttataaagatggtggtactgggtaaacctaaggatgttttcttttatggcagcataaaagacacctggcaaccatacgctcaaaccccttgtttaacctttcacttttaatgggcctcctctaacacaggccagccctcaccaccatgagagctgtctgcttggtttcaaaccatgcttttctgtctgtacacaggaaatcttagcaaccagagatggtcttttatgccacaaaagagtaagacctgccaaggacagtcattttgaaagtgtctcatgtgggcagcagttctgagctcattagcagggtgggcatgttctgatagttcagttgtgggggaaggggaggcccttggaggcttttaagtttttgtctttgggttggttttttcttcctgtcttaagctttaagtctatctcttctaaagtttgcgatttttgagggaggtgtcctccgtgttttagccacactggagtttgttctccacctgtcaccaagcaaacaccacatgccgccttcaacaggacgtctgtcttagtgggcttctcccccagccagatcactgcagacagaggcggaaccacagcaaaggacttctttgtgaggtcgttctctttgctcagagatggaggcctggagcttattataaaacctagtttcccattcagtgtgtctttcatggttaatagcgaatggcacagatgcgctttgcttttaaggattgaaatataacacactctttgctcctcagttgaaaatttgcatccctcaaaagtggatttgaagtgactcgcatttaaacatcacattttaggggccagtaagatttttcagagagcaaagtgcttactaagttagcttgactttgacttcctccactacccacacataagcacactcatgttacacacacacacatatccatctcatgttaaacacacatactacacatacatatgcactcttacactatgcacacatacacaccttacacaaacatatatgtgcatacactcaaacacacacactcacatactcccactacacatacatacactttcacactatacacacatacatgcacacacactcacactacatatacatacatactttcatactacacatgcatacacacatactacgcatacatatacactctcataccacacacacatacactcacactacacacacacatacacattctcacactacacacacaaatgtaataaacatgcaagcattactcttcttattcttgatttaactagacatagtaggatttgaggtacccaagaatatctagtgatttactaataaggacaaaaaatcccaaaaaccaaaaaccaaaaaaaaaaagaaagaaagaaaaaaaccgtctagcttgcaagctgaccagagaaagtaaaagaaataatttggtttctatgttgtccataaacatttcaacaagtcacttctggtgagtgagacagatagtaagctcacacatacaaatgtgattttctaaatgagctaactgggaaaattccttttggagtaattattagtcataacttaccaaggtagagcttaattctatcaaaacgttatatgttcactttttcagttttcttagttgtgtgttgtttctgtaacaagttaccatagtatttgaaacaacacaaatatcttctaaagattagaataaaaatgtcagagtcgaggcatcaacagggctacactcctagcagcgtttatttcttgtcttccaagctctaggggctgcctgtaagtcctgctatcatcccccagtcctgcctctgtaggcctgggtgagtcctgctagcatccctgactcctgcttctgtaggcacactgcactttgatttctcactctcctaagtagctcacttggatattccaggataatcctgtcatttaattgtcctacattgatggcacatgcaatatatcttttgccacagaaagcataggttctggggaataggaaggttctgtggagtagcatgtagacatctttagagccattgttcagtgtgccttcatctactagattcaggtatttatattgtaatagaaaatagagctgggcagtggtggcacatgcctttaatctcagcacttgggaggtagaggcaggtggatttctgagttcgaggccagcctggtctacaaagtgagttccaggacagccagggctacacagagagaccctgtctcgataaaaaaaaaagaaagaaagaaagaaagaaagaaagaaagaaagaaagaaagaaagaaagaaagaagacgacgacgacgacgacgacgacgacgaaaagaaaaagaaaatagaggcgggagaaagtgagccctctgctccatcatgttctcagttgtattgccagtcattttgtaagttgtgtaactcctgcctgtaattctttcaaggccttgaagttctgtagctcagtaagtaatctatttatcatcagaacagaagcatacatatctaagatcatgtgcacgtatgtgctgtctgtctgtacgtgtacattcacaagtgtgtggaggctgaaggtggctccccatctttgattttgagaaacggtgtctaacctaacctacagctcctggattcagctaagacctccagccagcaaatcttcatgtctccaccttcctgtagctgggactgcagacaactgccgccagcccagcttttcactggggtactggggctctggactcaggttcttgtgctctacagcaagcaccttatcaactgggccatctccccaccctctgggatgtaatgaactcaagttcctaagagggtgcgagattcagatcacttactctacacatttttctgaagggtccagcatgcctgaagctctcttggctccgaagatgcacagcttgcgggatccaccaggcccttgtctttagggaccccatagccattattctcctcaaatttctttgttacataagttacacacacaggggcctaagaaggtcccagaaaggcacgttaaaattttgatttcaggaatcctatttttgcgtttttatttctagttttcaatcatgtaattagttttctggctttgtgtattagtgcaagaagagaaattaaaatatttgtattttcttctttacagatgtttcatttgaacactgctttgactcactcaatatttaatgcagaattatattcaccagaaataccactgtcaacaggtaagaaaaacacccccttttcctgttgttttgctttcccttaaaaatatttggggtcaggagtcagggagatgtggatcaaccaaactaagtatatatgaaattactataaggaaatctgttgctttgtgggtgcttgggacctagcccaggccctctggaagagccacaagcacttttaaccacagaaccatctctttagccacaacagtctcttttaaaattcaacaatattcataggaaggaagtggtgatccgtgttttaaaaccaccctttcagtatgctttctggaaatgtgtctcacaaaaatgctccggcgtgcgcgcacacacatcgttttagcaagtgtggtttctggtctctgttagaataccctgaagccctgtcttcaccccgtgtaaggactttcctcttctccgtatctcattacccattagtgctcctttttgctttaccgcagctcacagagagccagtcttagcccctcagttctgtatctgagggccagtcttgtcagccaggacacgaggctctggggaaacagtaggaaagtaacctttatattctgaccagaccaagcgtacagaactaatgctcctgacatgactgctaattaacgaacccacaaactgtttaaggtccctttatgctatagcgcacgggcttcctttagactcattattgactggcatgtgtgtagccttggcctgatggctcttttgctgctttgatcacctgttggagctaagccgtcttcagcagccacttgttagttggtggagatgcgtatggaagtgattgtccattactgaggtggacagcaggtgctttgtgtgctccggatttctgtgtctcgtgatgtagtttttatcattctcatttaaaatgactatggttttgccagcgcctgccttacggaaagttttctacagacgtgggaggaaggagagttagtatgtcaccctcctcactggtgcccagaagttacatcacggaggcctgtctgtccttaccccaaataaccaccacagtttatctgtaatcttaagctgtccaacacgctctaggtccccttcttgtgaccaagtaaatgcaggggaggcaaccgtgtttcctgtgaacttctaaactctgagaccccaagagcttcctttagcatttctgctttattgaaaatgttgcagactcggttctgccctcagggaaagcacaggtttctagaaaatgcctctaattagttagaatactaaacagcatcctgcaggcagatgatattctaatgtgttctccttttcctttggtttatggacttagaaataaagttatccaaagaatcatctcagaaagtcgttggtgttcatatcattgcgcttcgggaatcttcttttccatagtgttagagaatccttcagaattgcatggaagatgcattcttttcctgttgtaatggctccttgcttgcactagctctccggctctgtttcagtgcgttgtcctgtttttatagtccaagatggatgggacattttgttcagattttaaaggactagaaaggctatctgtgacagtgtttgcttgtaattttcatgtggattttttttcaatcttctcaacttcttaaaatctcaacgtattagtatttctaaccctgtgttgggaactctctaacaagggacagctgataggtctgtgtcattttgctgtgatttaattttctttttacaatggaagatcattttttttctggcacagaaatgtagccaacagaatattagccttaaaacaagtatctgtgtatcagctccagtgttctacttctcttacccttgggtgtgctcttctaagggtaatgattgccccctctccgcatggaacttcacatatgtaaggaaaacctaaaaccaatcctgtgagtgtttcagacgggctgttaagaaggaagagacttggagcctaacacgaggatgtctcctctgcctccatatttcagcagcatcttatccaaatgctaccaccttcctggcctggcttctcagtaggctcttttggatgcctagaggaaatgtatatttttaatattgttatacaagctgtctgatatgcctagcatgaaatctttttctaatcagttttatttcctcataaaagttaaattcgagcaattttctttttgaaatttaaagttaacagttacctttctaaaagtttaaagtgtcaagagatgaatcccatgagacagaagaaggtaatttgctacattactgaccccagtaaccacccatctgtctttcttatttggcttcaaattaggtttccaattgctttcctggtacagtgtttaggcttccgtgttatctgatcagtcataatattgagaaggtaaaatgtattctctttgaagttacagtttattaaaaattacaacctgaacttttatctcacctcaaatttacatatgcaaaataaggcttaagcttcagccgagaaagtgaattttcaaatgagcacagaagtgttcttctagactgtcttcagcttcaagtcttaattttcactcaaacaactataaaatgtcgaatatgtttgtgtattacacagctattggttatcatactgggacatagaagccatctgacgcccttatggaattttttatcataacatttatatttatttattttgaaatttcaagtcagatatcattggtatataaattgagcctttaggtccttttcatagtaattaattggcatgcatttatcttcaattacattatttttggtattttatcataactctgggctgttttagaacagagttcttatgagcacacactgttagatactttattatatctgcatcaaaagctgtgagtaagatgccagggtagtggtccatgcttttaatcccagcacttggcaagaaaatctctgtgagtttgaggccaactttgtctacatagtgagctccaggcgagccaaggatacatggtgagtctctgtctaacaaaacaaaacaagccatggagaagcaagaaaagttcttcaggtctcacagagggcaaggaagaagccagttaggcaacagtggctgtcccttggcttgaagtaagggaaagactacatttcaggagcagtgttaggagaggcaggtggcccaggatctcccttctgtgggtttctagcttcagttcttcatttactcctgggcagttctctttgagggaggaaagtagtctgcaggtgaaggccacctgacaccacagcactcagaggtgctccctgcactcagctgtattgtgccctaaatgtttgttgacacatgagtctgaggacggctcggatcagaatctctgtcagcattcagaccttttgttcagtgccagtggtgtaccattaccattcagaaaaagccacttatttaccgttagtcacttaaactataaaactannnnnnnnnnnnnnnnnnnnatcagacactctcatctggcttccttgggcactaagcaaagcacttatgagcaaaaaataaatattttttaaaacatttatttaatatttcaaatgataacacagatcagtagaacacacttcacctataaaaattgatttgaaatctctgtttaaagcataacttcagcatttgtcttgctttgtatttcatacaagattccagaagtctcacagttttcttttggttttcttgtgttttccttgtttttaacagatggcccataccttcaaatattagagcaaccaaaacaggtaagcgtaaaggggtcgggtgtttggtaatattacatctcatggtaaggctcggtctctgagtaatagttaaatctgatgacagaggtaagggttttatctgaataatcggcagcctgccgtgttatgcaataacttcctgtgtctacatttttcttacaaatggctttgaaacatcagttaattataaatccttggtagtctgtcctttttccagcttagctcatcagctgcttccagggaaagcactaaagagtctcattcatgaagaaatactcacacacacacaggttcacagccactctgacgctctattgctcatggccatgcccacagggtacccctcctgccttcataagctctggccttttctgtgcatagaatgtgtagcttaaggcagtaaacgcactgggagacattagagtggactgggagatctcccctccacccctctggctttaatcccagcctttttgaagcaaggagaggatttttttgtttggttgttgttgttgtttttgtttgtgtttttgtctggctctttcgctttctactaaatattgtgttcaccagctgaagattaaaatagcctcaaaactgcaaatatgctcattagaagttgcatggctctagtactgtaagagagaagagaatcttcaatatctgccgacagaacatttcagtcattatgggatggaagttatggtatagcctcccacagagtgagaaccaagtcactagatctctgggtggatatgctcatcacagccgtggcgctgaaggactgtatacctggcctaccgagttgtgtcacccaatgtcttttctaggctgttccttcttgtaactcaggagagtgggttaacacattgtgttgtatgacactcaatgctaagaagtgaatgctgacagcattcggtgctgtgctgtagaattctgatgtggtcagctgttaaataggagaaacatcttagggatgtccatgctactttgtaaagctgaaatcagatggaaatgttaattataaagacaggaatgtcacatggaactttggggcattgtttggttgcttataggcggcctcttaacacacacacacacacacacacacacacacacacacacacacacgcacacacacatacttatacacatgtacaccctccctgggctgcagataacacctgcccttgctttatctccacgtccatctttgtaaagatgatttctcacataaagtcgctgttctcggagctcttcagtagagttgtgttctgtgaaattctgcccagtaatctggaatcctggaaaatgtcctagcctggaagatttggtgaattcataaaactgatgagtccaaaatgtacctacacatcaaatagatttttcagatcctttagaaaattttaaataatttatttaattttattttgtgcgcattggtgtgatggcgtcagagcccttgcaactggaattacagacagttgtgagctatgacgtgggtgctgggaattgagcgcaggttccttgggagagcggacagtgctctgctgaaacatttctctagctcccctttttaacaatattaaaattgcattgatttattttttaatgtgttgctctctttgcccccaccccgtgtgtgtgtgtgtgtgtgtgtgtgtgttattatgaaccccaaagtcataggtatttatgatgtgtttgaacagctagtatagttccagaatttaaaatttaattcattttgtgtgaatatataaaatcatatatgtataaaacatcatgtttgattgccagtccgattttattttggtatctggctttagtgaaagtaagaaggttgtatgtaagccaggctttttgactggatgtatggagtctctctgaggttaatgactcatttgaagtaaatggcgttcctgagatgaacagcgatagatggtgaacgtttaatttcagaatactagaattagaaatgtgtccagagcgtgcattttaagacttcctaattttaggttgttatttaatttaaaacattagtttatttctgagtcaaaaaatgtctgtagtcattgctggcttcaaactggtgccagttttcctacctcccctctccaagtgataagatgacaggtgtgagccaccatgcccagctcaaaggcatcgatgctccagccgaacagcgcaatacacattacaaccttcagaataaatgctgccttggataggacgttcaatattcttattcgaccgagaataatacacagtgtcacacgctgtgcaataaatcatgctggctacagggttaaacgtcactccccataaggtatgagaggtacaggtacagatttttccaatgccacaaagaaattttgtaattaaagataaggaaccactatgttaagtttttgagttagaaatgttctttttcttggaggccttttgggcacagatgatgaaaatgaaccaaaccacagactacatgtctttagactgtccagttccgtggcatgtttctcactgttaactgtttattcatgttgtgttgtgttgtgttgtgctgtgtgagttttgtactgctttgtttggaggcagggtctcagcagtgtagccttggctggccccaaactcacagagctccatttacgtgcctctgcctcacaagcactggggtaagatgtgtggcagttataatctgaaggtgtgtttgaattttctcagttaagtggatccccatcctaacggcagcccatttggggctcttggtgttatacatgctattattgtatagtttgggggtgattgagttcaagcgttatccagactggatcccagtaatattaatttttacaaactttatgatcttattccttgaagtgctcagaagactgctagagtcacagtgtcgtagcatacagcatgtctgtaacacagatgcacttaatcctccagagacttgagaaggggcaccaggagaagggggatgtggggggggagcaccctctcagagtcgaggaggaggaggaatggggtgaggaacttgggggggtgatgtaaataaataaaataattcttaaaaagacacctttatggtctgtgatcagagcagataaaggaactcctttaagtaattagcataacttttactgatggcagagcggagagcttggcagcagccattggtaacgagaggctccagttgaataaagtgctaacgtatatccaaaggcttaaactcttcatcactcctgtgttgaaggtgggtgcctggcttctccgccactgctcagtgcatcattttcatagtggctgttagaaagcatttctccgtctgcagagttgtcttccacagttttgcatgtttagagacgtgtgtgtacatctgtcattgttgcgttcagtaaataccgctgtgttcacctctgcagaggggatttcgattccgctatgtgtgtgaaggcccatcacacggagggcttccgggagcctctagtgagaagaacaagaaatcctacccacaggtcaaagtaagtttgaaacctctgctctcactgcccaggagcaaagccaaaacgttcaagtgaatgtgactgggatgttcctttgcccctcagcgggagtgtttacatggttcttagaatttttaaatagaaattcacctcatgaaaatgacgaatcgtcaaaacaccattaacatctccatttaagtgagatggttccaacatcaactaagaaaaacttaactacctctccagtgatcttaaagctgtcttttcatcttaaagtatttttaaatattctctgatgttttagtaaaacttggagccaggtgtcatagtccatacctgtagtcactggacttaagaggctagcaacaggactgttagatatcccaagctagcctgagctacatagcatgcttgagctcagcctgggctaggtgagacccttatctcgtaagaaaacgaagaaaataaaaaatgtctttgaggcaaatttcaaatactgggtttatagagatttcatgacaagacccttgacagaatatatcggctatggagtatattaattatttaagatcataagttcagacccaagtgatggaataaacaggttgtaagcaggcttatctcactgaccaaacatataaatacacaaataccactagcatgtacttcacaaggtgttttagagtttcaatgaggaaatatgcttaagttctctgtagagagcctgagagaaaccgtgtgcagctaccatgaatgagttctgtagcatggggggcagaggggtgggggaagcttcactgtctttaccttggggtgtcgggtgtagcttcgctgctcttcgctttttacgttgttgatctagttgagactaccttcctctagttcagagtttctactttcctaatccagtgttgtgtttcagagactgacagtgattttccaaggaaacagttaaaaactttcgagtggtttaaaaggttttatttatttggtaatctgggcttagactaaatgttaccagcagtaaacgttatggcactccagcctctgtctttctgctggcttgagatctcagacgctcttgccctcagctgagctgacactggggaagttatcttcagttttgcctcctaggttgcttgtcccccttttaatgttgtacttccaggctcaggccttccaggttcttgccctctgtctaagacaaaagagccataccatcctttatctttccagtgaaaaaaatgtgaaaaagccataccatcctttatctttccagtgaaactcagctcctggcttgggtcctgagagtcacattttcattttaaggctcccagctctagttgtggaatgagccgttttttttttctcagtaaaggtaactgaacgtggaagtgcagtggctttagtgcacagaaggccacagttatattagacagtgtttttcagagaagtcgaaccaggtcggtgaagacagggagatagttagatggttgactgagcgatagcggaggagatgagagtaatcggcctcagctgtgacgattatgaacgacaccaagacccactctgcagcgtctgtaaaatgtgcgcagggacactgctaggattccagcacagaagcctgggcgccctgtaaccaaggggactcttcactaaatctgggcgtggctatgcttttcctctaaaggcaggagaggttggactgctgatgccctggaggggcaagaaatgaagagtgtcctccctcccattcaggtggggcagtagccggagggagggaaggagaggattctctggtgttttggtccagcaggtcttctagctgaagggaaggtcttccatcagtccagcaaactttccagtgtcctctggaaacgtgcacacagctaggaagcaaatgctttatcagctttcagcatctgcccagtgtagtcgactgcacaccggaaacttccctcaggacagtctgtggcttccagtcctgcagaggccaggcaaggaatgcagagcagagcaccggcgaagaaaacggttattccacacccctggtggtcctcgtgtctcccatctgttccctcctgtagccttattaacactgaggagctcaggctgaggttaactggccctcttcaaaggtgctgggcttctttctcctgcagctcactggccctcccatgtgagcgtgtgcagctgaggggccaggggccaggggctgaagaacaagtcaagaaggactgataaatcaagtcagggaggatgagcattctgaacagcaaagaagaaatgggggcagaagtcatcaggggtcagatctagaatttcctacctgtgtgtgtcctgtacaaatattgtgtgcaattatgtgtccttatctgcaccagggtcactgaacatcccttgtcagcactgatactgatcataactacttaagaaccgatgttaggagaaaaaagtagggtttttttctctattggccttctaccaaaaaaaaaagaaagaaaatgtacattgtgttctatttatgaactctttccttctgaggcactagaattctgtggtctgccatgcatgaaagatgggagtgtctgtagaaagaggcttccaggggtatcatggcttactgcatacccacccataattcatcgtagaggtgggtccatgtacttcctgagggagcgactcttccgtagccttgcacatgcaaggctgtgacttgcatgaagtatatgtcttcagactcaccttttcttcacccccactgacaatctctgtctccctggactcaggccctctttcctgccctgcctcttcaagcacccctccctgctgtccttagggagcgcccctgcaaggttagtggttgatgtgatgtgaagattgcagtgaagatctgaaggctcttgaaagctttgggaactggtcatgacttaaggctgcagaaaccaagctttgctttatggagcttgtaaacttacatcttgtttggtcgtctacttgttgactgtttgaagcatcaggttgacttgcaagctaactctaggaatctcccaaaaccagcacttcctattagaagtatttccacgctgtggtagatgctgggatgcaagctcagtcgtcaccccctccccccactgaggtaccaccttttctagaactcaggcggctgtaccatgtgtatgttcctctcgtgtagttgagaagaaagaacctctttggctctctaggatcttgttgtacaagtcttcacgttcttatttcctctctctcttttgattaatttctctgggattactggttcctatgtcctcacaggtatcatgaatggtttcttcagattgaagcattccttccactgccttcaggagctcggggtgggtgaatagtctcttttaaaccagctacttcatatttcaaaatattttaagcatacaagttgtaaagttctatataacaaataccatgtaccaaaattaataaatttaatagatggtaatattttgcctatttgctatctgtctatctgttctctctctctctctctctctctctctgattctctctgaagtacaacatagttacagtgggagcccctactcagccactgctctgtcctcttatcctctttctttgcccaaaggaaaaccactgttctgaacattctttatctgagatgcattcatatcatatactaaaatcactttcaagaaagttactttttactatctttaatccaaagttttttattatatatggtggctctttttcaaactatatccaggttaaaactgggcccctgaaggcttaaacattgattgctttaatccagtctcttcctctttattgtttgactaaaaatgtcttcagtcacagtgtggaatttatgctgacccttaaagcaaaaaatcatattcatgaggaagctagggaaaataaatatccagaatttaagaaagttttccacttttaaaaaatggagtaatccactgtctagcctgtaagctctccctccagtgtttgcttggttctgactttatctgcggctcctgggagaacaggagagacagcagagctcctctgggccaagcctgtcgctacctgttcttgactcagcaaggagtgccagggaaggctcactgccctccttttcccgaaagtggtgcagaaaaattttaaatcaaagtgtcttccttgagcaaatggaacagggccaagaggagaagccacacgtggctttaggaatgcgcctgcagcccgtcctcacttgcttgagtccttctgtgctgggcaccttgtgaacattgcacttggacatcagtgactttcatttctaaaagacagtttgtttgtaatcatccaatgccaggaggttggaacacagtgatgctaatatgacgattctgatcagctttgctggcagctgccctgcctgccactctcctggggtttgatggttaaagaacgggtttattggaatgtttctgtgaacaacagctttggctccgttctcccacctcctgtagtgtgcactcttacgtgcctctcactgaacagtccttaatgttacgtttccgtcaaggttaataaagcccggctgatctgctgtaggcttgaggatatcacatatctttgcaaaagcgccctttcccttgcacaggcttgtctgcatccggagacttgccatcctaaagatctagttggaatactaattttgaataatttagcctgatccagttacctaacatgccaggggggaaagatcaccacaacagattgggcattcagaacctacctagttcatagcatttattagaatgtcctttgacacttccaagtgtttactgtgctcaaataaaagaaaagagctatgttccctaccaatactatagtctgtgctttgtaacacacacacacacacacacacacacaaacacagagtttattaaaacaagggctttgtaacccaaggttcatggatccttttgtggtttcagaaaggtttgcaacctctgactctacacatagagttttatgcatatttgtatgcatttttaaagactcgaacatgtgtaaaagtaatgctgaagggcattggcttttttaccacagctgattaaatcgatctctacaattttggagggatgggggcgggggcggggggagggcgactggctctcactgtgtagcttaggctggccttgaactcatcttcctacctctgcctccagagtattgagaaattccagggatgcaactgtcttgaatgtttttcttctttcttttttcatttcaaaaatttacatttacactttttagttttacccattttaggcaagttgaagcgctttgtgtttctcagcatgtaattcaagctagttgctctttagtattccattgactggaaaagatgtgagatttagcgcctcctcacacacacacacacaccacaccccacccccgcctttctgttctctccttcctcccctctcctccctctctcccactcccaccgagtctcttggcactgactaaatacgatggttcaaaaccaaaaagaaaagagaatcatttccctgatattcactcagcacggtggcaagtcctgcactacaaggaggtaacatcctctgcgtggccataataatctagacttctgcataacttttcttctacgtatcccaggcgttttgcgattgcctccatgagtaaaatactgacttgttaaaaaacaaacaaacaaacaaaaaaaccagccctttatttcactgttagcattagaagttagagaaagctgcttactgaaggaaactgttgagcagtgagaattgatcctgagagttaggagagccaagctcctgagggttgcaggttgtctgactttccaggcttggtatggtggcctgcctcgcctggcatttcctcttcccctctcctgtttctctgcatactcattgctcttgggatgcttgttcctagtggcagtgttcagtctgaaatcatctctgatcaaagtggtctctgtttgaagaggatcattacattcaggccgggaatcccggtttcgtaaagccacatgtgaagattggttttgatgaggcagagtgagtaaccagagcctatgatcctcatgtccccagccaccttctccatagtcagggtctagggtctttggtgggtctagggatgttctgctggctctcctggagtccccatcttccccctcccactctaagtggattttaggtcagtcttccaaacaactttcactttcttgaggtctaatggaggtgagtgggaggatatctgggcagacatgtgaaacaatccagtctgaagaccaggggaatgcagagtaagtccccagcatcttcagataaccgagttatctatccattgcttgatagataagtacaaaacaggtttgcttgtattagagaagacttggaattgaaaacaagccagaagaaggtaaggccaaacacacatttttcaaatcacatatcattgaaatggtctagacattggaaaaacaatgatcaggtgggagagtggataatgaggtttctcggggtggaacagagaaccgtggaggctgggagaaagggagagctgaaagcagagcagagggtgtctagctgaagtcctgggagaaactaacatggctgcatgtgtgtgtgtgtccttctctacgcacagctctcagattggcatgcagtactcagcttgtgggcaacatattcacggtgttaagcaccagctgtgaactgatggccagcgtggggtgtgacattacttcctagattctcattggctaagctttgtgaactgatggccagcgtggggtgtgacgtcacttcctagattctcattggctaagctttgtgaactgatggccagtgtggagagtctcactggctaagctgcagcttcttcatctgtaaagctgacgtagagaaccaactcaatggaacatgtgcgtacattcagttgctcaatgccggcacacagtcagcctggaaacacaattacacccgttttcatataaaatttcaggaaattgggtactactccaaaagcttgtgtttagaggtaacacatgatgtcataggaaactcacagaaaacaagaggatagaaacaagtgttaggttttgttaggtcccttcactgtgtcctggtaggccctatgtgtctaatttgcacaacgctgtattcattcctaggttgccataacaaataactgcaacctgggtcatattaaacaacagagtttattgttccaaagttctggaggcccagagtccacagtgaagttgccagtgtggtcttgcttcccacagaggcttcaggaaagagtcaatcctggcctcttccagtttcgggtacttgttggcagtcctcagcaagctctagctgcagccacttctctgatctctgcttctgtcttcacagggctcttctccctgactttgtatctgaatctctccctcctttccctcgtaaagacaccagtcagcgtggttagggaccaccacgctgtgtagcaggacctcttcttgaccaatcgcatgtgtaggaagcctgtgtgtagatgaaatcatgttcttagctcctgcataggcccgagtcctgggagatgctcttctcacttactacaggcacgatgtgcagtggttacagagtgttcccgagtgtgtgcatttaaggccatgtcgttccgtgctgtgctcagaaagaagcctgtgtgcaccacgtgctcccctgtgtacctttgttagattcaggtagtggaagaaaatctctcaggtctgaggaaattgctgtactagggttttgaacatttattctagtagatggaaggtgtgctagaaagtgtctggcatcagactcttggatggcactctgaattgtagcatctgccagtttccttcccatagtaaatttcaggctgctaacatgaagtcaactggcttgcaataaataaataaatagataaataaataaatattttaaaaaacagtgaaaatttaactattctgaaattaactccatgaactagtcaaccggtttctaacctactaggtgttaagccagcaaagttagagcgagagaaggtgatacattgtttcctgtaggagctactttctatgcacatgttacataatataaagatgtgcaggctatgagggaacccgataggtgttacagctgggacttcattgtgtgatagttaaagagagctgcggttgagtgggattactgctgtttagaagcaaggctagacctcggtcccattctgccactcgctcgcaggtggggtgttcttcagaaagttgctaaagatcttcaaacttggttttgtttatgagatgaaagtagaaacaactccttcacaggaaccatgcgtgcttacgtaaaaaactgacctcttagaaaggcagctgccatagtcctggcacatctgcgtcattaagtgctcattcggacacgtgtgtagaaagagccatggagatgactgtttttttcctgagagcagaagcttgcaggtactttgtcaacagcacctagaaggatgcccatgtatagcagacaggcagcagttacttgtacagtgagcaggtggtcagtgctcagaagctggaaggatcatctaaggaggcacttgtcctcccatggtggcgctaagcaagtcactggagtggccaccaggtctccacctgtcactgctgctcactccccaccagcctgctcctctttgcttctccagcctggcatgactgccagccaggacagccacatcccagacctggctgtacactgtagtgtagctcttagacatagcaccaatctattctgggttgaaactggcttttctgccttagtttctaaacctattttaactgtccaattgcaaaataacacttaaagaaactaaaaaggtttaagcaaaatagacatttatttattttaaaaactgaaaattctaagggaagaagtagaaaaaagaaacccaaacaaacaaacaaatttgccaaatccgtagaaaaactcccattgggctttttagcatctcgacttctaccttagaggccactcagcagcagcaggctcactgtgagaagacctgcattcccaaagctgacatcaaagcttatgagacacccaactggcagttcctaggcctttggtactctgagttgttccactgcctgcccctgcagcagtgagacaggggatagggttgagccctgtgtccgtcagtcgcatactctgccgctggttctacaagtgggattagtcactgactaggaacatggggaatgaactgaggttaggattcactgagcaaagagctatgcgctagtgacacgcggatgctccaagatcacaaggattagctcattcgtccatcccgtgaccagcctacagtttctgaactctcattcctaacagttggtaaacccgggttcctctcttgagaatgactgttccatgctactcctaatatatgaaacttttgtttttaaaataaaccaaaaagttttttgtttatttacagatatcacttgcatttaataaaatttcaagaaacacaaagttataggtagtaagtccccttctgtccaagattcctttgttccctggagaggagagctgttaggggcttctcaagtgcactcccaaccgtgcctgccgtgtgtttaccatgtgtgtttatacctgctggcacacttccactcacgcttcctcgtgtaagtaagcattagtgtagcgcttgtgagcacggatgtagtctactaatctatgaaccatctgctgcttacttttttcacttactgagtctgaaatttgctcagattaacagcaaactccagagctggcaaatccagattcaagtccagctctgtcccctgagtaactgtgtaaccttgagctaactgaccaccttctctgtgcccctatccaactagcataagaacaactccatgtctcatagtgttgttgggagtactaattgaattagtgttgaaagagcaatgtctgctccagggaagagttctgatgttgaatttcctacccatctactctgtaaaggctgtgtgctttccatggctgcttggggcatgctgtcttctctaagctccatctgtcttctatcacaggccaaccttagtaaccctgcatgatagtaacttctcccttatcctggggtctttgtcactttgggatgttttgttattgagatagctttttaaaaatacttattcatttttattttatgtgtctgagtgtttttgcatacatgtatgtatgtgcaccatatgtatgcagtgcccacgggggccagaagagggcgttggaatccctgaaactggcgttgcagttggttttgagcagccatggggatttgctagaagagcagaaagtgtttttaaccacagagccatttctccagcccagagataccattttaaaattataatctgtgactgttttgttttgttttgttttgttgaaactaggttttaccatgaagccccctagctggccaggaacccactgtatagacaagtctggaatgggactcacagaggttggcctgcctctgcctcccaagtgctgagattaaatgcatgtgccactgtgtctaaccctttcttaatgtagtgtgtttattctttgaagagtcataaactagattttcaccatattcacttcccactgttctttttagctcttctgaggtctacctcctacctcctctcagtttcttccttccttcctccctcccttccttccttcctcccttccttccttccttccttaattcattcattcctttctttctgcctatgtactaatggatatgagactatccactgaccatggtcattcctataaacattttcctttcataaatgttactctatgcatgtggaggtcagacgcagctttctaaggtcagttctcactttctgcctgtctctcttgttccccactgtgatgcatcctccagacttgatggccctggagctcccagctggttctcctgtctctgcctcccatctctctatggggtgttgggattatagatgtgcatcacctaatagggctttttacctgggtcccagggtctcaaactcaagttgctgtgataggcatatataacaatgcttttactcatgagcctccctggatgctgaatttttttttatcatagctttattttgactctttattgtgccatttgcttcttatatgtttaatgatgtgtttttcaatgtgatgaccctttcagagagtctgccctgagttgttcccaggcctcgcccacttgagtgtgttctggggatgccttcctaatgagccccatgcggactctgatggctgccgtactatgtcttactcagatgtgcccctcctcatttctagaccttatttcatgtgcataagaactgtgtctttttagattccctaacactgtgctcagttaaattccttttcattcttgggtactaggtgattaccccagttagcaatagaaatatgcaattagtattagacataagaggaaacatgtctctcccgttcatctcttactgagctcttgctgtgtctcacagccaatcatattcagctccaccagggaggcgttggtatcctagttttcaattgggtttgatgaacacttggccaaaaacagcttgtctgtctacctttcttatgtacatgcacacacacatatctcctaattactttccccagcctagacttctccagaaaaccaggcttcagatctggctacttggtcgactttaccatttggatacctggtaggcttgctgagctcaaagttgaatgcttgattccctacttgaagttgtccactcttagaaaatggtaacccatcccccagtttctcagaccaagcggtcttgaagttattcttgacgctcctcttcttgatcaccacttataatctaccctactggctatttcttcaaactaattagaatctacttgcttgttgccagctccaccccatgagccctggtataaaccatccgcctcctaatggctgccatttgcatgggtgatgcctgtctcaagcaggtattgctaactgattacaaatttagggtttgctctatcattttttttgttagatagcatttatctttttgtacttttcaaagtagttttctcttcttcacactcactaaaaaatatttcagactagtttaaatgtttctaatctaaaaacacaaagtcaaaaaatgctctgaaagaaccaggggaaaatgaatgggggtgggtgggggggtaaagtacttgtcatacaagcatgaagagcttgagtccccagaacccacacgacagctcaatgcagtatagtagtgcaaggctctataatctcattgctcctgtacagaaatgggaggtaggcactggagactccctggaaatttacctgtggtcctgagcgtgtcagctgagtgcagttctggatcctcttctcatccgggagccacgcatcactcctgccatgatttactgtgatatttgaacggtgcttgtcaccaaccagcagaagtgttgcatgccagctctcgtgtccgctagacctcgctcccccactgctaactgactgggctcatcctccatctcctgctctgtcctgaaatggctcatctgtccaagggacctgattccttagcagagtcgcttttcctaggttttcctgaggctccatcattgatcttttttgttgttgttgtttttaagtcttgagttcagagcctatttcacacatctcattgttgccatcatcacagactctccttccctccccatcctaggtttgtatctccttttcccaataaaatgcaaaccctcattgccaataacactagaagtgcctactcagttgattggtcctacaatacttccaaacacatggggagatagtatggtttcaggatgacgacgccagtatcagccctagcaacttaacaaagagttgcgttttctttttatttctttaaccaaaattcagcagggaataatcaaccagaatagcgttttcatgggttacattcttttccttctaggaaactgcgttaccattgaactatagggttagaatactttgtttatgatgaatcttaagagttttcctattcctgctgattttgttttatttttgaatggtggcatgtatcggcctcaattaccttccatttgtgtgagataaactggacgatttgggaactatcataaagtcggtttgctttattaccttttaatcagagagaggaacaaagagttctgggatggttattctggaatgtgaacccagtaagctcacgttgtcacatggggtgttccatttctatatttggagccctcttagtcttcctcacagtcacagagtacacacatatatggttctcgcacataggcttggtgctggctctgcggtcacagacacgaatgagtttattcctctgccccgaggttacagagagtagccaagcagcagacacgtatgagatgatactggggtgtttccttggaatttggggaggatgctctgcagtggggtgcatatgtgtatgtgtgtgtatgttcctgaagtgggtggccttccctgaatgcattcctactgtgtagtcattccaaacttctgatggtggaatgccaggatcacagagcacttttcatactggatgtcagaggcatggccccttcacaacacacgtgcttcactgtcagagcggtgggcctgtcacactgcgtgtgcctcagagataacataatcttccaagctggtgatgtcatcctggagagacagagccaacgatgagccccaggggattgttcctaaccattttaacaagtctcagccctaaagtctttatggttcttatcaagttttttgacaagaagtggtagataacaaatactttaaattcaaattaatcttgaaaactggagcgaagtgccaaactcttcagccttgatgttgaacagagacacacacatccagaaaaaaaacaatgaatccacaaaagtacagagcagaggggtgagtcagcagcagtacatgcggagagagtagagttgacgtgcctagcaagagctagcaaggcctgcagctgccaaagaagtcgctcctcactaggcaacagtaatggaaatatgatgtataagagccaagaggtgatagtctcatggccaccctgcaggaagatcacactagatgcgtgcagcctgctgggcagagcacagtagtcggctgtgggcggggcggggccagatcaggatggttgtgtgaccacactggaatggcttacaggatggtcctggctgtcctcggtgtttgaatagctattataagaaaatggaaatggaccccaccatcacaagacaggggaaagagggagcggtgagctgaagtcccagaagacaccagcttcgtgggaatcacagccaccacaggacggggtgactttgtcgtcactgctctgaactaacctgaaagacggtagaggaagaaagggaggctgcgtgggcttcagcttcacagcctcggagtctctggctctccatccctgttttatatggcattagacagagttttgcttagtaaatcatacctttgtaacaagggctgatcaagatttgggtacaaggaagttataatttcataatttcatgatagataagaaaatataacaatagatgctagtgacttgctggccattttctccatgggtcaaagtgcatgacttatttttttacactagtatgtcagtttattaacacaggccgaacagtttagtcacagcttgaaagggtttggtttggtttggtcctgaaagaccaggtacagagtgataccagatttttccaacaacttgctggcattatcctagaaatcagtagaagttttggtgtttacccctccatgccttggtctacatcatgctatgcagatggcacactgctttggttaacctcagtctgacacgcagatcgtgagttctcttctgccatgctcctgtctgggggcgtgatgtgaccgatgaagtgtcaccaagaaataagacaaaatttcccaggtctactcactggcaattctctttatttagtaggggttttccacaggaaattgcaggagaagagttgaagtgctctttgtcttgtgtactttcctctgacttttctccttcccagagtggcccacattgccttgtaaaggagctgtgttgaccatgatactgatcaaagtcagagtgcgttctgccagtcagctaaagcctgattgctcctctgcagtggacttctgtagttaaactctgttttccaaacatgaaaacacataaacaaggactggagatatggctcagcagctaagatcacatacttcttctgcagaagacccaggttccgttctaagcacccacatcgggcaactcacaactgcctataactccagctccaggggacccaacacactcctctggcctctatgtgcacctgcactcatgggcacatattcacacatatatacataatttaaaataaaaatcttttaaaaattaaggaacatatacccagagagtaagtatttgtctctaagaagaaataaatcggtgatattaatctgaaacaaatttggacatcacagaatcaaaaatatttctgattatcctaaattaagatcaaaatcattttaagggaattctggagaggtggctcattggctaagctcttctctgctcttgcaaaagacccaggtttagcacccaggacccacatggcagcttggcaactcacagccatctgttgtcccagtgccaggagacctgacaccctcttctggcctctgcaagcacctgcacacacatggtgcacgtatttcagggaaaacaattatagacataaaattcaaattaattttaaaatgtcattgtaagatcatgctagataaattttgtataaatcatgtctgttttcagacagggattctgtacaaatctaacatgcattttagacgacttagttttgaagtttacacaaactttttttaaaactttgcttaaaatagctaattatgacttcatttgcctgttttggccctgccccccatggccaaagcctgctgacatccccaggaccaatagtcccttattctcagtactataataagtactgagctcccagggcagagcctgcactgcagtcactgaaaagcactgtgttgagtacccagacccagcctggatgggaaaagttaatatcattgcctaacatgaaggttttctttgtctctaaattttgatttttccatgctatcagaggcccccttgcaacaggtaatctgagtgttgtctgttttctccgtccgtcatcgtggttaagtgtattttagatgctcacaattgtaaagctaaattgacttgacaaggttctttccgacccaaattctgtgatgtccgactctttttttcttcttttattttggatttgtgattgttgaccattgtcctgtatgtcttacatatatactttagggaaccataagcattttagagctggaagccatgctagctgtgggctaggactagacattttgcaaagaaagcattaggagaccaaagtggttagtgattcaaacaaattcatagcagtagctaaagactaaaattctgaccatcttcagaggactaaaaataatcaaagtgttatctgaaaatttgtaactccaagccaggtatatatatatatatatatatatatatatatatatatatatgtatgtatatatatttaccccaaacaaattaaagcttcctataattctgtactcatatatgtatatggggtgtgtgtgtggagagagagagagacagggaaagagaaggggaattaaatatttttgataaacgtaagctttgataagatctgcctgacacaaaatacaaaatgcatttggtataaacagcatcattctccctttataccaaaaacggaaatttcttcgcattctatacatttgagaatgacacgtcgggnnnnnnnnnnnnnnnnnnnnnnnnnnnnnnnnnnnnnnnnnnnnnnnnnnnnnnnnnnnnnnnnnnnnnnnnnnnnnnnnnnnnnnnnnnnnnnnnnnnnnnnnnnnnnnnnnnnnnnnnnnnnnnnnnnnnnnnnnnnnnnnnnnnnnnnnnnnnnnnnnnnnnnnnnnnnnnnnnnnnnnnnnnnnnnnnnnnnnnnnnnnnnnnnnnnnnnnnnnnnnnnnnnnnnnnnnnnnnnnnnnnnnnnnnnnnnnnnnnnnnnnnnnnnnnnnnnnnnnnnnnnnnnnnnnnnnnnnnnnnnnnnnnnnnnnnnnnnnnnnnnnnnnnnnnnnnnnnnnnnnnnnnnnnnnnnnnnnnnnnnnnnnnnnnnnnnnnnnnnnnnnnnnnnnnnnnnnnnnnnnnnnnnnnnnnnnnnnnnnnnnnnnnnnnnnnnnnnnnnnnnnnnnnnnnnnnnnnnnnnnnnnnnnnnnnnnnnnnnnnnnnnnnnnnnnnnnnnnnnnnnnnnnnnnnnnnnnnnnnnnnnnnnnnnnnnnnnnnnnnnnnnnnnnnnnnnnnnnnnnnnnnnnnnnnnnnnnnnnnnnnnnnnnnnnnnnnnnnnnnnnnnnnnnnnnnnnnnnnnnnnnnnnnnnnnnnnnnnnnnnnnnnnnnnnnnnnnnnnnnnnnnnnnnnnnnnnnnnnnnnnnnnnnnnnnnnnnnnnnnnnnnnnnnnnnnnnnnnnnnnnnnnnnnnnnnnnnnnnnnnnnnnnnnnnnnnnnnnnnnnnnnnnnnnnnnnnnnnnnnnnnnnnnnnnnnnnnnnnnnnnccgtgtttgctgctctgtactggctataacctgcacaagtaatggcctcaatacaactgttttctaataaaagcatgcgtgatgttatacctctaaagtaagattggtttatgtaggtctgccattgagagtggttatgggaggattcctgtccagcattgggactgtatctaaaaacagcagtctagctagaaaaaaacagcacctgtacaaaaaaacaaaaacaaaaacaaaaaaagcagcagactcaaaataggaatctcacaggtctaatgggaatcctgagtacttctgctgcagaaaagtatccttaagagagcccaggtgaaatagtgttcgaaagaaaaacagggacatgttgtgcaaaaaagatagactattgctttgtttgtaaggagatgggtcagccgtacgcgttttaatagagtggtaatgagcatcactaatccctgagcttcagagcacagactcggcgtctgtctgcaaagggggctgagttggagcactgttgtgattgattcctcttcagttagacttagagttcaagctaagatggataggcaaggcagtgagatcagaggaaagggctgagcacggggggaggggcaggggacgaggagggaagtgccctggctctgaaatttggcagttaagtggagataagaggcagcgcactcccacacactaggacggttttggtacagtggctctgttcaacaggaggcaacgttaggtttaagaaaaaaggtaagctgggcgtggtggtgcacgcctttaatcctagcactcgggaagcagaggcaggcggatttctgagttcaagaccagcctggtcttcagagtgagttccaggacagccagggctacacagagaaaccctgtctcgaaaaaccaaaaaaaaacaaaacaaaaaaaaagaaggaaggtaattagttaggcttgggcacatggagtgataaactgctgtgaacagaagggcttcctgctaagggctagaaatgtcacacatgcttatctgagagatgaaaacactgggttattggagggggctgtgagagcgagcgagcacagcccgggcatgtgtttgaggacaggagcctaaggagagccagaggtatcaggtcacagtggtgctggggctgcaggcggttgtgagcctctccaaacaacgcggccatgaacaaccaaattcagatccactgcaagagcagcaggctcttaaccaacaagcatctgtccagcctgtagactctaagttagtatcatatggagtagatgacacaactccatcttgtggatggatatcagataatgtgatgacttccagaaagagactaagagtcgtggaccggcgcttgtgagctctttgagaaggggaatgtagccaagcagctggtgatgggggagaagggaggtcagagggaccacgtttcagggattgtcataggtcaaaccataagtgactcatgggtttggaaacttaaggcagtcagaaccgttaagcaacctttatttgaagactagtagaagtacttaactttcagaagacttcgatgtgagaagctgtttctccctggtgactagagttgttcttgaacgcttgggtgtagagaaaggaattcaagcaagagtgggtagactcttttaagaacctttctcacagacttagaagaagaaaaaaaaaaaaaaaacgtcaaatgaaacaaacaaccccccaccccaagccagccctgttttcttggagtggcacctgccgccatgtgtttgaataaatgatagcctttaccatcatcaagaaagggctgctatttttagaataagaaagcaaaggaactatgtggatagctaaggggaagggtcatttagatgctttgtaggggtggagagtaattaggggatctagaataaatattgtgggtaaaacaagatggcttttcctggaaaagggaagagacacagttctctgaattagtgacaagaacaggtcctgagcttcagtaacagaaaggagagacatttgtggaggaccattgtggaggcttctcgttagatctcaggaaatcccagcagcagatgtctgtgagggcaagaagagataaaggagaattattttgcatcaagaactgttctaagcaatttaaattatctcttcttaatccttgtgaaaactcagagactatgacattgaaagttaaacaactttcccagagcctgatatcagcttgttatggagggtctaggattcagagctattctgtctgactccaacgcctgtgttcttatggtgagaggactcactagtttcaggtcttggaagttcagccctatatcatagcaggatgagaactttgagggaggtccatctgtccatcagagaaggatgctctaatatattggttctcaacctacctaatgctgtgactctttaatacagttcctcatgttgtggtgacccccaactataaacttatctttgttgctacttcattgctgtaattctgctactgttatgaatcataatgtaaatatctgatagcaggatgatcttgggtaacccctgtaaaagggtggttcagccccccaaagagtctctaccacgggttgaaaactgctgctctcgtgagaaattgtgaggctgagaaattggggtggaacaaaactgtagaccctgtaagtctgacagaagttaagataaatggacagaagacaatgtgaggcagatgcaggagacaagaggcctcaggtcagcagccaactggaaacaggagggaaggcaaaggagggttctgacttcatggggacagctgttggcttgacttgactttctggtggtgatgactgaagagtctatttccacagctgctgtgatttctttggaggtttcggtaccaattctggtctagagacaagaccagggtcctagacacacagttaagcttaggttgttctctggtatttaataaacaagctgtaactcaaatagcttgttgagaggctgtgttgggatccaggtatctttaaaggcaaaagaaaaagcatatatcactttaatttcttcctacctaatataactgtttacactttagtagtttgccttcgataaagaacatttagtgctatctcaattgttagtcacgcccacgttaacaaggtaaagttacaggaagtactgtgagcacaaggaataggaaggacgggtgaaaggaacgcttctgttcttatagtccttccattctcacatagaagataggacattattgatacaggggacatgttacatacttaacagttattaacatacagagaaaagatgaagcagggcagagagcagaagatggggtggtcggagcttaggtggaggaagattcgaaaaacacttgtctgagaagagagctgtgcacagactggagctggacagaagacagcagacatcctggaacaatgtcccagctaagcacgcaagtccaaaagctctctggtgggagccctcttggcaagttctggaacagcagggtctactatagatgcattggaaatacaagaatcaaggttgaatcaggaccccactcccccaaaacccccgaggctccctcagccgctgtcgaggctttttaagaatagagacattaaaatgttttatttacttctgttctttaacatgggaaattgtaaccatgtattcccagatctgtgtgttgaggcccttgtgctaatcactcaattaacatgggaaattgtcatgtattcacacaactgtgtgttgagcccctgtgctaatcacccagttccaagtgttttcatttttggaattttgaactgaggaatgatgacttagcatgtcctgacttgaacaaaactcactcagaacaggttctgaggaggcaggcagggagccagggagtagcctgagaagtggttatttggggcttcgtttgaagatctggcttgattttatttattttctaatttttttcaaaagaagaactgaaaaggcaaatagaacagtgaaaagagaaaggtaataaagaggacccagcccagggagcaccccttcacacttcaccttctacctagacgtgtacctgcctggcaaagggctggcagagggaatatttctaacaccatcctataaatgacaagccacattcctatgctcttatggaatcatggagtattaagcccccacacaaaggtgaggatttgtcacatgtcaccaaagcattgagacccaattgtacctgaggtacctaggggcgcttgacctctagatatttatgatgcatgtgataagtttgaaaattaaaaggaaaccaaaaagaaaacaaggaagccctgcatcaaggctgatgaggtgaaactttcagaacaggggtacatgcaggtagaggtgtttctctcttctcttctcttctcttctcttctcttctcttctcttctcttctcttcttttttctcttctctcttctcttctcttctcttctcttctcttcgtgtgtgtgtgtgtgtgtgtgtgtgtgtgtgtgtgtgtgtgtgtgtgtatagactagagtttattcagggcctggggaggggagttaagagggtagtggagtcagagaaaggcagagagagggagagagtagagaagtagttgctggccatgaccatgtggagagagaggagaagggaatggggagagaaggggagcaagagggagaggcaagagagcaaggcaagagtgaggtgttaccctctttcagagcaggatgtctgcaggtagaggtattaccttctttcagagcagaggtgtgggcagttagaggtgttaccctctttcagggcaggggtgtaggcagatagaggttttacttgcctgctctatatgaaaccctcctatctgagtggtggtttgccattgtagttgcagcctgactcttgagatgttgatcacactagtagggagtgtcaggaacagtgcaaatccatgaaccctggtgaaggtccaagtgtgccagcaatagtggtgaatcaaagaggttttcatgtatcctgtccctgctttgcattcccacaccaatattcagagggctaagagtgaactccacagtgttctgcatcttggctgtctctccaaagcttacatcacttgctcaggctgtctaaacttgccttcttatctgcaagttagggtactactagtgccaaccctgcctatctcagggtcatcagaaagcccagatgttctccatagataagagggaaggacaaannnnnnnnnnnnnnnnnnnnnnnnnnnnnnnnnnnnnnnnnnnnnnnnnnnnnnnnnnnnnnnnnnnnnnnnnnnnnnnnnnnnnnnnnnnnnnnnnnnnnnnnnnnnnnnnnnnnnnnnnnnnnnnnnnncaagacgagaccagtgtcatgagtccttcctatgccattagctataatcccgtttagcaggcttgatctgtgcttcctggttgcacaaataaataataaagaacagtaaactgactccctgtcatccttgagaggacatacattattaaaccaatatactatttcgtctctctccctccctccctcctttccttctttataatttgacttgactcaagaagagtaagcaagtagcctttttttttttttttctttaaatggaaaagactttcaggatgacaaggggactcttgctcctccttttcacacctagcatgaggcctttctcacaatatgcctcaccagtgccaacaaacaagcaggagtctctgtagctgtacctgtgctcagatcggtgattacagccatggcgcattaaagccagttagagagagaaaaataaccgagccgagtgttgacatggtgccgtggaaatgtgaatagactttggggaggcaatggcagaccccgagttcagggcaccaccaccttaccccaaaccattggaaccaggtggtgcatgttacttgagcttgcaaagggctggttctttccccggtgatatggggtgccactactgaccccacatggctattgtggggatttctccctcctcggctgtagagacagaatatgcacatagacttagatgagcacgtgctctgggaaatgaacaagcatgcgaagtaaggcgttatttaactcttactagccagtcacatatcactttcctaccctatgtcctccagtcattctcgaaaagggcacagtcgtggagccatgatgggctgacattgtgaggaaggtgggaaacacaagagacacgggctattggtgcagctgcttgaaggaactcctcctgtgcgctgttaatgagcaggatgagggctcgagagcactgagcaccctgcgagcatgactgcgctcgacctgctgagaatgcctttcgagcatgcgctctacccgcccgcagagaacgcctgccaagctgcctcatcctccacttgctccttgcttactcagctcaactctgccttcaaatctcagtccgcatgagttaaacacacggaagctttctctcacttcccaaccgtgccagacactgttattagacattctgtttgatgagttctccagttaggttttacctgtattgttgaagttatccagttagcgtcagtcccactgtttaattccgtgagagaaagaaattgggcttgttctgaacgaggtgtagcccccactctctgaccttctacagtgtggggctcttagaaaggggcgtaacaaactaaactggtaaactttagtactcagtgaaataatgggctagataagaaacaattttctgagattgttgatatcatcaggaaccaagtgttgtcttaactcctttaatcttaaaacagtccggtgatacttcgtcattaatttgatttttgaaggtggagaagctgacacacgtcactccacgacagctgggggatttgagcctggctttgagagatcttaacctaaccatgacctgctgtggtaaagagcaaggttgggttcacaagcagagccaggccctgttagaaccctgaggatgttcgaaagaaaaaatcagcagaaaagaatgattttaggtatgatgtcttacatttatgctgcttctgctttctgtcagagtacgttagccgaattcacccagagagcagcctggcttttgaaactgtgattctgaggaagttctaggccactcatctcttgttacccctttgaagaaacagcaaatgcttttccacagtaggtcagggctatctgaggttaaaaaaaaaaaaaagtacgtggctgactaagagggctatacctgagcccatgacttgtagtttttattctaaaaggagctctgacccatggacccagaattctagaagagttttccttcatcagggaaggccaaggaagtctgattgtccccaagaagggcagctgacactagaataacatagtattttgtagaaaaataaaacatagcaaaagaaagaaaataaatgtatttgtagaaaactaacaaaacactgcaatgtaggaaaaaagaaaaaccttccccttggaattgatgtgggccaagtatcttccagccacttgcttcaaatggacctattagacatcctctaagtgagggagcatctgacagtctgagatagcccctgagggttgtcctctcctctgctgagtactgttgtgaagtgtttgtgtacttgaatgtatatattcctcattaacagccccttgaacattactgaacaggtgaagagaccaagcaaggtcacacagactggaactgcctctcgcccccagccagcctagcctgtctctgaagtccacactcttcccattccgagcagctgactatgcaggatggctcctttggcttcttacctgtgcttgagtgcttacaattaagagtctctgttcagattctactctcagaaagaccttcctagtagacagttgccctctataaactttatcttcaagagacgtaatacttccattcccttcccagaataagtttctacattggtgttgaatacctcttggccactatggcatgataaatgatggttccaagaaatcgttgtcaaggtttgcctgtgccgcacagctgtccccacaagtaaggctttctttctctcagatggcatcttggaaagtacagaaagcccagggccctccctgttttcattctgtggtctgtgtaaaaaccaaatgctaccatcccgactacactctttcagatggatcaaacagcacattggtcactggcagatctttcaggtccctcacctcagagtcctcccagttcctcattcttgccgcccttcaaccatgaagttagtcgtaagaaaaacagtaagtgcttcttgaatgcacctcccacctctttccatcagcgccagtgactaactagcctgtcagcgcagcttcagaaggctcggattccaaactctcaggccttctcccatgaggcctttctgcttaagtggaaagcctgcctgatttcacccaagtgaagcgcttccttgagccttcctgtgctgtgttcctgtgcacactgtcagttaaaagtgggatcacgtgactcgctgcctctgccgatcattagcagaccgatgtgatcagccatccagagctggaatcagccatccagggactttgtaggaagagcatcatcagccttggagcaaaaccagaacttggtattcattgtcctacacttaaatggggaagtatttggcctgtgaagaaagacgacttgctaaattcacttcattttaatatcagagagagttttaagttctgtgcctaagaaagcaactcatgctttgggacagtcaaggttaaagttagtacaaaacctttctctgaattaggtcactctgtaactatgggaaggcagtcctgctgatggcctcgccgctctggaagaagtatgccctggtctgttttatgttgtgttggttgacaagcaaattacacaggattaaagtttgcttgggctggggtttgaagcctgggagggttcaggttgttggtcagccatatctgacaggaactttgcagcccaggacaagacaggaaattacataacaagagaggccatcttggctgaagtatctcttcctctttgtatagctcacagctccgtagatgagggctggctcttatggtgtattcgattttacctcctaaagatcaacttccagacaccatcactggattacatttctaggctcaaaacgtctcatgagtttcggggtgggttcagaagcaactcattataatgttgtatcagggctcaggcaggcaggcctccttggggagtctagagagctggctcgctggccagaagggagaccgttcgttgttcagggcaatggtatcttttctccatactctctggggagttacgcgagcagtgatcagcttcccggctctgaccatcaaaggttacactggagaaaatccatattgagagcaaactctgtagagccctgcctccgtggagtctggaccccgctgatagtagtgatattataagtgagcaggctgaggaaggctgtgtgtctttacaggaagctcctttagcagatgcaggctcttcacgttcacgttgacatttatccagagaggcgacgtacctcatgcatttctaacaataggtgggatttatggcaggttctgacttaatcgaattcagaggggagtaatgcctccgagctactcatggtgtgagtctcatggtgtgatttccacggtgtgattctcatggtgtggttctcatgttgggccatcttgacgaaaagttctacactgtagaggtcgggatggtcaactagacaagaaagacttggtcatctcctctctcctgtcctgtccattgctgttcttaccacgttacaaatacacaagtgaaatgatcgcctcacatggaaaacttaactttgtaaaacaagagctaaacaaccaaatgtgaaacctacaaatttttagtcagaaagtttgctttttttatttaagaaactcacagactcctgaacatatacagtataatgtcagaacccatgcctggggaaactactgaagagtagtgggtgtcctgttaggtgatgtggaccaagccatgggcttatgtcattaaaaacagcctccagagccaagcccctgaacaagactacctttctggtaatcacatgacaaggagttaggactcagtctttgtttgtctctcttacttcatcagtcacccattcccttctcgtgcatggtttgcccagttttcatcactgaaaatcgtgacaaggtttcagagaagaaacagtgttggttagtaaggacccttgtgacagtcctacctaatgaggcatactctgttttcagtgacttgtttcctggacatataaacaacccccactaccattttgatttatttccatcctgtcatgtgttcattgtatattttttaagttgagctatagtcaaatatgtatatatctgcaaaatgttgtatttatgctgattggttccatgttacagtcaggtcagatgtactaactgttgaaaatgtgcttctcatatagatttgcaactatgtggggcctgcaaaggttatcgttcagttggtcacaaatggaaaaaacatccacctgcacgcccacagcctggtgggcaagcactgtgaggacggggtatgcaccgtaacagcaggacccaaggacatggtggttgggtaagtgggctgtgtggtatggagggagcgggaacacgcgggtgtgaaatccataggcccctttccttgtggacctgtgcaaagcctgagagggtctcacacacgcgcaagcagataaagccaggggaatgtgtgtcctctcctttgaactgctaaggaaatagaggtgaccagatatctgtcctgcctgagacaatccttgcatctgtagtcttggcctctcaaggatgggtttggacaatgttataattataagcccttgacctaagaggcatttgtgccactttcaattatatttttcttctcctggaattaaagatgaagaaaagaatgaaacaactaccttaactatatagaaatgattaccatggagatgctttttgcttccttgaaacagcatctccactatagtttaagcttaccttgaactcacatagatcctgttgtctctacctcccaagtgtttgggtgctgggattagagatgtgtacccccccacacacacacagagctctgatttttgcctatttgggattttcttaatagagttctagtgggaacatttgagacatgaagcagataagtaaatattgtttcaactctgcgctacttataaaatgtgtgctttttaagtcaacaagacatgcaaattggtttgggcactcatttgatctggaacataagtagaaattagtgtattctttcaaagtcagtcaaatacaacaatttttagtgaatgaaattttatagaagtaatcttacttcaaaagaatcacaaaatatttaataagacataattatgggctgagagaggatgagtttagtttgcaagtatgatggcccaagttcaaacccctggcctctcatagcagcgcttttcagagcacaggcatttatcctcccagctcctgcaggggagcaagaggcaaagacaggagaatctggaatctcatgcagtagctggcctggtgtggtggacagacaccaaacagatcccatgtcaaacctgaagttctcctcagacctccatatgcacagcacatcacatagtcagctgcgttcgcacacataaaataagggcactcactatgctaaggttttatatttcattatcctgaaacactaaaatagcagacaatgtagtaacttaaacagcaaaaaatgatgtaagcattcagtcatctcaaatacagataactcctattttccagactcttaaaaagcaaaggggatgattcagtgggtaagtgcactttccaccaaatctgagagcctgagtccaactcctgtaagccacatggcaggagagaaccaacttccacaaattattctccaacctccacatgcaacaaaggtataagtgcacacacacaccatgtaatataatttttaaataaaaaaaagttaactaaaatatttttaaagccagaaggtaagaactggggagacaggtcagtgggtaaagtatttgcaatgcaaacttcagggcctgagttctgagctccagcgcccacatgaaaatccaggtgttaaaaaaaccaaactgataaataaaataaaaccgggaaagggcagagcacagcggtgcatgcctttaatcctagcactcaggaggcagagtctaaggccagcctggtctacagagtgagttccaggaccgccagggctacacagagagagtctgtctcactgccccccaaagccaggtgtagtgatgcacctggaaccccaatgtctggccacagggatggagcagatccgcggggctcacaagccagtcagaaagcacggcccagtccatgaccctgtctcaaaaacccgagaagtgactgaggaaaattccctgcctgtgttctctgtggtgcatgcagatacattgttgttaattttatttaattgtgtacatcatcattcagagttctccagtcttagatcaagtagtgtctgggaagaccccagtgaatgtgtgctttttttaggagattgcttagccagccttgatgaagtctgactctgttgccctgcaatcttgggaggttcagctttcaaagtcccaggcatcatttcttcatttgacgacgaagatgctcaagtgtgagaagctcccagagagagggcccttccctttaagtcattcatctctggtgctttttgacgttagggagaaaagtatccgaattggaggaagctgaagttagttctcgtggacttcagcttgtctcggcatctcctggctgccctgcttctcaatctgccgaaactgacatgcagggtgactgtcagttttagacaactgatcggttagtgtattccctgattgattggccacatcatagccaatcgttttgaagcatttccgttcttttcgtcttgcttaatctgtcttacaatcatatgttcttaaggaaatcacaggtgaacttttctatcagtatttctgtcagtaatatttattattataaaacttgcagagtgttgcttctctgttgggtttaataatctttcatgatttagaagaaactaatggtggctgtgtctgctgctctgaggtagacacaaggccttgggttgctctcccctgcagcactaccgccactaaaaacactaatggctgtttatgctggagcctaggttgcagcgatggaggtaaattcagtacctgtaagcagagcggagaggtccgtcggtgtcttttagtgtagtggggcacgcggctctagagttgggagtgtgcattactcatgatttagcaaacattttcgacatccgattcctgactaggctccctgtggtttgatctagtcatagctgggtgggattttctaaggtgaggaaactttctcggagagatgcagtcgaggagatgccgcctgagtgatagggggtaaccacagtagcttttcccacccaagaatctctcactgtagaatgtctgcagtcgctttcccggttggcatttagctgagagaattctgctcatggtattttccccagacaccattttcttcgtgattcccttgtctctgtgtctctgagtttctaacacggtcctacaccttttgccttttcttctgtttctcttggatggaaaagcagcgtgctagcagccgggaagtcagagctcctgtatgcttctgtcactctgcacggcagaagggatggaggccaagttgcatgactttctaaagacttgaattcctttccttacaaaatcagaaagacacaggctctgtctatctccaggcactcagtgtttaaccctctagaccaagcccacattagctaatgttataaaacagcaggaggaaacttgccactatctcctcatggtatgacatcggttattttatttagttctgacttgtaggccagaagtttaggaaggcagccaaaggtgtttcttagacttgtcaatactagaaatagaaccaagataacattttccaatactacagattagactgaatatagattcacaaacaaggcaccagtccaaactatcaacatatgtaaaaatgaccccaagaagaccaagctttgaacacatcaaaaccaaacggaccccctttgtttacagtgtctttcacactttcttctctgtttgaattcttaataagtttagtttctatttttccaaattattttatcagtattagaactatcatctcttggggtttgattatggatttgattgttttaatatagggtcattaacttcagttagctttcattagacctcttgtctcttatgcacttagttagacttcactgcctttcttaataaaaaaaagaagaagaatcctgtttagtattctattttgaccagaatgttaatatttttagcaacactctagttctctgaaattttttgttcagtggaaaatgtctgtgcatttctactttgctgtcggccacgtccaccaaaagtcaccacaccctgtttgcttactggcaacctgggttgaaagagatgtacagttctttttatttccccctcccaactaatttatgtagcttattgcagttggtaagcaggagagcagagattctcaacctgtcggttgcaacccctttgggcgtcaaatggtcttttcacagagcatgcctatggagatttatattaagctttataacagtggcaaaattacagttatgaagcagcaatggaataattttatggttggaggtcaccacagcatgaggaactgttaaagtgttgaagcatgaggaaggctgagagccactgccctggatgatagtagatatgagaacacacaggagagcctttgggctccctcaggagaactgctaccttaaattactgctggacagatccagtgtaattgtgtagctaaacactagcccacaggagaggcactgcctagagaaggttggacaaatatggacttaggttcaaggtgtgccgtaccaagttggtgtatgcactgtgagacgagagctgcttttgaacactgaaatcaaggtctgaaacaacaaaggccaaagaggggccactgtgagccccaacccagtgttagacacatcaaaatttgagcaacagcttccaaatgatgatgaagatgaaacatctgacctacttcagcatgtttattgatggctacaggtttgagtcagcctgggtcacttcatagaaaactgatgccagcctccatcccatagagtgggatttcacagagcagtgaaaagccaggccctccagcctcagcattcctcttgagttaatggaaaggtttgtttgaaaagtcctgattccgtagggttggatggagccccagatttttagtaaattctaaaacaacactgatgttgctagttaaagactcccatgttgtgaatatgagaggaagaagcaaggttgtggtttcagcccttttattagtggttgtagcctttctgtttttaaaatgtcattgctgcaacactcctcctctccagtgttcatttctgtgaattttgataatcatgtggctactcctgatctgaggctgatgagttctctttggttttatgtctgaaagtcgtcccttcatcttctctgttcaaaggtgttttttgaagagcagaggattctaagttgacaatatgtactttcatgtgctggttttatgttgattcaccgtctcaggtcttgacctgtttccagcaagagctctctgtaggtctgcctcggctctactgttcccagagtgtgattgtttctctagcagcgtcttgacttctctttagcactcgtaagcagtgtgagttttgatgggtttgagggtagctttctttttaagcttgagcttcttagtcgtcatagatccttggatttacatttcttattaaatcttaaagcttttcaactgttaagttttctgtcactgtcactgcccctgctccccattcctgttctctgtcactttctctcttccagactagggttgagttggcacagtgactaagagaataccttctgaatagtcaatctgatgcctcatgtattccgaggcttcctgtttatgagaatagtagctctttcccttagcctaacagggctttctcacaaatgtttcctttggatttttgaaaatctgtgatgctctggatataaatcctaatcttcttaacctcaagtctttgcaactgcagagccctagctggctgcctgggttctccttcccatcctgcaacctaagcattaagccaggtaattgtaagagtacctttctatttttttttctcggatgactgttgtgtgtcacctatctccagagcatgacaatcgttttctcgtgtgttttggctatttaattctagaggaaccgtctaggtctatattactccaccatggcctgtggtggaacactggtgtgttgtttactagggtaaacccttccttcatgattcatataataaataagcatgatgcctttctccagatgtgaagctgggttacgtgtaagaagtgcagccgaggtgatggtcactgatgttcccaggagatgagcctgggctcctagcgggggagcagtctgcacaagagtgagacccaaaagggcagacacaagatctgttagacacaaggacctccaagcacattagcaggttgggtgcataatgtttgtgatgctccctccgttcaagctttcctgtggtcagcaggcacctgctgaggacccacatgtcagcctgcattctaagacctggggatctctgtcctgaaggagctgtggaaacacagcatgttgacttctctgtgtccctgtaactcactccacatctggccttctgtgtgtgtctgtttccttctgccttcacctcttctcctccctttctccagtttatatgacctttgcacagtagcttgttctcatgtgtgcaggcaagttgtcagatctcttttattgtcattttatattacatttaccgtgtgtgtgtgtgtgtgtgtgtgtgtgtgtgtgtgtatgtgtatttctgcttgtcgggggaggctatctgttctctctctctctctctctctctctctctctctctctctctctctgtgtgtgtgtgtgtgtgtgtgtgtgtgtgtgtgtgtgtgtgtgtgtcagtgtcaaagcccagaacaacttgtggaagccgcttctcttcccctcctatgtgggttctagggattgaactcatgtcaccaagcttggcagctagtgttcttactgacttagccatctcactgacctgtatcattttcttccttctactaatatttattttacttttagagtaaaagtccttacaaacatctatatggctctgagagacccaggccctgcacttttctctttgagttcatctgtcccctctgactctgctccttaccctcagcccatgtgccacctttctgccactgtcaaaaacagcagagtggccctgccatgcggtcttcacattcaccagagtggtcctgccatgaggtcctcacactcacctgtctgcagctctgatacttagaatccacttcttctgacctccctcaggactggctcagctgtgatctcagggtcctgtctgggttctccctgtctggctctcctaccctctcacccctcccaggcctgtcttctttttcttgtttacatgtatttctcttttaagttacactgtgaaatctatcatcgtgtacgctagcatgtgcattgtgtgagagcacagtgaagccacacaagccttccctagtaaagcatacgtacaagggcacccgtactctgtgactcctgagttgacatctaatatgttctgagacgtaaggtgattcaagttttcctccaactcttttagtaacccagtttaacctggtctgacaaatccacttctgtgatgagtctggttagaggcctctctgcagaaatgtcaatgagctgagtccatggtgcaccccagccctgccaacagtgtctagtgacgtacagcatatgccatatatcaccctcataaagtcccaaattctgatgttcatctgactttggtctgtgtaagatgctgagtgcttgtgtacttttttcggtgtgctgtctgctgacctgaagcccgccccccggccatgacctgcctgacttctgctctcactgtttttctccagctttgcaaacctgggaatacttcatgtgactaagaaaaaggtatttgaaacactggaagcacggatgacagaggcgtgtattaggggctataatcctggacttctggtgcattctgaccttgcctatctacaagcagaaggcggaggagaccggcaactcacaggtgagccagctgacccagccttaattaaggcttctatgttccaggatgactgcagccatcagcgtgccaggctatcagagggaaggggatcagtgcagcccggtctttcctttctgtgctgggcaccgtggagaagcggagcccacacacaaagactctgcatgcttgttctcacctatgtctgcgcagccggcggtgcagagacgtgcatttccctgtactcctcgcattctatgtgtgccttaactcttagcaagcgtaggagagtagatgggtgagcatgggagaagacaatatttacaatactccagagaaaacgcagcttacctttgatgggtttttaggcaatttaataagaccattgtgtaaaattttactaacagtttaaagaatttcaggccaaagtaaccaaaagaaaaaagaagactcagttattaaaattaaaggtgaaaatcagggaaacattaccagaggtaatggtcaaatccaaagaatcattagggctttgaaaatatgtattacagcaaattagaatatctcacagaaatgggtaagttcacaggtacatctgacctgccagtgttaaactaagaagatagaaacaacttacacagacctaagacaagcaataaaatatctcccaactgaaaaatacccggtcctaaatggaatcatggctgaattctgtcagatatttgaagagataacgtaaatcctccttaaactgttccataaagtagaaaggggaagaatatcaacaaacttattttccaaagccagcattacttttatacccaaaccaggtaaaagaagaaaagaaaagaaaagaaaagaaaagaaaagaaaagaaaagaaaagaaaagagaaaaggaaggaaaggataagccgattcatacattcccaataaaataatagaatgaaatgaaaaatatacaaacgggaaaggaagagatgaaagagccctatccacagacaatattgtcccacacacaagagcccagggctgcactggagaggcttagctctgattgaggatcagccctgcgtcatcaccacacagaccccgtggttttcctatatcgatagtgagtgtgtcgagaaagaagtcagcaaacgcgacggccgagcacagtcacaggcatccccgatagcttcaacatgagcaaataaaactcctggcaataaactaaccatgtgaaaagtcctttacagtgaacatgttaagacacggaagaagaaagagatgtcaatcaatgatggaaaggcctcccatgttcctgggagttaacagagttactaccacaaaaatatggccaagtgtggtctgtagattgaatgcaatccacaatgccaataccgttcctcctagaaaataaagttcacttgggacgacaaaaggtctcaggtagccaaagctataggatagtaagaatatttcagaggtatcacagctgctgatatcagaggtatcatagctgctgattccaggtcacactacagagccatggtaacaaaaaaagcatggaagtggggtcaaaacagacgtgtaaatcagcagaagaggagagtcagaaaggaacacaatgtagccacctgatacccgagaaagatgccaaaatgtgcattagagaaaagacgggctggagaagaagtgatgccggtggggaaccggctagcacatataaggaagggaaccagatcccaggctcctaccctaccaaccaattcaacacggagcagagatcttaatggaaaaggtaatggtctgaaacagctaaaggaaaacatgcagaaaacgcttcgtgatgtaggcaagccctttccgaaaagggctccagcaactcaggaaataaaatggagaactagcaactgagattcaaaggcgtcacagcagaggaaacagtttcctgagttgcagagacgacagccttcagtgggggaaagaattgttgctagctatgtagctgacagattagtatctaggttctataaaaactcaaaaaaaattaaattctggaaacaaacaacccagtaaataaatgcgctcagaagaaagagagggttctccaacaatgagtgcaaacagccaacaaatgtgaaagcatgcttcacacccttagtctttaaagttcctctgaggtcccacctcaccctggtcagaagtcattaagaaaacaagtccaggagcctgccaagtagctcaggtggtacagtacttacctcttgtgtaagaagtcctgggtttgattcccagcactccctacaaacggctgcactcccagatgagttcaaggtcgtccccagatgtgtgtagcagatgtcttagcaggtaacccatacaaagcctgctgccctgaattcagtctccaggacccacatggtagaaggagagaacccctcccctcaggtggtcctctaccctaaacacacgtgtgttatgaccaacaaatgcaagaatgtaaataagaaaatcaaaatggagatttagaataacatgaagtaaaactgcatagacacagctatccactcctgcggatatttacaaaactctaactccacgtactataacatacatatttccctgcacatatgtgtttatttcagccatattcaagagctacatcaaacaaccaccgtagctctccattagcagatgatggattaagaaagcatgatatacatgagtaatggagtttttttttcagccattaaaaaaaaaaaaagaaaaaagaaagaagggctggagagatggctcagcagttaagagcactgactgctcttccagaggtcctgagttcaaatcccagcaaccacatggtggctcacaaccatctgtcatggaactcgataccctcttctcttgtgtctgaagacagctatagtctactcacatacataaaataaaaataaatctttatttttaaaaaagaagggaagaaaaagaaaagaaacatttgcagggcagtgtatgcaactggagatctctgtatcaagagaaataagccagaacaaagaagatgaacatcacctaccgtctctctcggttctagatcctaggttttatatagatgtacataagatattttgcatatgcgtgcataggatatgaaagtaagaggaaggtactccgttggtagggaggggacgagtggatatgaggaggggagaaggggccttaggtacggtcacagtgcttgttctaggatgaaaatgttttcagggagttatcccgatgagcactgagtatatgccaagaaagactttaaggaagtgtttctagaggaaaagaattggtctttgaggccatttgctgtcaaatgttcacactctgacctgcctgggcatgagcagactgttctctgtgaccctagacagagagaaggagatcatccgccaggcagccgtgcagcagaccaaggagatggacctgagcgtggtgcgcctcatgttcacagccttcctccctgacagcactggcagcttcactcggagactggagcctgtggtgtcagacgccatctatgatagcagtgagtactcgttcccaagatgggacagtttcatctagctgcatggagggcagggccaccatgtcacttactccccagagctgaggcctgcagactgggacctagtcacatagagcctctagtttattgtctacaaagttaatactgcagtctagggtaaagggtcaatatccagttaagcgtcttaagaacatgtctgccaaggtaacacgtcttcctcagagagtgcattatattccttacatgtaacaccagtttcttactatgaacacatgactgtaaggatagattgctggtgctctaaaaaaaattaccttaatttttgcacctggcagcacggaagaaaaattgatagaagacaagtatccctcttgtctctctttatccccagtttgaaatacatttattaagacaggaacgtcaaggtaactaaataaatgaatagtatgtcaaaatcatctttcaggctgcagataatagaatgtgcagggtttccagtagcttgtagaatttactgtgtggctctattgttcgatatgcattgggcttaacaaacagttgtttcaggaaccctgcaagcctcactgaatggtcatagaatacgatgcacaaggaaatcccatgttctgcatccagccacgcatgggtctgtctgatttaaacaagtgtgaagggaagtgaaaagtttattgaatggaaaagagtcttactgaacagagatgagctacagctgttggagtttttaaagggggaagctttgccccactcaccactatgggcagctttgccccaaaccacacagaatgctaatttaggttgggggaaaaaaaaccagaacatcttcacttttctttgaagaatatgtgtgtgtgtgtgtgtgtgtgtaaatgtgtgtgtatatatatatatatatatatatatatatatatatatattagcttaaaatgtcattttcttaaaatttttaagaattttacaaatgacataaagttagcatgaaacaagccattggtccagaaacatcagacagctctctccttcctcatcagcctgtgtgttagagaagccatatgccaccatccctccctgacctgctcctttctggggaaccatgagtgccccagacccaagaactgctcctagtaccttggaagtctttcttgctctatttgtgtcttgttaaaggcagtaagagtgagcaccatcatggaatctttgtgaggctaatgctaagccagggtatgcattctcttctccctttgaacagaagccccgaatgcatccaacctgaaaatcgtgagaatggacagaacagcaggatgtgtgacgggaggggaggagatttaccttctctgtgacaaggttcagaaaggtacgtacacacctggtctctagatgtagggtgtggctgtcagagttctctggaaacagcggaccaggggtgttctccttttgctgtgggagtctcaaaaagacagcgttcttcaacaccattacacgcattgcaatcacatgcttgaatacgcccgtttgcagatgacatccagattcggttttatgaagaggaagaaaatggcggagtttgggaaggatttggggacttttcccccacggatgttcatagacaggtaggtgggttattattgcgggttttattttaatgcacttctgccttggtgaaattcagtgctcagtttccacatattaacaaagaaaccgtcataagtctctttgacatccatacagcaatgctatgtttatggctcttccagtactctgacatagaggctgagaagtctaaagggctgaagctgatgctgtcctgatgagctggtgtctctggctgattggttacatgaccagggtctcccagctgatgacatgagccaccacagtaatagtcactctttgacagtgactgagaaatggtgtttcaaataattggcaacaacccaaatgttagccagtaaatgactaattagatagtggtgtatctatgtaatggaacatcatacagttactagaaaagaaggctctgtgaatgaacaaagacctcaaaatagaatgcaaagatttgtaacaatcgatatggaacacactgtatgtagaaacaattctatgtagaaacaattctgtgttcacgtgcacaggaagcctgagacaataacaacatcagctccctctaggatctcaagttagtgcatgagtgggaagcggggaggcagggagaactgtcagcatatgctacctattgctcatcctatatttgatgacatcttgatccttataaacatagaaagaccgaaactaagtctgtccagttccttattatcccagcactgcccaggactagcatgtgacacctcctgcgcagcctcacttagcatgactgtctgcgggctgtcaggggcagccctggttctgtctgcttccacatccactccttctcttgctgctggcagtgatcctggatgttttcaaggctaatctgaaagagaaatggctgagtcgcgtgatccgccatcatgctgttgtgttttactttcacgggggcagtataagtgtgggtataaggtactaactgggaactttctccaggtgctgggtttgcacacactttatttaagttcagagtatacatagacgtgtatagaatgtgcctgatgctcaccgacactagaaaacaaatgtcctacactaatgtttgggtcttttgcaccctgcagtttgccattgtcttcaaaacgccaaagtataaggatgtcaacattacaaagccagcttccgtgtttgttcagcttcggaggaaatcagacctggaaactagtgaaccgaaaccctttctctactaccctgaaatcaaaggtacctgggtggtttagactcttgtgcttgctctgaaagaccagtgggcccctcctctactcagcctcccagaagctgctgcctggatgcctggatgcacgctgcatagtgttaggggcaaggaaggtcatatgccaaggtcatggaattagccccaggaatttatgttactatattgctgccaaacttatatgagacttagacatttggctattgttgggtattagaatctagtatggagccagcaagatgggtaaaagcacttgctgtcagggctgacctgagcctgagtcccaaagctgtgtgctgaaaggagagacgtacctgccagaagatgtgggtggtcctccaccaggagggggctgggcggggaagaaagggaaagtaaaaaaaaaaaaaaaaaaagtaaggattttttcagctactcagaagcccttaagaattaaccagaaggcttagccactgtccagcccagaactataaaatgagatggtcactatactttcctcacaaaagacacctcaggaaaggtgcactatagttaaaatgcagattacgattctttttgacgtgctagacatcatattctctgggccttgtagacactaggcagctgctctaccattgagctgtaaccctggttctcaaatgataagtacccaaagggaagcatccacaaactgtatgaaatagttgaggagacagtcctggattccttggtctaaagaatcagccaaagaatttctcttcagtgggaagccacttaccacattatgaaggtgaatggaagtcaaggctctgtttatgaaagagagatgttcagaggcagaggtgtggcagctggtgtttgtcctgggagaaatgattactgtgaatctgtgtggactgaggaaggttgatttaggcgagggaggccaggtccacgcagtgaagcgtttctgtggtagctggaggtttttgctttgactctgatggctaggcctgcctgctcactgtctggaatgatgtggtcagaatgttgctagaattcagtggtgcctcagcagagttagaaagggttctagcagccagaagttagcatccagcagatacttctatgttggtgctgtggagacctggaccttgggtgaagagaaaggaagagagactcgagagtctcagattgttctagggtttccagactagaagtgtatgtatggagtggttaagtggataagaggaacaagagagaagagtctgagaatgaaagagaagcttagtgtaaacatatttcagttggggtcaagtgcaggaagggggccagtcaaaggcatgactcaagtgggtgggggctcagcactgaagagaatcccggccccacagagtttaagtgtagggacgcacagtgctgccgtcaacctctctgtacctctgtttcgtaagttttgtcttgacggccatggttctgagaagagatccatgaacttggaggctacacaaggcctgggatctgataaaatcagaaatgtctggctcagagagaatggggctggagaggatgtcaccaggtacagggtcctaggtccagggccaccaaggcccccaggtatcggtcccttgaaggcaaagcgtgatggtggccaggagtttctgggaggccatgtctctttttgaggtatggcctccccattcctgggtcaggcttatggtgagctctgtggctggcctacttccttcctcaccagcttgaggtcttctagatccttctgtccagacaaggcaacatgaaattactgctttacctgaagcctctgccctctgaaaacaggaaaaaaagattatttttctaagaaaaaaaaaaaaaaaaaaacagtgtatctcctgaaatgtgcctttaaaagagcgttgtcattgctgatgcagaatcatgagaaaaagaaaagaactgcaggttccctgtgcaggatgtgagccttgaaacgctgagagtttggttgccaggcaacctctcctgctagtgtctgcatctgaagagtacagtagacaaggcccagcttcctgggcactccacgccagcagagtgggagttttctaatgcctggattagaggattggggttccctgaagtcctggttacctcacatcttctaggtcatcatgaatacaaatggtatacttgaaatacaaatgaggctccacctacacacaggatggctgaggtacctgttgtgttccgtgtttctacactggaaacattttctctgtgagatccacagttcatccactgactaaatgaatatagctattggttttggtataactggtgggaaaactttataaatatttctccgagccatcagttagaaagtagacagtctcttcacctcagcctcactcctttctggccgaaagccgttttcttcctaatcatcctggtgtgcccagggttggtttcccagggactggcaaagtccaccatgctctcctgctttccccatcagctgcagtagacagtccaacatagtccaaaagtccttgtgccacaccgtggggtgatggaaacacccacagaactagagaagtagggatctttctgaacatagaccatgatgaaagccagcattaatcagtcagacacaggacgattgttcagtattggcctatttcctggatagaaagcaccatgttgactatttaatgtaaacacaaaaccaccttcacttctcagccccaaagacaaagaaaacaaacaaacaaatatctgctaggatactcccagaccacaaaggaacaggagcaccatgtcagatctcccacacagtaacaggactgagaacatggtggctgaagatcacacgggccatgacagaactgagggcacatggctgtcgatcacattgcagtaacagaattaggggggctgtctgggttagtaaggaacacagacagtgaaagacaagaggaacacagaactctgtgaagagcaccaagataagtctcggagcacctggacctgggcaggccactgtcccagaggtcactcactgtcccagaggccatctttattttggagtccgagatctcaggagccaaaacatctctgtacaccctctctgtgtttctaggatcgacattatatctcttaccacaataaccagtaaggactcggtctccattgcctcatgcctgcactgtcttccttagagtttgactctagatgtcctgtatacagtgatagatgtagctcctaaaatgctgtcctctatgtcattctctgagacattcagcaagtccctcacattcctatccctgaggctcctcagcatgggtgaccccagtcctcctttaacctttattatcaaaagcacccacccatgttatccctctgagaagccctgtgtcttcccagaatatcatgttcttcggccatagttgttagcctttatagaggcttgtcatgctgtaaatctgttttcacgtgatttcacatgatggtatgatgcataccaccataatccatcccactaaatccctctttgccttgaaattgacggtccttgacagcagagatgtgtgttatgtttctgtccatcccagcaccttgctcagtgtatgtacggaataaatgtaagctggttattatagttgtcttaggtgaacaaggacaactgttctgaacgttagctgggtgtggtggtgcacacctctaatcctagtgttcacgaggcaaaggcagttttgagtcttgttcaaaaccaagctagtctacatagtgagttccaggcagctagagttacatggtgagaccctatctcaaaataaagaagtaaaagtgctttaaaaagaaaaaaatatgtgtatctttgggttatctgaatcttgagaagcaatgagatctctcaccatcttgttagcactgggaacttaggagggggcgctcaggagagttgggtgtgtgccgcactgtggtctctgaggcgtgctcttggtcttctcgtccattggaataaaaaccatgcttcctcctcgggtgcctgttatttccctttaatgcatttaaaaatatcatgagaatcaatcgtctctctgcggctgctggtggaacccgatcagtctttcccccctggtttcccttcctgtaaatacagacaaagaggaagtgcaaaggaaacgccagaagcttatgccgaacttctcggacagcttcggcggcggcagtggagcgggagccggtggtggaggcatgttcggtagtggcggtggcggagggagtaccggaagccctggcccaggtacgagaaacatctcttctatctaaagcctttcatgaagaggagggggtagttttctttcccaggttgccaaacatgtctgcccatggagtgatggtgtcattactaattattagatttcaattaatggaaaatttcctacagatgtaaaagaatttttgttctcaaagaaatgtatgtccaactcaaggcacagccactccccacccacccacccatcaagtttcactttctgtggtttcagttacacgcggtcagcttgagtctaaaaatattaccattgtgttgacagagagagaccacacacacaaaactgtcttcacagtctgctgttgtgactgccctattactctgtgttcttggtctccttctgtctttttacgttgtgaactttacccaggtctgtatgcatctgcagttttagggatacactgggggtctcggacgttctctttcaggataatatgtgtctagtcccgaaaagtgtaagaaaaaagtcaactgaagggtttctggaagaaaacctttctcaaatcatttttgagtgtttccctcctccccctcccctttgcttttggagaagcagttagtctattattctgagaaaatattaaaacaactatcatacccaccgcatggtagatgggtataatatgcctacacagcatactgtgggctggagacactgtactgtaaacaaactgagtcacagaaaatcatgccagggaagcacttcaatggtgtgtaaactactgctcctaactgccacgcatacggcacagtcagtatttatgtgttcctctcgggtccggctatgatccccgtgcgtggatttccagccatctagttacactcagtttttaagcatcgttgcatcatgcttgtggatgctgagtaacgctgcttttgcctcagatctagctagcttaagcatttcaatggaaatacagttcttatagcagcataagtgtgctgtttaatgactcacacctgtagcgtaagtgacttgaatgctgtttcctgtctcctgtgtaaaataactgtgctgagcatggcctttctttattccagataacatgtaaatgctttaaatgtcagagagtgtagtgctaagtgctggctgcccctctaaatttatcattcatttctccactaaagtatcattatattacgtattgggttcttctcaccaggggtcttcatatttaactatttttttctgtaggtctaagtcttggtgtgagtacttaccgttagcttttcccttcacctggaagaaagggacctgctcagccttaagtcctccaagctgctagtctgggcactgcctgtttgttcagctgtctgtttcccacagtgattctgctaactctcgggcagagccagcctgtgtaggcttgtgcctccccatgccacagcctgcctccctgagtgggtccccatactgttaacaatctccctgatgttccctttgtctcattgctggttcagggtatggctactcgaactacggatttcctccctacggtgggattacattccatcccggagtcacgaaatccaacgcaggggtcacccatggtaagtcggatcggaatacccagagcactgctcgggcaacaggatcatctctaaaagctttggaaaattactttccaataaattaatattctcaggttattctaggacagcataagggacacccctgacacgtatttgctcatcacattgtgtggaagcaggacagaggctctagacaaaagatgagacttgactacgcaaacacacaaataccaccttcacatctgtccctttaccccaagtcctatccttctgaaatcagttttcattttgtagggttggccttttcccactcttgggcatcctctgagtagctgtggctacaggctgctcgtggtttatataaagctgcattcttctgtaccatggaaattattctataaagtctttccatatataatgccaattcatgccagatgcgtacatcactgtaatcttttttaaagatttttaactggcattgtcgtttatcctataatcgggtaaccattcatcccataaaatagaactattctttccattacctataacctcatgacccctgtgcaaggccagtgctaggcttggcaccttctggacagaggtgaggttcagaaacttgactttcagaagacactgtagcaggattgggttttgctccaggtttgcccaggagtcttactgtcactctgtcacataacgaggttcctacagcaaccacagtcagtctagtgatggtgccctagagccctcctggccacacagaatggaaatgagctctgctcggctccctttcccttgccactcaggattaggaaagaaaataactgctttcgagaactttccaactggctatcagcgcacagaactttatctcatttttcttcttcacagataaacaaaatgagatccatgccttgtttctgtttggttttgtttgagagagagagagagagagagaatatcactgtgtaaccttgaccttctgggacattgtgggtggagctcactacagctggctacagaatgagttttgggaaggcaggcttttaaattgtttctgaatatttaaagtatttccgaaacatcccaggtttttttggtacacacctttaatcccagcactttttgtgagtttaaggccaaccaaagctacacagcaagaccctgtctcaaaaagtaaatagagaaggaaatataaactatgtccagaacatattatttgtgttataaacatttatagttttccatttcctgcagataagccttcttcctattttccttttttctgccctatgttgagacagtgagctatagcttaatagattttctacgtttttttccctaggcaccataaacaccaaatttaaaaatggccctaaagattgtgccaagagtgatgacgaggagagtctgactctccctgagaaggaaactgaaggtgaagggcccagcctgcccatggcctgcaccaagacggaacccatcgccttggcatccaccatggaagacaaggagcaggacatgggatttcagggtaggtgagcttgcccacgagggcttccagggacagctggggtggggtttcagggtaggtgagcaagcccacaagggcttccagggacagctgggtaggggcaattctaggtacaggaagctgtctccagaagacaggtttccttcctgttaatctaaagctgatgagtcagcatctcctctgagtgctctgcaccgtgccctgtgccctgcaagagaggcgtcctgtggatccagtcatctttgcagcctcagctctgattataaagtgcagaaacttgcatgtacattgcctagtctgtgcagttctgggtatgagaagaggcaactcactttgtccctggcccaggtaacaagtctccatgtccttcgcgcacctccctcccagcagccggctcagctgccacactgaagacgtttgcctgaaaatgggagttttcctttattctcttgtcctccttgaagaagtagaattgaaagggaacgttccatctgagcaggcctcattggcatatgagtcatgattctcgatcagacgccatctgtaaagagatagtaactatttacacatagtggccgtacacatggttactatcacatatttttttcccttttttctgtttttaaaatacttcttctgagatgcacagtatatgtgtacagagccatatggaaacagggtagatttgcccatttgggttgaggttagtctgctgtcccttgaccttaagataataaaatttccaaaacccctggggtttctgagactgcctggcacccaagggtgtgtttcctcactttgactcagacaggattccagaagagactttgtttgtaaagtgattggctatttaaaattatggcaaaagccaagtaccctgagattggttgctccccttcaatcatagacactgattgttcttctcaaaatagcagatgtttctagattgttcctcacagacactttaaaatcaacctcttaactgtattatctgtcagtgagacaatgcccgaaatgcccgattgtgcttgttctagtcaacacaatccagaggcagcaaaaggagcattttcagctaaaatggtgtgccatgccgcacacgcggggcgagcaaatgacactcagctgtgcttgtgggcattaccttgcagataacctctttctcgagaaggctctgcagctcgccaggcgacacgccaacgcccttttcgactacgcagtgacgggggatgtgaagatgttgctggccgtgcaacgccatctcaccgccgtgcaggatgagaatggggacaggtgagttgagtggggactgttgcacagcaagctctgtttcaggacggggaaaggcaaggatactgcccccacaaactgcctttgaaagggagctgccctcatctgacaagacctcgagtatgctgtctccctaggcaagaaggctcagatgtgtgtaatcatgctaattttacacccctgctttgtgtactaaaatagtaattgagaaaattattgacagccctgcaaagtccctgaagtgttattgtcatagtgtacccaagaaagccaggtaagaacaacattagtagagtaactaagaggaaatgccattctctcctagctactagctgcttctctgtggcctctgttaagggtcacgaggatgtgagtgggtcaggctctgcctcagctccaggccaggctgtgtgggagtctgacattccagatgccatgcctgctgtctcttcctgaggttctgtgcacatagctacctggctccttcctaaatggttctcttagtccttccattgagacttctgaaatgatctaaaagcctataaatatagccagagacagcagtcttgagattcaagtgctttatctaagtgatcctaaaatagcgttaacactgaaaagaagccctttgctgtggaagcattctggagtgctgtgtgctgagtctcagtttaaaaacaaagcgctttaggagaatgccaacctcaggggtttcgtacaaggacctttgtcctcgtcacttgcagtgtaactaaggatgtggtataaccgctggtcttatcctacacagtacaagaggaacccagacgaccttctgtgaaaaaagctctgaataacagaaggcgcctttagaaggaaatcatccagttagcattcaatagcaaataaccacaaaacagagcagataaccagagcaggacaccggtgctccaagggtcatctttaaggactggcgaaattcatgagtagtgagggcgagtggattaagcaattaggaagtgagatgctgctgtctgaaggagaggctgtggaaagggatgccaggcacatgcagtccagcaagtgtgtgcagaggaatgcaggaacatgtgtgtaaggacctgggtgttcatggggcagctgagacactggccttcattcccaagtgggtacaatacccagagcctcgtcaagccaagacttaaacaagcaggctccgtgtaaggttaggggtatgagacctgggagacacagaggacccactcaggagtatacataagggactattctggtttctcttctttattcatcttgtcatatttggcttataatctggaccctgtcaccattagtcatcatagaaatacaataaagagaaactatagaaccctctggtatcggggaacttcccccaggggtatgaagatctgaaggggaggggacgtgcttctgtgaagtgctgagctgcacatggaaatgttgaagtagcttttgaagcccttttactcgacgtgtgtctgtccgcatcacctctcacaagcctcctgtcagggtcccatcaggagcaccacaggagcctgaggtgtggctgcggtgcttctcgtcaaagcgtgcgtgcttcacttgcagttaacacaggcctggggtcatctaaagaggccaccatgatcttccctgagaagtattgctaagtgaaatatctcagggataaataacaagaccttgtttagaaatagaagtcacttctcattgttacggaggaagagagctcggcagctgagttttcccaagctgctcctaagcctaggcattacctttcttcatggtcttgtatgtcagggagagaccagggagagctgccagggacagaggcatggagacagagctggcttggagcttaatgccatttggtttccgacccggcaggtgcctttgcacttcatgtgtctggtcagatgttaacactccgggggcaggtgggcacgatcagtgtgtagtagcctgcgataggcagtggagaggaagttctccagagaaataatgtcacctctgatcagtacattcagtacatggtagggccaaggaaagctacacatagtagctagtcttcagctccagtcatttcttgacatgtttttgtttctgtcgcttgctacatccccagttaattattgccactgtgtgtcattccagtgtcttacacttagccatcatccacctccacgctcagcttgtgagggatctgctggaagtcacatctggtttgatctctgatgacatcatcaacatgagaaatgacctgtatcaggtaagcagccaccacaaggccgtcgagaagagaaaaggttgccttagtaacacgtgcgtgagctgttctcagtgatgggaaacaggaaaacagcatcttctcagaagtggcatcttaaaagcatccttagttgggaatgtcattttacagagagatgggttgggatcatgggtttgatggcaatcacactccatggaaattcaccatcttctagaaaaggcagactttaagacctagaagtcagagttgataaagttttgagggcaaacctcagaggggaaaaagtcacagctgtcaggagagacatgttaaaaagaaatccaagtttcaaaagccagagttacagagacaaagtttggagctgagatgaaaggatggaccatccagagactgtcccagccggggatccatcccataatcagccacaaaacgcagacactattgcatatgcctgcaagattttgcggaaaggaccctgatatagctgtttcttgtgaggctatgctggggcctagcaaacacacaagtggatgctcacattcagctattggatggatcacagggctccaaatggaggagctagagaaaacacccaaggagctgaaggggtctgcaaccctataggtggaacaacaatatgaactaaccaatacccccagagctcatgtctctagctgcatatgtagcagaaaatggcatagtcgaccatcactggaaagagaggccccttggtcttacaaactttatatgccccagtacaggggaacgccagggccaagaagcaggagtgggtaggtaggggaacagggcgggaggagggtataggggactttcgggatagcatttgaaatgcaaatgaagaaaatacctaataaaaaattggaaaaaaagaatattttcaaattaaaaaaaaaaaaagaattttgaggtctgcggaaggaagggtattcgcacagcaactggatcaagtgtatgtcaaagaaaggctctgaggtcagctcctggagaggtgaaaggctgtaagaacaggaagaggcacctcagagtcccatccagctcaggtgtgagaaggtaagggagccccgaaaactccagaggaaaccacctggagatggcacagtgagctgaggacagaggcagatggtaggggaaagcaaaccagaaactccactggcagacacagtctgggagctgtggcctggcccaggatggtggcctgctctacggctccttcctctctcacctctatttctctccaacccttttgtgcccctacccctctctctgggcctgttggtcttatcctcttgttggcttctaagttcctctgcactctcttgcccagagtgtcattctgatccccacagccaggcccatgctgagacctctgcttccaggtcatattgctttcattgaaaaactgtggccagcaaccgtgaataatttgttatttagaagagatgagatgagaactagtggaattcttacttgtttgtttgtttgtttgtgatgttttttgttgttgttgttggtttttttggtttggtttggtgcttgggactgtacccaaagctgagcacaaacccttccagcaatctacaaccatgttactccatttttaaaacaagttattcaagttgttatctcttcttatccatgcttctctctgtctccctctgtgtctctctctgtctctctcttgtctgtctgtctgtctctgtgtgtgtgtgtatccctctctatcaatctctctctgtctctctgtctctctctttctctccctgtgtctgtgtatctctctctatcaatctctctctgtctctctgtctctctctttctctccctgtgtctgtgtatctctctctatcaatctctctctgtcattctgtctccgtctctcccccccccccaatgtgtgtgtatctctctctgttgatctctctctagcgtacccaggctggcactgagccatcagtgtcctacctcagcctcccaaatcataggcttgacaagcatgtgcctggcatgttatctcatttttaatttaaaaaaaaatcattattttagaagaaattaaaaagaaacaaagagatgactcagtggacgaagtatctgctgtacaagtgtgaagaccatgttcagatccccagaccatcgccagccagatttagtaccacacccccccacaccccgcccccgcccccccctccccagtcagggcaggagacaagcatcttgcatatgcgggggggggggggggacaaaagaccctgccttataaccttgcacaaggcagggggcagtacacacgttgccctctgacctcatgcacgtccctgcacccacacgctcagagaaggaaagaagggaaggaagaaaggagggagggagggagggagggagggaggaaaggaaggaaactaactgcacatacacactaaaacaaaagagctaaaaaatttttattttaaaggaaatcattaaattcttattttttaatacaatattttaaagttactttgaaaatatgaattggaggctggaagtggctcacatgcttaaagccttgagttcgttcgctccccacaccaaagaaaaggctgaagctgttagttcgttggcctgtagctctcagacttttccgttttcagaggagcacagctgctttctgcacagcactctgcacttctctgtctgcagtgattcctatccaggggagatgactaggctaaggtgttattttagatgtgttcttcaagatctgtcttcctcgggcttccatgccatcttgggatactattggtatttggaaagtcattgggccccgaaagttgaattctccaaacttttaggcagatggcactttttaaaaactttgtattgattctctgtgagttttgcatcctttttttttttttttttttttttttttttggtttttcgagacagggtttctctgtgtagccctggctgtcctggcactcactttgtagactaggcatcatgcaccccagtcccactcatctccctgtcccctcatatctgccctctgcccttgcagcctccctcccacaaaataaacactcaagtaacaggaaagacaaaaacaaaaaaagcatagagaacatctcgatgtgggagcgatagtgtgtcaccgggcatcccacagtgtatccctctgtccacacatcttcacttgcaatgagtgtttggttctctgtgacacggtaattctgagttccccaaagtataagcttttatgttatttcaagattatgcttatactgaatttacaataataacaaacatgtggcaaaagtgagagcctgagaactaacgacataaaaggccgtgtcacatgccggagaatgcaagaagagaacgcagtttaaagactcacacttgggctagtctagagagtgggtgggttccaacagggatctgatagtgacagatggtcacagaaatgtactatggttagtggaagatgtttggggagaatgtttgagataatttacaaataatccaaattacttagagaactgtatacttttctgccaagaatagttattatgtcatgcatgatggtgcatatctataattccagcccagaggagtctgaggcaggaggattgttgtgagttttgggccattctggcctatacagtgggttccaattttgtctgtattatattatagggtcttgtttaaacaacaagaacaacaacaacacaaaaccaaacaagcaaagaaaaaaaaccctccaaattaaaaagaaactagttcccaagctgggtgtggggcacacatttgtagttctaacacccaagaagacacaggaggactgacagcttcatgtcaatctgggctacacagcaagttctgggccagcctcaaacacaggaagaccctctctcaaacaaaacaaagcaaaacaactccacaaagccaaacaaagaaacccaaaagttatgagaatcacaaacgctgcctgtctatgtccttgaggctaagaagctggtatggcagggaatgtttgtgcccattaactgagtgaagccaaggtgggaaaaactggggagaaaggtctgagggctccaaatcagagcagctttgccttgagctcaggggagaggttccatccacaaagagctgggtcgcacacaatagagcctgcttccgcagatcctatcaccaacagccagcagggcttcctgaatccaacctccagcagccgagggaagcaggttttgcaaagaggattgggaagtagcaacttcctcttcttcagtttattcttatacttgtgatggttaaaaatgcaatctgccacttgtctgctatgaggtagcctgggtgcaggggtgatgccttcctccacctcgcctctcactacctgtacaggcagtcaggagagctggcctggggtcatgcaagggggtgagctagccctgtccttcacaggctttcgagagcaggccttgcatctagcctgtgctgcagagtagagaggaccctcgtggagggagcacagtgagcagccctgagggtgtgagagcaggagaactggccctgcccctcactcacaggctgtagtgtatgggagagtgggtcctgccctttgggcagcacagtggagccagctctggaggcatagggagatccgacagctccctatttccagatgtgactgttgcatgtatacaggaagagtgctcttccagtgttggctacagacagctgctctgggaagacatgtattctttagtgtgctcacatgcactccacacggttttatacatacatttcctatcccacatcagcctttccctttaagtttcaatttaaaatactttctcaattcataatttttgcaaaattcaactgagaggacctgtatatttcctgagattgaaccagacgcttacctcctaagttcccccagcagttacatcctacttaacacaataatacaattaggaattgcaacagattctagtcagatctcaatatttgtatgtactcatatgcatggatagctctgtaagatttttttttcctaagctgaacatggtggtattgtgttttagttcctgttattcaggtagctaaggcaggaagagtccttgaatatagatgttccgatgtagcctgggcagaaagcaagactgtttctaagcagagtgaatgaatgaatgaatgaatggtcaatccatgtgcttgtggatgtgtatgtagcattgtactgtgtccctgtcttgggtcttcacgctgtttatcctttagtttcatagacagctggtttgttctcattgctcctgaagagaatgctgtcatgtcccctaactagctgctcactgtccacaggctgtgcactgcagtgagcacctgcactgtacccatgggtgccacaagtgggtttcaagggcagtgtgagccctgagctccacagatggattctagggattccttgaggcacgcattttatgcgtgtgtaaaatgtaacccttgggtgttggtggcccaccagccactgcttcccagcaggaagaactccctgaatgggaggtcgggcaagtcctcactacacagcctgggcttcagtgtaaagcgcctacaacacagactggctggcattgagagttggtgctactctctaccagtgatctcagctttttgacagacacttttgtgattgggttagccccacttgtttctgaaaacagttttccatgcgtcctacttacaaccatggaagcacagctttgaggtcagggtagtcagaaagacctcccagagcctattatgcacagtgcctgggattgttttctgcctgaactttcttagggagagtgctgtattggctaactatgccctgaggatctggtagcacctgtgatagtattacagtggagcttgtatctgtgcgtctcttgaagccagcctgcagcagtgtgttctggtttagcctatgtacttccagaccattgtggaaggatgacatctttcttgattgctttcttttaatagtctatttatgttttgttgttaaaaacacagcattggttcgatttgcaaatgtatagaattaccagctatagatagatacctatcagaaattcagagaaattaaattttcttctacaagagttaaaaaaaatcatgtagcaaacgtatcccataaccccgactgttgaatgctggttccctccgtgggcctttgagcctggcatgcagaacaggaagctccttgagtgacaaatgtccctacagtatgactccataacgtagcctgaagccaggggctacagacatccctaagcaatggctctccctctccttctctgtgtagacacctctgcacttggccgtgatcaccaagcaggaagatgtagtagaggatttgctgagggttggggctgacctgagccttctggaccgctggggcaactctgtcctgcacctagctgccaaagaaggacacgacagaatcctcagcatcctgctcaagagcagaaaagcagcgccccttatcgaccaccccaatggggaaggtaagagcagtcgccttgctggctaaccgtcccctctcggctgcagcataagggcttggcatttgacaaatgcgtctgacatgactttcaccatgaatactctcctcggccagctggagtttgtcatatcttgtggttatttctgctgtttattacagcaaacgcccttaaagagtatttgtgagtattgcttagtaagtggaaaagcaagcccgagcaaacattagtctttataaagcatcgtgtgtgtgtgtgtgtgtgtgtgtgtgtgtgtgtgtgtgtgtggagaacgtttacatagtagctcagtgtctcccgagaacacagtgggagcttgtggcttctgaaagtagaacagtggaccgtctgaggctttgaagcacgccctgaacagaaaccggaagtgctgcgacctggtggtgtccctcctccccgcagcccagctctgtcagtctcacccacatctctgcctttgttcggccttaggtctaaatgccatccacatagctgtgatgagcaatagcctgccatgtctgctgctgctggtggctgccggggcagaagtcaatgctcaggagcagaagtctgggcgcacagcgctgcacctggccgtggagtacgacaacatctccttggctggctgcctgcttctggaggtaaaggcgtacttgtgatcttgacctaaatccccctggaagttttagggaagtcttttcaaagaatgactctagggccagctcgctgtcagtattccactgtctgctttctgcatccccagctccagcccagctctcaacctggggatgccagtgacagagccagcccagtatagcagttgggtgaatgatgtaacctgaggtgcaacggagatgtggaggtagacagtggaggagagagcccctgctaactctttctttgtgggcggatttagggtgatgcccacgtggacagtaccacctatgatgggactacacctctgcatatagcggccggaagagggtccaccagactggcagctcttctcaaagcagcaggtaagacgctgtggtcactgataccagcaaagcaaactgcctgcaagttcaaagctgcctgcggaagctgcggttctgccctgggaaagtgccggtaaaggagacctgcacccgggccactctgcagcggctgcactggaggctctgcttggcctcgggtttaccttgatgctcacgctagttcccactctctggttatctacgttgcctttgggttgttgaggtttactcggtacctataaaatcttgagctgtgtcagcttctggtcatattacaagtctcccagaaggaaaatatctaaagacttccttttgcaaaaaaaaaaaaaaaaaaagtctcttagaagctgaaagcatgggaaaagcaaatgagccctgtatttgtgttactgtgcacgaggcactaagacttgctggcctccactgcctttcctcggctccaggcaccatgctggcatcccatattcacagtctcctttaccacatctactcctcagtaactctctgagataagaactgttgctattaatcccatctgagcaccaagaaggcagactacaaagatgatcaagccccactcccagtgtcccggaaagctgagtcacagcaccgcagcctgactgcagactcttattcttcacgctgtctttctttctgctctgcctggggttctagtccttcctgtaaagcactcagaaacattccagctcatctcctgtctccggcgctttgtgtgttcagtgttaacacatgcttgatgaggttggctggccttccgggcctgcccagacacacctgatttacttcagaggttgataagggaggatttgtgaacgacacattccttatagattcaggcaaagaggccttggttgtaatgtgttgagtcattttggaagtcactgattatactgggggaaaaaaaaaaggttgtctcttagtcagacacctgaaatctcaacattcagaaggctgaggcaggagaatggccacaagcttaggctaccttggtccacatagttctaggcagaacaaagatacatagtgagatactgtctcgacagtaaatatataaatgtaaacacttttacttgaattcaccatgaaaaggtagcaaataatatcttgtgtgacataaagaaaaccagacaaaaagcctagccctgacctcctcggagtcacaaaggtcacttcagggacatgtgtagccctcgggtcttcaaactcatttcccagtcatgttcctggccatgttttgctcacgttataaaagagcaagtgaggcagcagagagtggcaaggcagcagtgttggcccaagtcagaggttctgtcggcagaactgaagcaaacacttcattccaaaaggctgtgctgagcctgcctgcctgcctgccactgttggccaacccggagccggacacccataggtagaatagccaggaaggcatgacaggtaactccactaacattagggttacgttttatgttgtcttgctgggagctgaagaacaggcaatatccccaagatttgttagcacattttttccccataacaacacatcctgcctagcatagcggccttgtggtgtccatttctctgttgcttaggaactagaactagggccccaacagtacagcactcaaggacagagctgaccaagcaaatctgctccacacaagtaagcgagagtgtgagaagtgtgtattggtagatgtaaatgtgaaggttcaggactttacccctgtgggtgcataaattgccacctactagtccttaggttaaaatgtatcctttgtagtataataataataagaataataatcctgcagagttacaaatcccaggagtacttgaagtctttcatgtatttactttacatcctgatcacgtcctcccctcctcccagtgccctccacatggctcctcctccccaccccctccctctctcttcacagggtccttggctacctacttccatagaagtgaattaaaattttttaaaaagttgttttaaatttcactagaaatgaaaagttatcctgtaattgccttaatgagctagaggtaacctgtccctcgacatgggaatcctgtgtgtgattggaggcggacaagctttttcttttacacaacactgtatttccctgactccataggagcagaccccctggtggagaactttgagcctctctatgacctggacgactcttgggagaaggctggagaagatgagggagtggtgccaggtaccacacccctggacatggctgccaactggcaggtgagctctggccagcccatctcatgggtatttacgggggagccagtggctcaggaatataaaacagatggtcttcttggcatgctcctccctaaagaacatgcctttgtttttatgaggtcttgttaccgagagggtcttaatcttgaaagatggtcttcatccatgaaagatgaaggtccggtgagccagagtgtaaagctgtttgcgtaactggattagagttcagatatgagaggttagaaaagcacaaaatgcacagaagagttaccctgtcagcacacgaccagagttcttgccatttctgtcagaagctagcttgctcagagcttaagtaagaggtttctgaacataaaaataaactagaaattctcttgtggatttccataaacatattaaaaaccttccttaaaacacaatagggcttacacttaaaggagaaaacgctaggtgtttggaccaagagaaaagagccagaaggcaaagtaggcagtgtacgggtccaacacagtcgggtttgtaggaatctagactctctgtgcacgtctaggaggctgtttgctggctgggttcctacagggaacacagaagactgacccctgacctgattcctaccctgtgtaccatcagcaaattcacctcagagaacaccaggacttttaaaaatcatttctgtgaatattttctcatgtttttctatccgacaggtatttgacatactaaatgggaaaccgtatgagcctgtgttcacatctgatgatatactaccacaaggtgaggtgtggcaggacagattctctcagccagtgttgccccatgctgtggtttacaggaggagaggagaggccagcctgggcgagggtgtactgcaaaccgtctagatcttatctcagaatctgagatccctggaggtgtggccctgagctgctagaagcacctactgctgctgctgagcagggcctctggacttggcagaagcttggtggcctccatcagaagttggacaatgacctgtcctctcagattgattgtccctggaaggttaaagcagtcatgtttcttccttaggggacatgaagcagctgacagaagacacgaggctacaactctgcaaactgctggaaattcctgatccagacaaaaactgggccactctggcacagaagttgggtctggggatattgaacaatgccttccggctgagtcctgctccttctaaaactctcatggacaactatgaggtaacgcgccgccgtaccatttagagttgtctgtgtaactattggtagttgaccgtgtcagctccactgagcagcacagcctacccccttacatagtaactttatggaaggaaaccagtcattgcctggaaggcaaagggagccaggccaggatggtgcctttttcttgagaagactggttacccgtctctcggcattccctgttttcaaattctcagagccttcctgtgaaaatactactgcccacaggatggggacccctccaagctgtgatcggtgtgtgcatccctgtttgcaagagggagccccccagggccatggcttcattgttctgtcgggtgactcctattagagcaattccaaactaaaaaatagacaaacatgggcgagctactccgaatgaggctgtcattgctagctgctgtcttccctggatttctgtgcgtagacatcaccgtaggcagtctcctgtctcctgtctccatgaactcacaggcttctttcccttccttcccctcttttttcttatctctctccccnnnnnnnnnnnnnnnnnnnnnnnnnnnnnnnnnnnnnnnnnnnnnnnnnnnnnnnnnnnnnnnnnnnnnnnnnnnnnnnnnnnnnnnnnnnnnnnnnnnnnnnnnnnnnnnnnnnnnnnnnnnnnnnnnnnnnnnnnnnnnnnnnnnnnnnnnnnnnnnnnnnnnnnnnnnnnnnnnnnnnnnnnnnnnnnnnnnnnnnnnnnnnnnnnnnnnnnnnnnnnnnnnnnnnnnnnnnnnnnnnnnnnnnnnnnnnnnnnnnnnnnnnnnnnnnnnnnnnnnnnnnnnnnnnnnnnnnnnnnnnnnnnnnnnnnnnnnnnnnnnnnnnnnnnnnnnnnnnnnctacacagaggccattgaagtgatccaggcagccttccgcaccccggcaaccacagcctccagccccgtgaccactgctcaggtccactgtctgcctctctcgtcttcctccacgaggcagcacataggtaaagaggctgagagagttcctttcctcgctggcaaggtctttgtgctctgggacgtggcactacactccctttccctagtctttttcctgacatgtgttcctctgtggcatgccacccgctccctccccacagtgctcctctgcgcacacaggaacaggcagttcccacagacactcacattggcatataggtcacttagaatcccagtagacactggacatggcggggagggttaaagaaacactacttctcatatttgttaaatttggagaaagattctaagaaaggtgcacagccctgggccacaggacaagaagtaggacccaggaaatatgcatactgtatgacccttcctttcatgccaccacccttcaggtcccccacctcctccctccctcggcactccccgtccttcagctcccaccctgctcatggtcctgcctttgtcttcccacactaacatccacctgtcacccccaacacatgcatttgtacgaatggatctcggtacaggcttgaattatgtcattgttcccggcccgtgctttctctaacctctgcaccctttcttcttgttcattttctaccctagccacaaactccactgagaccaggaacaactagcattctcccatctttgtattatgccagcaccccggtggcaggccttccatctgggctcagtaggttatgtctgccttccacctggggcagtcctcccctgggagcctgcctgtcaccttcagcaggtcctggacacctgattcttgcctctttgtcctgtactgtccttccttccccacctgctgtggagaacctcttgctaggatgtaacttctcatctttaaacactggcccgcctggccacaggctgcttagccccgctttgattaatgttacatctcaatgaatggctttgtccattgatagcgctttggttagctcatgttttcacgtttgtatgatacatgctgttatttttgttcgcatttctcatatgggggaatctacaggtaaacacagcctccaagttcagtagaaaaatgtcatcattaagagtattatatccaataaacagtaaacagattttttaaaagagaaagaaatttagagaaaaacgagacatcacttccttgttacaccctttagttgagttcaaacttctcagaagaatatgataactgctggtcagctcaccacctctgtctgccatctgcttctgtcccctcctctcctannnnnnnnnnnnnnnnnnnntcccattttcacatgtgttccctaccctttccatccctttaaagcctgttttccgccccctggaggcctttgctagttttctggcctctgctcacgctcacttccacatgaatatacatacgtgactgttggaagctaggatccacacgtgagagagaacgaatggtatttatgtctctgggctgccttgattagtattctccattaacctgcaagtttcatctctctttacggccgaataaacttttatcatcttcacacaactcttggctcttgcacaaactcatactggccatgactgtcaaaagtatagccaggctgtaacaaaatctaagagtggcaatgaatactttctggcattcaggtcctcatgcttaaccctgaaagggcatctcttcttggcagatgccaagttccgcccatcctcactgcttgcctgaactccaacagtggctcctagtcagcctctttgactctttgcttgcccctccatcagttctctgcaccacagtgatgtgacatgatagggctccagtcacaattaaaaactaaatacttagcagctaggaacacggcaagtgtcccctcctctacctttgggaaagccaggtagggtgacaaatatgtacaacccgatagcccactcatagaggaaaggacaccgagagaggtggatccacgggactcactggccagtctctaaaaacaagatggagaaggaacaaggaagtcacacaatgttgacctccccacaccccacacctgcacatgagcacacatcccacaaacacaaagcaaatacttaaatactgtattaaatttccatcattgtgaccaacttaggagagatttggttgggcacacagtttttataggtcccatggtccactgccttcggggtatagcaaaacccttcatcacggaggaagcacatggtagaggaatcctactcacttcaaggtgtttggaagtacacagagatggggaggagccccagtacagatctctttcaaagccacgccctccatgacctaacttccttctgtgaggccccatagtcaaagagttgtatcacctccagataatgtcacaggctagaaaccaagcctttacttagcacacagcctttgtgggacattttaagatccgaaccataatacacagtaagcctttcaaatgctgcccagtccctgttacacaacagacagttgactggatgaggtaacaccaggacaccgctctggcatggtcattgagtctcagtgttctgacgttaagattcaatgatgagagtcaaacatttgcttagtaagtgttatgcttctgtttctttagtcactctgtacagaaataatctgctctggttcccaggaatgcttttcaggtgatagaatttaacttaagcttttggtatagacacatttaaaaaaaaaaaaaaaaagcctcattttcttgcaccaaaagaaaattttctaggcaatgtgtattctttaaaagctcatacagctcagagaaaggtgccatttttagttcctgcttctgttatgagtttattttgccttgtattcagcagtttgcccagccgttaaaaaaaaaaaaaaaaaaaaaaaagacaaaaggtaaaatgatagagcagttagaaaaatatgcctcactttacaaaggaaaacatgtttatcctgaaccaagagaattcagaacagattctgttcaacagaaagactgatgtaccctgtagcactctctaatgtcatttgataaccctgccattcacacagccaagcagcaccggtggcatgatggggaggtgggatgccgtgctgcgcaggagctagcaagcacaaccctccataccatagtccacacggagcctgggagggagcccactgctgtggatggtgctctagggcactgtgacaaagctctctgggtttatgtcagaagggattcagggcaggaacccaaagactttgaatctgaaactgctgagcaccccggcttgctgcctcatgggctcatgctccgctagctttcttttcctttttttgttttgtttttttttttttttttttcgagacagggtttctctacatagccctggctgtcctggagctcactttgtagaccaggctggcctcgaactcagaaatccgcctgcctctgcctcccgagtgctgggattaaaggcgtgcgccaccatgcccgtcttccgctagctttcttacacagccctggactgcctctcagggagtggtgctgtctacagaggataggccctcctcccgatcagttaactgtcaggacacgcccacagaccagtctcatctggctgggccctccctcatctgcacctccctcctcaagtgattctagacgtgtgaagttgacagttgaaggtgacagggacagcaggcagaacaaagcccttgccatggcctaactcagcccctcatgagtctgtgctttctccgcagatgaactccgggatagtgacagcgtctgtgacagtggtgtggagacatccttccgcaaactcagctttacagagtctcttactggagacagcccactgctatctctgaacaaaatgccccacggttatgggcaggaaggacctattgaaggcaaaatttagcctgctggccgttcccccacactgtgtaaaccaaagccctgacagtccattgcatcgtcccaaaggaggaaggcaaagcgaatccaaaggtgctggagaatcgccggcctgcagggtcactcgatttcattcaaggccttccgaatttggcgtcctttcttggttctgaaatgaaatgtagttgccacgcacagacggtgtctagcaatcatggcgctcgctcgctcagctgcactctatggctcaggtgcagtgtcttgagctttctctgctgctactggatcacatttgctttgtgttgttactgctgtccctccgctgggttcctgctgtcattaaaaggtgtcgctgtccccacccggtgtcctttctagccatctactgtaagttgtgcattcaaattaagattaaggaaaaacatatttttaaatgagtaccttgatgcgcaataaaaaaaagacatttctttttttaatgtggtttatctgtgatttaaaaataaaaaacacatgaacttacaatatttaaaacatgctacaatcagtgctgaaaatagtattttccccgttttatgcattttactattgtaaatatgttttctaaatcaaatactttaaaagaagaaatgttgaatttataaatgctatttacttttttattttacttttataataaaagtacaagcacattgttgacctaatcttgtctgatctctgcaaatgctttctcagaggagtccctgtgactgtgggaacagccccacagcccgtttgtcacatccacattctcctttagacacatttctttgaagctagaaatgttcaaactgtggaaataaaagtgttctaacccaagactgaggttctgacccaggcaacatcatctggacgcctagcatcaacattccaatctctacaccgttcctctccagcgcatgctgtctgtgtctatgaaggataacagaccccagcttcagcacttcatcttctggatacgatgtggccgttgcgttcatagctaactacacaaaacctgtacaagatgtggtccttcatcatgtatagagagggactgatgaaatacacacacacacacacacacacacacagacaccacagcaactggctgttaatagttgctaggggaatgggagtcctttcttcaaatggtatagcacatactccagtaactattccctccccatgttcatgcaggcagccctaattaaactcactcatacacacaagcacagaagcaggaaagtaggaggcggaaacgagaaggcagcggggtttgtggatatgatctcagtacatcctatacatgtttaagatcatgagaaaatatacattttaattaaaaactaaattccaacatatgtaaaagattttccagtatggagtttagtaagtctgcatggctgaaagtagaaagagggaagattaatggcttgaaagaggtcttagtttggactctggtgtgtgaccaaggtcatttagtgtgtagtgtaaagatcaaatccaaaaccttctggtgaagtggcttggcagttaagagcactgatcttccagaggaccagtcagtaggtttaattcctagaacccctcacagctcacaaccacctgtaacttcggtcccagggaatatgatgccctcttcaggcttctgtgggcaccaggcatataaatggtgcacagatatacatgcaggcaaaacatccatacacacagaaagaaaaaaccaaaaacctaaggccttgtcatgccacacaagtgatctactactgatcccacggaagggcctggaaacccaccagctattacctttgggaactgccttcactacaaagagctctcacccccatttccatggtagtcatatgaatgcctttcccattgctgggaccttcagatcctgggagacaggctaaagtgatctgggctatctccctcacacagctcaaggtaccccaaatagacatcttgtatgtcagtgtccatatgacaaaatattccaaacttacaatgaagaaaatggaggtccagagagcgcaactcagttgtggctaaggtgcatctgtgtttatatccagatacttagcgcctaggcttgtgagttagagaatgattttattgggacaaaaaagatgataatgactgaatctattagtagggatttggtataagattaagtaaaatatcattaatgaagaaatgattaattatttaaatatataatacaagctacttaataatacttaaattatttaataaatattctaagtgcctaatcatcaattaatcggaatccctttctaccaaaaattccatatgtatgaaaatttaaaccatacgaattttagacataccaccaatcttagacaaacacccttgacatcgagaaggccctaatcgagacttcattctgtgatgtaaaagcagagcagattctacctcttagaatgcatcacaaatgaacagaaactggttaaacagcaaattctgttttccattacagtaccctctctccaccctaacacacccttattctgcgttggaaactttaagacaaaactgtcttgctttggtgtttcgtaatacttcctgggacagccatgccaccatgccccagccaggactttctatggctgttagctgtgcgtcttaaaacatggtgctgaagcccttcccacagagagacaccattgtttcctgggtttaggctcctgagtccaggccacctgtggcaaggcaggaacgatgctgagtgacttccgaaactaggtccgaatttctgccaaccttcccggaactaccttctcctggaactcagtcaccctgttcagagggtgccaagcagccatgaagagaaggccagtacaggtgttcagccaacagccttaaccgaggtcctagccaaagcttgccaagccgacggctgccaggtgaccctgcctagcctttaggctgtctcagcagatgctgaccacaataaacatgggctgttttgctgttctcaaaggacagatttgaaagcaaattaaatactagtgggggttttaagccctgggtgtagagtggacaccaccattctccaggcatttgaaaagacagcttgcctaccataagttcagcagaaaagatactgactggagagacgc

SEQ ID NO: 116 - DNA, 3892 bp, Mus musculus
  misc_feature (3755)..(3755): "n" at position 3755  can be any base
agcggccgccgcgggcgcgctctagcagcgcaggccggagctcagggccccgcgcgcccggcccgccccgcgcttctccgcccgcgccgcagccatggcgcgccgctgagccgcccgcccgcccgcccgcgccccgacccggctcggctcccgccggtccgcgccgctccgcagcggagcccgcaggcgaggagaggccgcgcgcatctccagggtaccctcagaggccagaagagggtgtcagagcccttgtaactggagtttgacggtcgtgagctgcgcatcttcaccatggcagacgatgatccctacggaactgggcaaatgtttcatttgaacactgctttgactcactcaatatttaatgcagaattatattcaccagaaataccactgtcaacagatggcccataccttcaaatattagagcaaccaaaacagaggggatttcgattccgctatgtgtgtgaaggcccatcacacggagggcttccgggagcctctagtgagaagaacaagaaatcctacccacaggtcaaaatttgcaactatgtggggcctgcaaaggttatcgttcagttggtcacaaatggaaaaaacatccacctgcacgcccacagcctggtgggcaagcactgtgaggacggggtatgcaccgtaacagcaggacccaaggacatggtggttggctttgcaaacctgggaatacttcatgtgactaagaaaaaggtatttgaaacactggaagcacggatgacagaggcgtgtattaggggctataatcctggacttctggtgcattctgaccttgcctatctacaagcagaaggcggaggagaccggcaactcacagacagagagaaggagatcatccgccaggcagccgtgcagcagaccaaggagatggacctgagcgtggtgcgcctcatgttcacagccttcctccctgacagcactggcagcttcactcggagactggagcctgtggtgtcagacgccatctatgatagcaaagccccgaatgcatccaacctgaaaatcgtgagaatggacagaacagcaggatgtgtgacgggaggggaggagatttaccttctctgtgacaaggttcagaaagatgacatccagattcggttttatgaagaggaagaaaatggcggagtttgggaaggatttggggacttttcccccacggatgttcatagacagtttgccattgtcttcaaaacgccaaagtataaggatgtcaacattacaaagccagcttccgtgtttgttcagcttcggaggaaatcagacctggaaactagtgaaccgaaaccctttctctactaccctgaaatcaaagacaaagaggaagtgcaaaggaaacgccagaagcttatgccgaacttctcggacagcttcggcggcggcagtggagcgggagccggtggtggaggcatgttcggtagtggcggtggcggagggagtaccggaagccctggcccagggtatggctactcgaactacggatttcctccctacggtgggattacattccatcccggagtcacgaaatccaacgcaggggtcacccatggcaccataaacaccaaatttaaaaatggccctaaagattgtgccaagagtgatgacgaggagagtctgactctccctgagaaggaaactgaaggtgaagggcccagcctgcccatggcctgcaccaagacggaacccatcgccttggcatccaccatggaagacaaggagcaggacatgggatttcaggataacctctttctcgagaaggctctgcagctcgccaggcgacacgccaacgcccttttcgactacgcagtgacgggggatgtgaagatgttgctggccgtgcaacgccatctcaccgccgtgcaggatgagaatggggacagtgtcttacacttagccatcatccacctccacgctcagctcgtgagggatctgctggaagtcacatctggtttgatctctgatgacatcatcaacatgagaaatgacctgtatcagacacctctgcacttggccgtgatcaccaagcaggaagatgtagtagaggatttgctgagggttggggctgacctgagccttctggaccgctggggcaactctgtcctgcacctagctgccaaagaaggacacgacagaatcctcagcatcctgctcaagagcagaaaagcagcgccccttatcgaccaccccaatggggaaggtctaaatgccatccacatagctgtgatgagcaatagcctgccatgtctgctgctgctggtggctgccggggcagaagtcaatgctcaggagcagaagtctgggcgcacgccgctgcacctggccgtggagtacgacaacatctccttggctggctgcctgcttctggagggtgatgcccacgtggacagtaccacctatgatgggactacacctctgcatatagcggccggaagagggtccaccagactggcagctcttctcaaagcagcaggagcagaccccctggtggagaactttgagcctctctatgacctggacgactcttgggagaaggctggagaagatgagggagtggtgccaggtaccacacccctggacatggctgccaactggcaggtatttgacatactaaatgggaaaccgtatgagcctgtgttcacatctgatgatatactaccacaaggggacatgaagcagctgacagaagacacgaggctacaactctgcaaactgctggaaattcctgatccagacaaaaactgggccactctggcacagaagttgggtctggggatattgaacaatgccttccggctgagtcctgctccttctaaaactctcatggacaactatgaggtctctgggggtaccatcaaagagctgatggaggccctgcaacagatgggctacacagaggccattgaagtgatccaggcagccttccgcaccccggcaaccacagcctccagccccgtgaccactgctcaggtccactgtctgcctctctcgtcttcctccacgaggcagcacatagatgaactccgggatagtgacagcgtctgtgacagtggtgtggagacatccttccgcaaactcagctttacagagtctcttactggagacagcccactgctatctctgaacaaaatgccccacggttatgggcaggaaggacctattgaaggcaaaatttagcctgctggccgttcccccacactgtgtaaaccaaagccctgacagtccattgcatcgtcccaaaggaggaaggcaaagcgaatccaaaggtgctggagaatcgccggcctgcagggtcactcgatttcattcaaggccttccgaatttggcgtccttcttggttctgaaatgaaatgtagttgccacgcacagacggtgtctagcaatcatggcgctcgctcgctcagctgcactctatggctcaggtgcagtgtcttgagctttctctgctgctactggatcacatttgctttgtgttgttactgctgtccctccgctgggttcctgctgtcattaaaaggtgtcgctgtccccacccggtgtcctttctagccatctactgtaagttgtgcattcaaattaagattaaggaaaaacatatttttaaatgagtaccttgatgcgcaataaaaaaaaagacatttctttttttaatgtggtttatctgtgatttaaaaataaaaaacacatgaacttatcaatatttaaaacatgctacaatcagtgntgaaaatagtattttccccgttttatgcattttacatttgtaaatatgttttctaatcaatactttaaaagaagaatgttgaatttataaaatgctatttacttttttatttataataaagtacagcacatgtgact

SEQ ID NO: 117 - DNA, 2916 bp, Mus musculus
atggcagacgatgatccctacggaactgggcaaatgtttcatttgaacactgctttgactcactcaatatttaatgcagaattatattcaccagaaataccactgtcaacagatggcccataccttcaaatattagagcaaccaaaacagaggggatttcgattccgctatgtgtgtgaaggcccatcacacggagggcttccgggagcctctagtgagaagaacaagaaatcctacccacaggtcaaaatttgcaactatgtggggcctgcaaaggttatcgttcagttggtcacaaatggaaaaaacatccacctgcacgcccacagcctggtgggcaagcactgtgaggacggggtatgcaccgtaacagcaggacccaaggacatggtggttggctttgcaaacctgggaatacttcatgtgactaagaaaaaggtatttgaaacactggaagcacggatgacagaggcgtgtattaggggctataatcctggacttctggtgcattctgaccttgcctatctacaagcagaaggcggaggagaccggcaactcacagacagagagaaggagatcatccgccaggcagccgtgcagcagaccaaggagatggacctgagcgtggtgcgcctcatgttcacagccttcctccctgacagcactggcagcttcactcggagactggagcctgtggtgtcagacgccatctatgatagcaaagccccgaatgcatccaacctgaaaatcgtgagaatggacagaacagcaggatgtgtgacgggaggggaggagatttaccttctctgtgacaaggttcagaaagatgacatccagattcggttttatgaagaggaagaaaatggcggagtttgggaaggatttggggacttttcccccacggatgttcatagacagtttgccattgtcttcaaaacgccaaagtataaggatgtcaacattacaaagccagcttccgtgtttgttcagcttcggaggaaatcagacctggaaactagtgaaccgaaaccctttctctactaccctgaaatcaaagacaaagaggaagtgcaaaggaaacgccagaagcttatgccgaacttctcggacagcttcggcggcggcagtggagcgggagccggtggtggaggcatgttcggtagtggcggtggcggagggagtaccggaagccctggcccagggtatggctactcgaactacggatttcctccctacggtgggattacattccatcccggagtcacgaaatccaacgcaggggtcacccatggcaccataaacaccaaatttaaaaatggccctaaagattgtgccaagagtgatgacgaggagagtctgactctccctgagaaggaaactgaaggtgaagggcccagcctgcccatggcctgcaccaagacggaacccatcgccttggcatccaccatggaagacaaggagcaggacatgggatttcaggataacctctttctcgagaaggctctgcagctcgccaggcgacacgccaacgcccttttcgactacgcagtgacgggggatgtgaagatgttgctggccgtgcaacgccatctcaccgccgtgcaggatgagaatggggacagtgtcttacacttagccatcatccacctccacgctcagctcgtgagggatctgctggaagtcacatctggtttgatctctgatgacatcatcaacatgagaaatgacctgtatcagacacctctgcacttggccgtgatcaccaagcaggaagatgtagtagaggatttgctgagggttggggctgacctgagccttctggaccgctggggcaactctgtcctgcacctagctgccaaagaaggacacgacagaatcctcagcatcctgctcaagagcagaaaagcagcgccccttatcgaccaccccaatggggaaggtctaaatgccatccacatagctgtgatgagcaatagcctgccatgtctgctgctgctggtggctgccggggcagaagtcaatgctcaggagcagaagtctgggcgcacgccgctgcacctggccgtggagtacgacaacatctccttggctggctgcctgcttctggagggtgatgcccacgtggacagtaccacctatgatgggactacacctctgcatatagcggccggaagagggtccaccagactggcagctcttctcaaagcagcaggagcagaccccctggtggagaactttgagcctctctatgacctggacgactcttgggagaaggctggagaagatgagggagtggtgccaggtaccacacccctggacatggctgccaactggcaggtatttgacatactaaatgggaaaccgtatgagcctgtgttcacatctgatgatatactaccacaaggggacatgaagcagctgacagaagacacgaggctacaactctgcaaactgctggaaattcctgatccagacaaaaactgggccactctggcacagaagttgggtctggggatattgaacaatgccttccggctgagtcctgctccttctaaaactctcatggacaactatgaggtctctgggggtaccatcaaagagctgatggaggccctgcaacagatgggctacacagaggccattgaagtgatccaggcagccttccgcaccccggcaaccacagcctccagccccgtgaccactgctcaggtccactgtctgcctctctcgtcttcctccacgaggcagcacatagatgaactccgggatagtgacagcgtctgtgacagtggtgtggagacatccttccgcaaactcagctttacagagtctcttactggagacagcccactgctatctctgaacaaaatgccccacggttatgggcaggaaggacctattgaaggcaaaatttag

SEQ ID NO: 118 - DNA, 96592 bp, Homo sapiens
ttgacaagctggttctaaaatgaattcagaaatgcaaaggacctagaatagccaaaacaaccttgaaaaagtgaacaaagttggaggactaacacttcctgatttcaagacttattgtaaagctataaagtaatcaaaaaggtgtggtattatcatatagatagagaaaagatcaatggaacaaaatagagtccagacatacagatacaactgatttttaacaatttgcaaaggcaatttagtgaagaaaggatagttttttttttcaacaaatgctgcagaatcagttggaaatcaataatctaaaaagaaaaaacttcaatccatatcttgtaccactatatgcaaaacttaactcaaaatgtatcatagacctgaatttaagtcctcaaactacaaaagttctagaagaaaatagaggagaaaatcttagtgagtttgagtcaggcaaagagtatgtggatacaacactgaaaccacaatgcagtaaaaaactgacaaattatacttcatcaaatttaaaatcttctctgcaaaagaggatgaaaagacaagtcacaggctaaaaaatatgtatttgcaaatcatatatctggtaaaatacttttatccagaatataaaatgaactctcaaaattcaataataagaaaaaaaatacaccaaaagtaaacaaaacatttgaacatgcatttcaccaaatggcaaataagcacataaacagatgcccatcatcattagtcattagggtaaagcaaagtaaagcacaatgagataccactaaacatatcaattgagacgattaaaataaaaaagactgaccataccaaggattgcaaatatatgaaggagctagaactctcatttcctgtagtgggaatataaaataatatactctttgggagaacagtctgcagtttcttaaaaagttacatgtatgctaactatacgctctagccatttcacttgtaggtatttcccatgacaaaagaaagtatatgtctatataaacagttaaatagttacacacaaatgttttagtggttttattaatatatcccaaaactggaaacaacctaaatgtctatgaacaggaaaatggataaataaattgtgactatctatacaatggaatgctactcaacaataaaaaggaattaactactgatacaacaaggtggatgaattttaagataatcatgctcaatgaaagaagtcagataaaaaatagtacctactgtatgattccatttatatgaaactctagaaaatgcaaactaatctatgacagaaagcaaatcagtggttgcttaggaatgtggaggagtgaggaatggaaatgaggaactgcagagggccatgagaaaacttttcagctgatgcacatggtcactgtctttattatggtgatggtctcatgggtatatatatatatcaaaaacaactctctctctctctctctctccaatcccccaaccccatctcttacaacaagaaagtatgtccctagtatatctggaagccatcttttgaccaagagaaaagccagcatgaggaaactgttaacacagggacagaagaaaagaaaatgtctctgaagggaagagagccagaattgtgattacattaaacctaaagattttcaacgatgtgacctgatgaaattccataatggttaagtcattttgagtcataattttacatcttttcaccttaggtgaaaagcatcctaaccaagataagtatatgctcagcattatattgataatttataatacgccattggaaaaaaactctcttcctggcatttaattatattacttatttcaaagaaaatgcagtaaaaaactgatctgtatatctactgatatgtctatcagtaaaacagataagtatatctatgtatacctactatgcataagccttacaggtgctacatagaggtgatatctgttgtttatactctttgtcttcccttcttcctttttttgataacagtgccccaatttacgcttagctaaccataatctagcattactaattcatgtcttccagatgagatagaccctccttgtcactaaaagtagacatgtgactcacagcattgtaagaagatagtaatggaacacaggtccccaaatttaccctcccaatctcttctcaattactttccccaacaagaaaaaatgctactgcaggtaagcaggggcatctaaagcagggtcacttgaggtcacaggctccagggtctctaaaaggaaagagatactctcactcttctctgttttaggtagtctggagggccttgttatagaaagacttaaaacaaaggtctcaattttatggcttccagtgaaagttagcctgaggaaacctatgaatgccttcaggaaagcattacatgggcttatttgtgtgtgttcttgggaaggtcagactaatctgggtagtgacaggtcatatggaggaacgctgcactcatggaagagttgcttgtagcccctgaggttaggcaagcattctcccttgcacccagggagctctgggagaagaaagactttttttaaagcttcagctgggtgtggacagattgccagttggtttactgccagcccacaaaagcagaaacctttcccctggcaggtttgccactgcataaaagaccctaactacttgtcctgtaattataggtcagtgtatacagagcctgaggtctgaacaggaaatggaaaataataacttgccctagtagtactagcaagccagagaggaaaactaagataaacacttcaaacaggtgttttgttgaaatagaactgttagaagagccaggtgaaaacttttctaaaaagtaataaattcactcaagaagatataattaaagattaggagttaaatatatgatagatgctagaatgataaaatatacatattttaaaaataggtaatgactccatgtgtttctgacagtatacccttcctggttgaaataactaaaatgaaataactaatggaaataactgaaatgctacataacatatttttaaaaattaatactgcttagccagcatgaaattcaggaatctaaatatttccaaaactgaaaaactggagggaatagctgagaaattgacttagtctgttttgtgttgctatcacagaaaaccacagactgggtaatttataatgaaaagaaatttgtatctcacagttctggaggctgggaagtccaatatcaaggtgccagcatcttgtgaaagctttcttgctacatcatcccatagtgaaaggcagaagagcaaaagagcagacactcaagagagaaagtaacctactcctacaataatggcattcatccatttatgggggtagagacctcatgacccaatcagctctcaaaggtctcacctctcaacactgttgaatggggagttaagtcccaacacaggaactttgggggacatgttcaaacgataacactgcctatctagtccttgtcactggacagaaaaagaagaaattctcacctgtgaattcataaccacttacactatatgtgatgatcaaaagcacacaagtaaaaaattttatttaaggtttttccaagttaatagtataccagataacaggcaaaaagaagcacaaatattccttactcaattttaacctaagcttcaaataatttccagagattgtttcaagaaacgtaagcaatttattatttataattcagttgacatattaaacagcatatgaaatatagctgaaaagagaattgataaactagaaggcaaatataaagaaattatccagaatgaaatccaaagagataagagatattaaaagacacagagattagattgagaagatctaacatatacctaatttaaattccagaaaacaagtctagggaaaatgaaagagaggaaatgttacaaaagataatggactaggaatgtaactgttgaaacatcaaatcttgagacccagggagccatataacatgcttccaaaatccaagcttattatattaatatacaaaaacattaatattaatattatatattaatgttattgttaatataatcattatattattaaacatataatttatacataaacaatatattatatataaatgtatatgatatataatatacaatagttataatatataataaattatatattgacttctatataatatagaattatataacttataaattatatatagctttatatataaatcaataattatatattgatgtgtacaattattattttatattattattaataattatataattggtattatataaatattaattttatattgcaatagttataaagtaaatatcatataacattattaatataataaatatagtatattaatattaataacttgtatttattaacaatatattaataaatgacataatttcacatttctttcagatttctgtaaaagcttatcaggagttatatatatgcaaaaccatatttatcttattaaagaggcatgtataagtgtcagaccatcacttatgaatagatttgacagccagatatacaacctttcagaaaacagaagcaaacctcctccataaaaacaagtaattggcagctgtctcaatgatgtccagtaactagccttatttcactcagaacagttttgtcggcttcatatagcatgaccaatcaccctggtttactagagcctgagggtttcctgcgcaagggactctctgtgctaaaagcaagatagtcctggatcaaccgggatgagttaagtctctatttccatgccttcatagaaatcattaaaagatatctctctgttatgggctgaataatgtcacccaccctgaaattcctatgttgaagtcctaacccccagtacctcagaatgtaactggattttgagatagggtttttaaagaggtatataagttaaaatgaggacagtgggatgggccctaatctaatatgactgatgtccttataagacgaaatgatttggacgtggacacagagggacaaccacatgaggacagggagaagatggccatctgcaagccaaggagagaagccctcaagtaaaccaatgctgccaacacattgctgttgaacttccagtctctagaacgataaaaaatatttctgttgtttaagccacccagtctgagatattttgttttggcagccctaacaaacacattctctaagggtttattctcatttttggtttagtgtatttcagctgatgattatagcctaatcctccccctcttcttggggcctctcttctctgtactcttcctcctcatatctcacacaggcagatttgttcctgcctcctcacctacattacgagctccgcacagtctcctttcttctggctccggctccctcattaatctttctgttattaacgctattaactcgttaaactatctctccacctttccaaacttccattaactctggcactccataagtgttagtcaaataaatgaagaatcacactaactcctctttccttccctctcactccaaactcttggtgagattcttttgcacttatgccctcgtttccccatttcccactcacttgtcagtctcctcattcttggttttcctcattatattgaaacacatctgaaaaagtcatgtaagaccacagccactgcgtatcagtgctatttgagagttaataaagttcccttttcctccaagacagcgagcagagtgaacagaagaaagactggtttctgcccttggctgcacagccatgccccgaggccgggcttaggattttataattcacaaagtcaactgtctcttcccctctccatcctttaggaactgtctgcagtatctgacactgttgagagctctcataccctttaaactctctcttctctggctttctgagctttcctcccacttttgatggcactgcaggagtttttaagcatctctctctcataccaaccccagaaataaagtcattcctcgaattcctgtacttagccccttgtctcctaactctttgaccactaatgttttagaaacactctcctgacaactatcgcatctttgcagttgtttccatttccaacgccatgtctctctgagcagcagccttgagttttcaattgcatatttattagtcatttccatatggacatctcactaaatctgtcatactaaacatgtctaaaatatgtatgtttacatgttacatgtatgtttggtatgtgggaatgcattacattcccacagattttttcccagttacagtgttactattctaatcactcagactagaacactcagagctatctatgagtcttcctctcactcaaactgcatatataatctataaacaggtcctgttgacctcatcttctaaaaatctcttacatgctcctttttatatcattggataatagtttagtgtggtggttaatatcatgcacactggagccaaatctgttaggttcaaatcctgactctccttctatttactaattatgaaaccttaggaaaattattcaacttttcatctgtaaatatggggattataatggtgatccactttatatgactgacaaccaaataagtgaatacgtgtatagcaggtattaaccatatgcttagccgacctatttcaacctcctaaccaaccagaagaactgtagttccctgctctcttgcatctaagtggggccatggaatgtgggcagaagtgttgtgtcacctttactcagaggcaattaaaaagaagacatacttttcctatgttctcattgccaatgaacacactacacagatctcaacctcagaattctctccacactggtatttccaaaatagcttcatgagaagggaaatttgtgtagtttcaatgatttagtgatgctatggtttgggtatttgtctcctctaaacctcatgttgaaatgtgaccccaattttggaggtggggcctaatgggagatgtttcggtcatggaggtggatccctcacaaatagattgatgctattccctgcaaggaggagaggatgagtgagttctcactgcattagttcctatgagagctggttgctaaaaagtttggcatctctcccctctctctcgccatacgatctctctgcacacaccacccgcctttgccttccattgagtggaagcagcctgaggccctcaccagacgcatatgctggtgccatgcttcttgtacagtctgaagactgtgagcctaataaacctcttttcattataagctacctagtcttgtgtattctgccatagcaacacaaatgaactaagacaagtgacaaacacaaaataacttgtcttttagacaatattgatgtctgaaattccacattgaggcatttttttcctcttcgtagcctgataatggcaaataccttctgacaccttaggatggatgaatttgtaagagatattcctggaagcaggtttgtacagtgtagagaaaatgttgggtaacaaagcaggaatggaggagggttaatcagcaagccaaaaagcttttatagttttgcctgctgtgctgcatggaattacatccccccaaaacatatgttcaagtcctaaccacaggtacctgtgaacatgagtttatttggaactaggatctttgcaaatgttatcaagttaagatgaggtaatactggattggggtgggctctaaatccaatgactggtgtcttcataaaagaaaggtgagggagagttgaatatagcgacacaaaggaaacacggggaaggagaccatgtgacaatgtaggcacagaatggagtgttgcagccaagccaagaatggcaaggattgctggagctaccagaagctaggaggaggcaaaggattcttccctagagccttcagagggatcatggccttaatggcaccttgagttcagaattttaggctccaggactgtgacagaataaattcccgttgtaagctgttcagtcggtggtaaatttttacagcagccccaggaaaatatgcctgctcaacaccctaccctgaattttaagttcattttatggaatcattttgagtttggagtttgatttaatccttttcagtaattaacgctcttcattttttactcccaaatatgtcacactggctctactcttataacaattgtatttatctatcttttggtaatggggctgccaccccttgcagaatgaaaagtagagtgtgtatgctcacacctccctccctccctccctctctccctccctctctctttctttctttctcagagtatcgctctgtctcgcccaggctggagtgcagtggcgcaatcttggctcactgcaacctctgcctccagggttcaagcgattctcctgcctcagcctctggagtagctgggattacaggcgcccgccaccacgcccggctaatttttttgtattgttagtagagatggggtttcaccatattggtcaggctggtctcaaactcctgacctcaggggatccacccgccttggcctcccaaagtgctgggattacaggtgtgagccaccgcacccggctcacagaatttcttaaaaagtcattgtgttcagtctttatggatcctctaaattccagctgctcagcctcccggagctaaatgagatcacttaaaggtcgactgttggggcctccaaggtcgcctcggagactcacctcataggcaatcaaatggatcgctgggtttttgtgtgtgtgggttttttttgtttattttttttttccagaaaaacactccaccaagaaggtttttataacctactggaggaggaggatggagagtgggcacgaaaggactaggatgaacatgccataagcaatctaaatgccactgcaatattgcctggtgaggacctgattactgatgttttaaagctaagctttcagttgtcactccacccagtagtgaaacaatgagctctaaaatatatatttcggctcaagctttcttatgtggggaggtaatccacccgaaggtatccccagcctgtacctaatacagtgcccagcactaaagcagctcagatgccagtgaatggtggccactgggaggcctgtcagtgggtgccagtagcggtctcttcagagaaaaagaaaactcccctctgccagatcagtattttatgagctgtgaaccaaaaccattgctaccaccatcactataattctatccacagtaattatcataaaggcctaacaatgccttgtagatgaacattctgagtaactgctctataaccaggagatttaagaccgcaccaaaaaccagtagagggttatactttactgggcacaagtcgtttatgataacgaaattgtagtttaatctgtgaagagatgtgaatgtaactgagacacgcttaaatggaatatacagatgagctttatttttatatctggcatgcttggatccatgccgaccctccagctgctcgggcctgcccttaggggctatggaccgcatgactctatcagcggcactgccaccgccgccgcctccgtgctgcctgcgttccccgaccattgattgggcccggcaggcgcttcctgggggcttccctaccggctccagcccttgggattcgggagcgccctgctaggaagccagagccccgcaggggccgcggcgtccaggccgcctaacgcgcgcccctcgcccggcgccccgaagcggccccgaggggcgggagccgaggcgagcggcaaggccgggccgggggcgcacagcgcccctagaagtgcgggcttcccccacccccggcagcgaccctacctcccgcccccgctgcgtgcgcgcgtgtgtccgtctgtctgtatgctctctcgacgtcagtgggaatttccagccaggaagtgagagagtgagcgagacagaaagagagagaagtgcaccagcgagccggggcaggaagaggaggtttcgccaccggagcggcccggcgacgcgctgacagcttcccctgcccttcccgtcggtcgggccgccagccgccgcagccctcggcctgcacgcagccaccggccccgctcccggagcccagcgccgccgaggccgcagccgcccggccagtaaggcggcgccgccgcccggccaccgcgcgccctgcgcttccctccgcccgcgctgcggccatggcgcggcgctgactggcctggcccggccccgccgcgctcccgctcgccccgacccgcactcgggcccgcccgggctccggcctgccgccgcctcttccttctccagccggcaggcccgcgccgcttaggagggagagcccacccgcgccaggaggccgaacgcggactcgccacccgggtaagccaaactcgggcgagtgggggcccggcaggggacgcgtggcccaagtcctgccgcccagccctccgcaccccctccagccccactcggacttcctcattcctgcgctaaccgctgggctagaccgtgggaggaggttgacagtagctgagaggcacatgggattagcgacagcggggaaagacacatccggacctcgcaggggctagtcggccgaagggccgcggccgcccggcggtcatttctcttcacgtccctccgcggggcgggaacgcgaaccggaggggaactcttacaaacttttaaaatccccaaccccagccccacctgggggatggtgagaaggttggagtgcgctgcggcgcggaggagagagggaaggtggttggtgcagtgcagaaccagatttcacctaagggcgttccatgaaatgaaagcagaagtgcttgtcagtcctcttggctgggaaagccctccccagctccccagaattgaataggagagtctattcatccctctcctacttctaaaagaaacctggctcgctctctgtctctctctctctcccccctccccccctccgtgcgcgcgcgcgcgcgcacacacacacacacacacacacacacacacacgatatagtcacctgctataggacttgattctgatcctccggggcctggcatttgagagagaaaataaattacctacctggatacttagagcactttttagacttgattatgtaaaactcttggacagtgccaccatgcattatgcatgaccgctgaaacaaaaataatgtaaaaacaaggcctatcctaaatgcaagtttttctatggtccttaaaaacagacaccagggaatgtttgccctgacttgctggtttatcctgaaactcaaatgggacttaatgatacaggatttaattatcaagattgacatgttcatggactttgttaagtagaggttttcagcattacagtttatgaaataaccatatttaactcaaagatttttttataaagctcataatctgaaaaaatgcttatggtattactaaaacatttaatagctctggcatcaaaatattctacatactggtgatcttttagtaaatagtaaaggttagggtcaagatattcaataatttttttctagcagaatcccacaactgaatattgtcaagcagtttaaactgcattcgtgtttgttaaaactttaaaagggaaacttaaaactaaagtatgttgtttttctgattttaatattgtgctttctagagatgaatccttttactgtttgaggcactataggaattatgtatttaaatgtatgtatttaaatttgaagcaatgtacttttttgagtttataaacttgggaagacaggaaataaaaagatttgtttcctgtagaattttacattcatgatttaattgaattgctaaaatggaaagaacatgtacgattaatggagacttggaatctgagattattcatccatattgatacacctgcaattcctaaatgccctcccctgcttgtttagataaaatgtcttcctgggctgcagcctactggacaaacttgaacacaaaggaacacacgttatatgtacatttaatactggaaccgaaaagctgcttgcagtgaaaagcaaaccacttctaaactctttgagactttttaaagaaggtagtataatccttttaggggttggtggtgatgtgaaaatctattatctttttgctgaaatttcattcttatgttaggcattggcactcacttgtgctgagtaaatgcccgtgtttttcaaacccagatagtaaatactgggggtatacatacaaaaatagtccttcccctttgtaagcattgctttgatctttgcacttcctttttactctacctcttaaacaagatctgtgttgattgagttgattaaagcacaattaatctgaaataggcagaattttagatttagtgattatattccttacatttctgttgttactgttcctggaaacaaattgaagtagtttgagaaactaatatttatgcaggttgttttaactacacttttagacttgcagataattgattaagtaagttactaccttgactttcagggattgctcattgtggtagatacgaggtctagatagggaattggcagctacatgaatgttggactatcattccatcagcaagaccttatttttacctaatttatgagaggtatttctctgttcagaagaggtgaaagttctggcttctggggggaagtggttacttcataaccttcaattggtttgaacttgggagaagtaagaaaagtagtcgatattttcaaacagtaaaataattgtatctgagttgctgtatggatttttgatgaagtactcaaaatgtcatcttttgcatcttcgggtcttagtagatgtgctattctgagtatagaattgactgcagtaggaagtgtatctggaaatgcacagtactgttgtataaccaatagagtaaattctcagattatgctcttctggtccacagattgatcagaaatcacattaacaggaatggatgtctatgcaaaatttctcattaattttcttacttttagtaggaagtttgttttattcggttggtctgttggttttctgtttacaaggtgaattgtctacagtagtgggattgttatattagaagagaaggagaaggaaaaatagaagttagtgctagaggatatgttaagatgttctgctcctacatctacatttgtgtctaatcagcattaattgatgactacgtcttggtaaacagtagaccatactggagcaatttactctgctttttgggaattagttctcatttgcactcttgcacctcccataaatactgaactcacttgtagtgttcttagaggtcagcaataaaccatcaagagcatatgatctctctttgaattttgtcactactttggagacagacagtttggaagaactgaaggtactcagcctcagggagaaaggtttgaacgttttggcatagtcctgcaagtcagtttggctccttgactgtgaatttttttaatcaaaaaagattaatatttgaaaccacataatttggacagttaatagttctggtaacataaccaagccttttatctttgtagtatttcattaattagtatccagtgcctcacttttagaagaaaaaaagagaaaaaagtagtaacattcttttaatgatgatgaaattgcttcatacctttggtctctgctgtattaggggttgttcctgggtgcaaattaatatactgtcttttacatttccggaggttgttgacctggccttgaagatcagccaacagtttagaaaataagttgtgcaaattgcattgctacacctcaaataatttaaagcctgacagttctgtacagaataagagtcacataagatgtgatttgttaaagattatagaaatctcagaagatagattatggatgaaaatatttgtttaatttagagtactaataataaaaatagtgcattttacattttaaaaagaaaacaatttttattgtgtcatattttctgtagtaacaaacagaattaattatcagtaatacaaatttcatctgctttaatttattgcctgtttttgaaattagaataatgatatatttggtttaattatccattacaaattgccttattatttttcattcatctttcaccattaatccagaaaccttaaaatagcttttattttgacccatgccttcagtagatatcaacagacttgagttcatctatggatcctattagtttaaactgtgacaaattttgactgcttaagctttagaaaagaatttattctttaaaatagccaaaattataaaaaatgaaataaagaaaaagctgtttgagagaatcaaatactctagtttaactaaaaataaataatatctaatcaatactgacgaaagaaatatctgatgcttagcattgtacttgttggtacatagtaagcaatcattaactgttaaatgaatgaatgatatgaagttgttgcaaaatttttttttaaatggacagccatcttctataaggaacaaaaattacattattttgctttgccttctggaaagaaaggagcacaaaatagtccttgtgtcttagatattatggaaatcttatctaaagaccacttgaagtttactagaacaaataatttattaaaaagtatctggcgccttccaaaaggggaacatttcattctgaaagaggcatttatgaactagaaaaaaaatgccttttagtttcaaagttttagaggcaccagagcaagattataaagtaattggaatgataaaaggtgcttgtaaaattgaaaaatgtaattttttggtgaagttagaatttctgtacactccattgaaactgtaatatcaaatactaatacctccaaaaaagaaacaatgctacaagcactgcttggtaatctaagaattgttaacacttatctaaattaatcaaccaaaaagttaaaacaaaatatgttattttgttatgttacctctagaattaaacacctatcacccataaatctgtgactgttaaaagttactagatggcaaacctcaggaacaagcaggcagttagcagggtttactgtactttccactttcatactttaatgatttttccaacactatagaagctggggcctcatcctagcacagtttgttcattatttttcagttgtagcattttttaaaagttggccttgaatttctgaattgaaccatttatttttttgtggacacagttttttaaatgaaatataccatttagactagaaaagagcaaaatgccaatactccctgtcctagtgtcattgtgccccctgggaaccctaatgcagtcctgtgggaaaacaaccattttattgagcgctgctcacttcagttcattctgctttgctgccacttagttctggttctgaccctgatctcccctcacatcactcacaacaaacattcaagtttaaaaattaagttaaaagttagttacatatatatgtaactaatgtgtatattaaatatactgatatatattagttacatatacagatatggcaacaacaaaaaaggttatatatatacatatttgtaactaatatgtatattaaatataatgatatatgtataaatacatatttgtaactaatataattatatttaatatatattagttacaaatatgtatatataatattttttgttgttgccagcaaaatgagaaagaaattaaatgttaacatctataacaattgcactgtaaagccgtcattgttgaaaagtactccgaagattaatagcggcagtgtttgttaaaataataaaataatccaggcactctgcctgtgacttccccatgagatggcttccagaaaaagataaatttttgtgtgttcccttacgagttcagtctgcagcttctgggcatgaagagaagcataaacaaaacaaacaaggctctaactttgttataatccttacgctactagtagaaatgtatggacaattcatgcatttcatattggaaaataaagctattagatttttctttgagatgaaccttttttttgtaatttattttttattttttattttttttcagtagagatgggattttgctctgttggccaggctggtctcaaactcctgacctcaagtgatccacccgcctcagcctcccaaagtgccgggattacaggcgtgagccacctagcttggccaaggtgaacctttttgataaatgaggctcactaatatttctaggatttacttttcactaacttgaactaaagaaagtataagacctgcataaagttgagcatacctctataatgtcccattttaaaaagcaatttgtttttaatgacttttatttgttaaaagcagttatttcaaaaaattatttttattatttatcatgtcatttggactgaaaatactataccatatttcagtgttagggcacacctatccctctttatcccagacgtcaattctaccatataacaagtatgtaaaaaagaaaacataaaagtgatgacagactccctaatcaacctatttattggttctaagcccaagcctgcagttcatttaaatagtgaaaatagattacttaattgtcttagaaaatatgtcttccatgacaagaattttaggaatgagaaaataactatttttggatgttttaacacaaattcccaaatcatgttttattgatatttgaagaacctctttgtctaccagttcttaagtataggcttattttgtaaggcttaaacatgtattggtgtttgactgttaagacttgatctataaccttcagtgtctttttcttttaaatggggtatggacttggtaatgaggccagaggagaataccttacaatttatagcatctgcatataatacaagaaccttcatgatttataaaattaaaatgatgatgatgtggaatgatggaagaagcatgtgtgggtggctatttatgtagaggaaattagaagttgaaagcaatgttaagaattaaaattaaattacacttaattttttgctcagttggatagtcaggaaagtacttaaatcagcaattgatttacgtaaaatcaaaactgaaaactgaatatacaatctaggaaataggaaaaaaatttttagtgtgttcatactgctaatttcaaaccaagcaaaaaacctggggaactacttttcagaggagatggcttaaaatgaaccaaaaatatagccatttctctaccctattcatttaatgcattcatttattatactgctaatacatgataaggtgaataggttaagcatcgtttgtatatgtgtatgtgattttaaacctgagtcttttgaaagattggtcaaagcaaaggataatgaaagcataaagatttagggggaagagtcctctataaaactaagacttaaactttgttatcaacttgaatgtgaagatagaataatctagaaagtgaatgagaattataaataaaaggacaaatcatatatctcatggttgagaaatacaatgagataaattgtatatctcatctcatggagggtcataatgaaagaagtaagagagattgcccttggatagaacctttcggcagacatttcataatggattatcatatttttgctaaactggtaagaatggacttttcaccacattatgaaaaaacactttagaagtcagttgcgatcaagcaaatataagtacctgggaaattaaaatcaaaagcacagcagtccaacaatagtcaaatgcatttactcactctcataccatatcatagcgttaatttgagataatgtctttatggtgtctctttatatatttactcgatttcccatttaagacatttaaccaaatttaaaaagcaatccttagaaactttaaaaatatttcctattttaaaccattacataatcatttaccctgcagttacaattctttttttgtgatgggtggggaagtatcccatttctcttagaaagtcttctgtaatagccaaataggagtcaatccaagttgcttagagaggtagttcaatcctgtgttgaaatagatgacttttggagtaattgtgctatatttactgagtatctgttgaactgtaggagtccagtcattcaaggcaagctacagaaatgattttattgctgaggcacttaagtatcttcacatctatatgccaatattaaatttctcatcatccttgatccccacccctttgcacagattggtatccccagcacattagggaatgcggttgttagcctgttagggtccattcagtagatttctcatgccagaaatctagaagcccttcttatacattcagctttcttcttcagtcagtcaccaagttctatcaaggcagcctcctcatctccagaatccatcccttcctcgttgaatttctagattttatttttgcattgtctcctgcttctaacccatcgttcatttcgcataatggtcagctttctaaagtgtaaatcggatcatgtctctgcagtgaatcccagttgtcttcacaagctgattctcgcacacctcacccccttactccctccggtgttccccaaccatcccctaatctcaaatcctccacaccgactttcagtttcctatccacagtttctgactttgaatgcctttgcttatgccctccctgtatgagaagtgccttttctttcctagccatcctgctaacttctaaacccttaggcctggtttgagcatcaccatttctctcacttgcctttctgttttctccctcccctttccataaagagttatgtgcccccattctgtgttctcctgaattcctgtgggtcctagaaaagaaacatcttgagggcaaggagttcatcttatttactttttatttgcacagcacctggtgtgtttgctgaataagtaaataccgaacaagatatcaagagacagtgctgccaattaactgtgtggctctgagcaagttaattaacttctctgagtcttatttttgttctgtaaaaaaaatgaggtttgacaaaatgagcatctctctctaaaattatgtgtttctttgatgtaattgtattaattggaagacttcagattttcttgccatatcaagataggtcaacttaagaaaaatgcatgtgagtaagtaccaagccaattcttgattatcagtatgataatatgaggaactgcccattttgtcgataataagttataatttttggtctcagtgtaggttctttctcaaatccagatgtttctggtgttgcattttttcattattattcagtctctcgcattcatatttctccaaagaaatttatggaaaacttgagacaaaaattgaatgtaaagtttaatatttaaatgctagattgattcaaggtctcactaattataactatatttggagggagaagaaggggaggtggtggtagtatgagctgaatcctcctctgttccttcctagaaggaacacaacgtcctacatcaagaaaaaagacagaagcatatcttggagatatgaaaagaaccaccaggtaaactaaaaagaaaaagagtgttaaaaagtcagcctttaaaaagcaggattggagatgaggaggggtggagtaggggaagcattgcttgtttatagaagctcttccatcttcgtatagtgtgatttttatttttttattattttttccttccttttttttgacctccagctttagtatagtacagttgacagaaattatatatgtttatggtacacaagatgatgttttgatatacatatgcattgtgaaatgattaaatcaagctgattaacataagtagggttttatttctttaacagtgatttatttgaatatatgttgagtcctttctatgtgccagacacagttctaaggacaaggcacacagtgccaaacaagacagaaatccagaaattcatggagcttaaatcatgtagtcttttcagtttttaaaattttcttgctgggcgtagtggctcatatctgtaatcccagtacttcaggaggccgagaagggaggattgcttaaacccaggaatttgagaccagcatggacaaaatagcgagaccccagtctctacaaaaaatttaaaaattagctgggcatggtggcacatgcctgtggtcccagctcttcaggaggccgaggtaggaggttcacttgagcctgggaggttgaggcttcagtgagcagcgattgtgccactgcagtccagtctaggcaacaaagcaagactgtctcaaaaaaggaaaaaaaaaatagaaagagaaactttatttttacattagccttttttaagttgaagaatcccatagctaaaaaagtacacaaatattaatgctgcaactttagtgatttatctcaaggtgaacacgtttaacctagtgggtggtcaagaaatagaacactggcagcactgcaaaagcatcctatctgccctttcttagttaggaccccttccctccactgtcatttaaaagatttcacaaacaacttttggattatatgtatgtcaattctgtgactcatatatatccacatagacaatggagcgttgactgaatgaattcattattccaaggtgctaataatgagcttcacaccagcgggaactctgctgtgtcagttgggctctaagctcagttcatttcagatattcctcactaaacaaaatactgtttttcctcagttgttagtaaaaaatagaaaacagattacattctcatttacttattacttatgaatgtaaaagtaaatattttgcttaataccaagtagccagggtcactgacagagacatgggagaaagaagtattcacatctgatgttatcagacatagaagagagaggtatagttcacctatttctccccactcagtttatacattgacatctgtatgtgtgttgttttgttttgttttgtttgtttgttttgagatgtggtgtcgctctgtcacacaggctggaatgcagtggcgcaatcatggctcactgcagcctcgacttcctggtcccaagctatcctcccacctcagccacccaagtaggtgggactacaggcatgcaccaccacacctggcaaaattttaattttattttactttttaaaatttttgtagagatggggtctccctatgttgccaaggcttgtccccaaatacctggacctcccaaagtgctgggattataggtgtgagccaccacacccagccatgtatatgttaaagcgtttatctgtatgagtggtcagtgtagaaagggcttcatggagcctgattttgatggcttgcaaattattatatttgtgtatgtgtaatcggaaggccttcgccgtgattatttcttcaaaggaaccctttgtccctccagggtgattgtacccatgttcataggaccaaacattgctggttcacataatgactctttttcttttaaaacataaaggacatatttttatggatttttgaggattaatagaataaaaatctaaagtcatattcagattcaagagaactggatcagtttctctgtatttgaacaaaagaatactaatctctaattcataatgcatgaggtctacttcttcctcagtctgaaaatatgaatattccaaaatggtactcaaggcagaggctatatatcaaaattaaaattctgtgatactatgtttttagggaagaagaaaactgtagcattagaaatgtagacgcaaaaggtcagaacaaagtccagtatgtcaagtccctttataatgccatctgaatgaaagacctcacaccatgaacagaggtattgaagcagtttttatgtggaaatggtaggcagcaatatctcaggagtgactttaattataacatttaaggttttatctaacttattataatccttagagaacttctctagctctacaagttattcttggcagaatttgtcctaacatagtattaataaaaataaattttacttgagtatgatataaattactcttaattacaatataattttaaaatgcccaaaacatcttttgatcttatgaatttcagtcagctatgattaagaagacaaccataggcaaaaatttctttcttatggaacacgttggaatgcattctaatcacttctctaagaaaatccctgtcccccatgattatagtgaatatgatacagcaataatttagatgcttctttcaggggggtgaggttatgtattctacagtctattgattctaagaggcacttttttctcccccaatttaacagttttgtttaattatatacatttcaggattttttggggatatttttctatcactggtttctgatttaattccactgtatttagataacatattccgcatgctttcaattctttgaaatttattgagacttactttatggctcgggacgtggtctatcttcgtgaatattccgtgtgtatttaaaaataatgtggactctgggccgggcgcggtggctcacggctgtaatcctagcactttgggagtccgaggcaggcaaatcatgaggtcaggagatcgagaccatcctggctcacacggtgaaaccccatctctactaaaaaaatacaaaaacttagccaggcgttgtggtgggcgcctgtagtcccagctactcaggaggctgaggcaggagaacagcgtgaacccaggaggcagagcttgcagtgagccgagatggcgccactgcactccagcctgggtgacagagcgagactccatctcaaaaaaaaaaagaaaataataataataataatgtggactctaaaatcattcagtggggtgttgtagacacactaggttcttttgattgacagttttgttcctaagccttctatatctttcctaccatggtttgaatgtgtccccaccaaattcaggtgttgaaacaggatgaccaatgtgatggtaggaaaaggtagagcctgtaagaagtgatgggattaggtgcccttttaaaagggcttgctggaggaaatttgtctcctcttgcctttccgccctctgccagttgcggacacagcattcctcccctctagaggatgcatccctcaccagataccaaatgctggtgccttgatcttgggcttcccgttgccagaactgtgagaaataaacctgggctctttataaattacccagtctcagctattctgttatagcagcattgacagactaagacatttcctgacactctgttgatttgctttgatcaattaccgagagaggaatgttaaaaatcttaactgtaattgtggatttgtcattttttccattagttctgccacgtttttgcttcatgtattttgaagctttgttaataggtgcgtacacaataagatcattgtttttctttgatgagttggccctttgattcttatatgcaatgttcctctttgtccctggtaatgtttattctcttgaagtctactttatctgatattttagaatgtagcctgcttttcttatatttagcatttgcatgatataactagcccagtgtaccatcttcatacatttaaactgtgtctttaatattaaagtacaattcttatgaaaagcgtatactttaatcttgttttttaaaaatccagtctgatcatctctgtcttctagatgagttcagtccagttccatgtaatattattattattattatttttttttttttttttttttgagacggagtctcgctctgtcgcccaggctggagtgcagtggcgggatctcggctcactgcaagctccgcctcccgggttcacgccattctcctgcctcagcctcccaagtagctgggactacaggcgcccgccactacgcccggctaattttttgtatttttagtagagacggggtttcaccgttttagccgggatggtctcgatctcctgacctcgtgatccgcccgcctcggcctcccaaagtgctgggattacaggcgtgagccaccgcgcccggccccatgtaatattattactggtatgttgggtttaagtctctcatcttggtaattaattatctatttgtgctatctcttctttattcttttttttctcctttcctgccatcctttgaataaatcaagtttagtgttttaaattccattttatctccttcattggttactttctaaagtggttactttaccactttagaaaagtatttgtttattacaatatgcatctttgagtctctaattaatgtgagaacttgacaatgttatacttctgtttgtccttctgtgctgttattgttatacattttacttctttatatgttataaactccaaaatatattgtcttgttttgctgtgaacagtcaatcgtctgtttaggaaattaagaaagaagaaataaaagtcttctgcttactcacatatttatcattattgatgctttttattctttcatacaggtccaagtgtctatcatttcccttcagcatgaagaacttctttttagcatgtcttttagcaggtctgctggtgatgaatactcttagctcttgtttacttgaaaatgtcaatttcacctttatttttaaaagatttatttgctgaatattctggaccaatctttttttttcttttatcactgtaaaggtgcctttacattgccttctagcttgtactgtatctaatgatcatcagaaacatcatgcttatcatgcttatcaattgttcccccatatataatatgtcctttcttgtcctttgctattttgggattttttttttctctagcattagtttttaacagtttggctgtaatatgcctaaccatggttttatttgtctttatccagcagagagatctttgagattcttggatctgtgggttgattttttaaaaatcaaatttataaaaattctcaactgttatttttttgaatattttttctgtcttttttctgtttctgggattctatgttacaaatacgtaagactgcttaatattgtcctgtaggtcactgaagctgtgttcacttctttctgcctttttttctctgtaattcagtttgggtagtttttattgacctttcttctagtttattggtactttcttctataatgttaaatatgctaagtccatctagtgaaatttcatttcagttctaaaatttccattcttttttttaaaagaaaggtatgcatttctttgctgatattgcctatctgttctctcattatgttcatcttttcctttacattattgaccatatgctattagctatttttgtcatttgtgtcattttttttctcagtcttattttcctatttctttgcaggcttcattatgttttattgtacattgtggagagtttgggttttttgtcttcctttaaaacgtgttgagctttgttgtaacaggcagtgaatttactggtggatcacctagttttattaagataggtttagagtagcccttattttaggatgtttctaactcccatcgtgtggtctttctgaaatcacaactgaatgctcacaatgttcagtgatgtctttccaccctggattattacaaattcagtgtctctcagcactatatgatgtctggaatttccatttagctcttagatgcccagaaactgttttctattaggttttgcagggtcttgtcctacactatcacagcttggtatttggccagtgaccagagatgacccctatgtagatttctgaggctcttgctttttgtgtaaagcctttctttgtgatattctgcccattggtgttctctctttgggctctccctgtgtcatgatttggaaagtgtcctcagtcaaaaagtgagggcgaatttagaatttacctaaatcaccttataatatatagccctatgaagtccaatgtcttaaattacatctttaggtattttgtatggtttcacagttgagtatagcaaggagggaggttcagataactgttaatctgtgataactaaaaccagaatttgacattctgacaaacttgaaattgcagtgcttcttaaaattaatacagtattacttaaaaaacaaaaacaaaaaaaccagtgttttccaatttgccaatacaaaaaagcaaaactcccatctctactttttaggaacttctatccatttgagaagatgataaatatataggtaaagttagattgcagtaaaactatgctgtctagtgttaaatcaccagtatatataagttttatagatattatgtgactacagagctataggttataggaaaaatataggatttcttggcagaaattggatttaactagagccttgaagagtggatgctattgaggtagaaaagatggcatttcaggatgcagggcatattgtgaacaaatgtacaagatggaaatgagcaagtcattctgaatgattaatctgtctatcatagagggttttgattaggacatagtagtagttgatgcttataatatgatttaatataataatgtaatgtgctgagtggttgaagtctttggactttatcttataagtaatatggcaataatgtgaaagattcttgaagaggaagaaaccctgcagtgagggagaacagtacagagcctattactgtcattcagaggtgaagcaataaaggtctctcctaggatgttggaaagaaggggcagatccaagaaacaacatgaagaaaataatcagcagaaattggttattgactagatatgtgtgaaaatgatatattggcagaaattgcaaagtcaaaaatggggctcattgcagcaggaatgatgaaattgcttttagatagagaggtgaagggatttaaaacattaacttgttttaaaggtatcactgcttaaagctaacagtgatttattaatatttgcactctgaaagttttaacagttttaattttatgtatacaccacagtgttttggctactatacttgcctcttttgttcagttgggaattgagtaaactaatagagtaaaaaaatgagtacaaagtgggctttgactagaactctaacaaagtgtgatcactgaattaccaagataattaacccataccccacatatactccatttcccatgacacatattatattgcattgtttttgcctatttgccttcctacttcctaaactgttgaattagtttgcttttgttgcattaaaaaaaaggagaatcaccacaaagcaaattaaaagatactgattacttcttccaattctgtgggctgcctagttcatctggcctggcctgctttggctaatctctgaggtcttttggctacttgactggtactgtttgtagctactcagctggtgccctactgctgtttgtctgaagttgttttggctactcagctggtgctagggagcctcagctaggactgcctgtctgtgctccacatggtctttgattttccagtggctggtgcaggcttgtttgcatggtaacaatgttccaagaaagcaagaatgatcattgcaaggcctcttataagctgggtttagaacttgtacttctacctcttcctattggtcagagtatgtccgtaggtctgccaagactcaaagcacagagaaatagatgtttcctcttgttgagtggcatataaaaaaaagtgtggccattgatttcaatctgccacaaccgtaagctctgtgagtacaggaactgcatcactcttttgcactttggtgttgttggcatagtaggcataaatatttttaggtgaatgactaaattaatgaaggaaggaaaacattcaggtagtatttcaatatactgtagttttaaattatatatattatatacatttgacatagtttaatatataagtatatacacatatagttttcatatataagtatattatatattatataaaatatttatatgttatatataaagtatatatataaaatatatagttttaatatgtaagtatatgtatataattatatataatattataagtatatatacttttatcataccatcagtgagtatagacatggttcagggagaatctctttattctccttctatcttttgagatagaccaaagaaaatttttttttaaaaaaagaactatcacttgagttaacattgtttggtatttttatcttcataggtgattgccttgtgaataactcattttgtgtattgtcagaatcctattctgcttttcaggctgtgctatgggtagactagctctaaccagaacacttgggagacctgaagcaaagatactatattaaaataagtaatgttatatgccaaagaggaaaaccacttctgcctcctaaacaactgaaagaaccagagactgtggggtcagattagctagcattactatatgaacctgagcaaatgacttactctctttcagcttcagtgtcttatctaggacattggttctcaggattggtgtgagaattaagagaaatatgtgaagttctagctacagttctttacccatgaggtagtcagtaaagtttacttctttctccatgtgaaccaaagcactgtcatgatgtgatgatgttcattagggtttctcatgctcagcgttattgatatttagggttgcataatgctttattgtgaggggccattctgtgcagtataggatgtgtagcagcatctgtagcctctatacactagatgccagtaggaccacctatccagctgtgacaggcaaaaatgtcttcaaacgttgccaaatgacccctgggggcaaaatgcaaacagtttatctagcagtgacacatagccagccaccttagaaagggaattgtcagcgtacccataagtgtagaatgggaaacaaaatacttgagtcttctcagaatgtctaaaccttttgctgtctatattcctctttttataatttaccacaaacatatattgcttattatgccatctaataaaatggctaacatttgctgtgtattatactcggtgttaataagctttgtatgaactcactagctgaatgttgtatatgtatctgccatacctgttggattgacattccactgtaaacaggtaccttatctttaccagctccaagcacaatgtatttggtatatcaggtagctattctacatgttaattgatcacattgcacccaaatgaaacatggatgtggaagtggaaggaggagctttaaaacatggaaaattagtttatacaaatctaaatgttgtagtgcaccaaattgattcctttttaaaaactttcagaaatcagcttttaaaaaaaaaaagtaactaagccatgatcaacttttctttcatcaccactaagccaatatcagaaagttgtcaatcaacagctcttttaaagttgaaatttttctattgtatttcttatgaagatttcagtagtgcttagaagtttttggctcatttatcatgttttattcactgtatgtcattaattgttaaagatgtcagagtcaaaccttaaattcaggagagatttaaatttttcctttttcctatttaaatatatgtttctaattacataattcagttagaaaattacaatatagaaacatataacttagtaaaagtttccagttactgtatacagattatattgtatactgtattatttttaacagttgcatatttaacttataaatgtggataattataattaaacaatctgttatcaaaggacatacagattatttccagttccttgctgcagtgaatatccttgtacttatttttttacacacttgctcagataatttttaagtacaaattcctgaggtagaattgcagaatcaaaagatactctcatttgagtgtttcacattttatgcaaagtattttgtttcctccagaaaattcctctgtggaagaggcttcctcacattctttatcagtttattagccagcagagaaatgatgaaaagccaccccttttcttgtagtttcatcctcattgctatccaagatgaggtattaaaatcacacctaagtggtgtctgttgtggctgaatataatcttgaaagtagagacacttctctctgattcccaactgtactctctggatggcacctaaaattttattttttcaaactgaaaatcattttaatgagttcgaaaaggttttattttttaaaatgaaatcctatagaaagaatacattttcttacagtgggtcatggtcaaaagtgtgaatatctctgatcctagaaagtttccccagttacaaggacaggcgtgcccccaactccatccttaatggctcaattctgtggctttcaagttaatccactcagtcctacagccttcaccaagaagctcatgtgctacactttggtgttagtgggggcattgtcacacaggttcagaaaataacccattaggcattttatagaactcatcacatgttcagaactaagctagttgtaacattatgtttttcatgtgaaaaaacacaagcaattcactggctattttatttgttgctagctagctatactttctatttctttttccatggtgtgaaaatcttcctagaaacctcactactgggaaaagagatgcagagattagtcccatcttctcccctggaaatttactatcgcccttttggcttcaaggtccttcctcaaaagcaaagaattgaacaagggaaagtgaggggaagggctgggggaacagggaggtagaaggggttttccctggtcttttctaatcctttagttccagacgcttagttggtatttcaacattttagaaataaaacctgcttttataattaatgcaaatattacttagtgattcatcctttccaaatgattcttggtttcttttgacatttcatttttaaattgtgaattaacattgacatcaccatagcgttactgttacctcagctctttacagtgaactgtattgcaaaggctataaaagttcaaattttaactatcacccacgtgagccttggactgctgttaggcttttgaaactgtgatcctttggcaagaattggtgtataaatcatggggaggatattgaaggggaagatcatgtttaatttggcagttgggtgcctgcaattgacagattttcattaaggttttagctatagtagtgatcatgcatcagttctaataaagtaggtttcgtttgaattttaaaaattagagtgaggactgctttatgttaactgtttacattcagaagtctggaaaaccatccacaggtttaaatgtatataatcagtataattaacacgtcaacagcctcacctctgtttttgaggaccataggctaatattatttatgaaggttcaggagatcagtctagatcgacagaaagcttaagggcaaagatggttttaatatttttcttggaagtttgagcttctgtggtattctaaggatagggattttgacattgattgttctagctggtattcagtactgtatttaagtgtaatgtttttactagtattcttcttataactgaaaactatgctaatgattctttactatagatatatactcataaatacgtgtaaaaatccaagtttaccaaaaaatattaagacttaggggatatgttctttgaataggcatttatttgctaattaacatattctaatctcaacaaggttatattcttttcaaaaatccattccatcaaaatctgtcatttttacagatgaagaaacaaaggccacagtgagtttagttaatatccaagatcacacagccagcatgatagaactcttaaatttcaagcgacttaccctctttactctatcaggtcaaatttcccttttttaactgcttgtcttaattgagatttgtttaattgtggctgtctgtatatcttcaatcaatactttcttgttttagacaaatgtttccctgcaaatctgcatgaacttcatgttctgaaggactcagagctgccctttcctttttgttaaagttgtacactgctctgcatccccctagaatgctcatcagctttctcactcttcctcactcacacagtgctccagcaggagaggatttctttgaaaatcagattcttttttggagggctttgtgcttattggagtgttatgtgatatattcattacggtgagggctaaactctttgaacaaagagacctgacagtgcatttgggttaaagaacaaagtttatttctttctctcatcaccaccagcatgagcagcctggatggtcagagcagatctgtctcatggcattgttcagggatcctcattccttccctctcatttatctgccatcccctaggctattaatcatcatgtttttggtagaagccaggtcttctccatgtctgagtttttatggaggaagcatgtcaagggccttaagcccagacctggaagtggtatgcaagagttctgacattgcactggtgagcatttggtcagatggccatctctaactccaacgaagtgtagggtatacactaggtaagcagtcacatttccagctacaatactaattctatggaaaaggagacaacatattttgatgggtagctgacattctcatctgcagtcctaagtactcatgactgctagatagactttatgaaaaaaaaaaagaaaaataaccccaggaattaatatttaccctcagccttgtgtttctttaattttctcatttttcatgtcacatatctaaaatttgatctaaataaatttaaataaaattaacctttatttgaataataataaggacatttctcaaggaagtaaatctcaaatgatatgtgattttagatactatctttatctgaccatgtggttccttgcttctatcagggagggcctctgggtaatagaagattgctagggcctgcagtatattaatgtttagctggagttgattaaatctgagacctatagccttgataataaggacttttatttttgtatttttattgcacttttaatattacagagtttctgtaccagcttgacaacagcagaaacatggcttgcttctgtggaacacgctagagcagcagtccccaacctttttggcatcagggaccagtttcgtggaagacagcgtttccacagactgggggctgggggtgattttgtgatgattcaagcacattacatatattgtgcactttatttctattattattaacattgtaatatgtaattaaataattatacaactcaccataatgtagaatcagtaggagacctgagctgcttttcccacaactagacagtcccatctgggagtgacgggagacagtgacccatctggagacagtgacagtgatcatcaggcgttagattctcataaggagcgggcaatctagatcccttgcatgcacagttcacaatagggtttatgctcctatgagaatctaatgccactgctgatctgacaggacacggagctcaggcagtaatgcaagcgatggggagcagctgtatatacagatgaagcttggctggcttgcctactgctcacctctttttgtgctgcgttatccatagcccagggtttggggacgcctgcactagaggacagagcctggtacactatagcagtcctccccttgtgttatgcagagtactgatcagtcccttttgagcttctcaaccttgtataaaactttgagacagttctgggaccatcacaaggtttatgaagggttagaaaacaatacacttaaggaactaagactgtaaatcgttgaagttcagagggcgataaaaagaaatggcttctaagaatcccagtatgtatgattttttatacaaagcataaagatgatttgtaccaaactcaggacactgtggcgagcttaacacgagggtattgaatcatacgtaagtggtaattcctagattatgcaatctccttgctgttagatttagataccaaagaggaactacatcatgtcctcctcctatggtcttcaaaaaaggattatatttggtcttactggtataatacagtttattcctgcatgaattccatggtgatagaatttttaaagttcattctagtgttacagttttgttttgttttgttttaatacacagcttcagaatggcagaagatgatccatatttgggaaggcctgaacaagtaagtgtcataatctcactgataactttatttaaatatattcatatttcaaaaatatgcaaaggcaacattagtaagttagcattaggaaaattctaaaattagtaaatttttttttaatttcagtttctctgtcctttcatgtgaagttggagaggatatgtcatgtgaaatgagtaacttacacccgctttcacacatattgttgcacaaaaattgtatatgctacaggatagctattgtattagctttctagagctaccataacagatcaccacaaacctgatggcttaaaacaacaaaatacattatttcacagttctgggggctagaagtatgaaatcaaggtgttggcagggttggttccttctggaggctctcaggaagaatctgttccatgcctctcccctagcttctggttggttgctgggaatccttggcttgtagctttatcgctccaatctcttcctccattgtcacgtgcgcttcttcccggcgtgtctctactgtgtctctaaacctaaatctcctctttttttcttccaaaggcatcattggatttagggtacacccttatccaatatgacttcatcttaatttgtttatatctgcgaagaccctatttccaaataaagtcacattcacaggtaccggggattaggagttaaaggtgtctttttgggagggaacacagtttaacccactacagccccttgacatatttatttaatgtgtacacatggatgtagagagtggaatgacagaccatggagattcagaaaggtgagggatgggagggcagtgggatgggggtggatgataagaagttacttaatgggtacaatgtatgttatttgagtgttggataccctaaaaaccctgttttgactactatacaatctatgcatgtaacaaaattgcacttgtaccccatcaatttataccaaaaaaaaattttatttaaaactcatctagtaaggagacagattgttgtagtgaaaagatctttgaactcagaatttgaagatctttatataagtactgactactacagatcagctcctcagacttgaagaatcacttagtccccgtaatcctcacttttctcatttgtaaaatagaaatgctagcaccacactaacagggatgagtcaaaaatattcaatgaatgtgctttgtaagcataaaactgttcctatcattatattagtagttatgaaaggatagcagtgtccttttttctttttctcctatattttattttgaaaaatgttggaaaaaataaatagaaatgttggaataatctaacaaatctacattggttcttaaaaccgacattttcgcttttctctttgctctctttttcgtgtgtgtgtgtgtgtgtatatatgtatatatgtatatgtatatacataatcatttggaagcaattttcagactctggagcaattataatggcaatattaaattatttatgtaatgattccaagaagtatttaaaacatggagatttgttcattcatcagctatttattgaggtattactacgtgccagaacattggcttagtggggaaaaaataagtgatatatacactctaatttcaggaacctactattttaataggaagaacagagacattgttttcatatggtgatatatgctgtagtagtagtctgcgcagagcgggatagaaatgttaataagcagcatcactaggtgctaccttggaggaagagcagagttacggaggactttccgaaggaagtcttcgtaagctgtgttttgaaagatgtagtttgctagactagaaaaggtgaaggaacactaggtgccaggatagcctggtcacatttaaattttagtggcaatcatttaaaatagtggatttctgaaattacacgtgcaaagaatcagccagaaaaataaaaacagaagtggaatatgttttaaaggctctggtatcatttctataaataaaatggacatatatagcatttatcacttcgggtgatattctgattgatttagaaagaatgactgcattgcttttcacattaagatgctcctttctaattttatttttaaaatggtgatttaggataaatctaggaacattttcttttattgcagcaaagacatttggctaattgtattatcaaaaccgtttgttttacctttcgcttttaatgtgctttctctaacaattaagggcgaactaaccagcatgaggattgtgtctgcttgattttaaaccatcctttcctgtctgtacacaggaaatcttatcaacaagagatgattctttatgccacagaagagtaaaacctgctgaaaacattcattttgaaagtttttcttatgtgggcatctttgcgatcatcagtaacaggggtggggcatattctgacatttccatttttgaggcaagcggtcttgaagtttttttctttcttggcttgagcttggtggtttatatttcctaaagtttgcatgtcctcagtgttttagtggagtctggaatttgctctccaccctgacctaataaacaatgcaagctgcagcacaacacaacttctctcttagtctgaagtgaagagtatatctctctcctaaggtgagcccttttgcccactcgccagtcatttagccaccacaggaaagagttttcctgctaggttatcacgtttgctctgagactgttaaaatcctgtatgaaatgaggcccatttttgcagaacatggtttttcattcctgtatttccttttcagcaaacaatgaatagcatcagtgagcttttaatcttataagcattgaagtgaagcgcattctttgttcctcagttgaaaatttgcatccctcaaatggatctgaagtactgtttatttaaacgagatttttcttactcttaatttaactaggcatacgaagatcttcagtaccccagaactttcaataatttactactaagggcaggagacaaactgtaatactggctactaaaagaaacgaaaagctagttcagcacacttactagtctctcataaaaagtaaaatatggctggtttccatgctgtccacagacatttcaaacatataacttctttaggctaaaataaatagcaagctcagaaatacagttttaaagtcctaaatgagccagcggttacaatgttttttgataagtaatgaatagtaatttattaagataaaatgtactttcttcaaaatattctgcatgcccactctgttgctgccctaacacattaccacatacttggggcttaaaacaacacaaatttatacttctgagtcaggagctcagaaatctagaatcaaggtgttggcagggctgctttccttcttgcggctctcatctctttgccttttgagcttctagtggctgcctgctttccctgtgcaccctctcatcactccagcctcttgcttccattgtcatacttcctactattcagtgtgatttcctgaacccctctcatcaggcccacctggacaattcaagacactctcttcatcttattatcattaccttaatgacatacgtaaatttccttttgtcatataaggtagcactcacagtttctgaggattaggatgcagacatgtttagggggtcgttattcagcttaacacacccactaaattccaggtattttgtgttatgctaggaaactgaaggtaaaagaaatgagtgagctcagtgcttagttgtctactccttgtactgtcagttatattttcagttattctgtaaatagtcccagaggtgctctctagcattctttcaggccttgacattggatagctagatgaggggtatatttaccaccatagaggaaatactgatttctaggattatattattttgtttatacttctaagagagtacaagcttcaaatcattcattcaacaactatttaagtatctgttctgtgataagcatgtacttggccctgaagatataccagtaagcaagctagaccaggtccctgcctctggggactttatagccaagttatgcttctcaaatccctttgttacgtaaacgttgtccaaccctatgtaaagttttgtacacatgagaactacctaggtctcatgaagatcttttaaaaccctgatttaaaatattttcagatttttgtttttggctttagtttcattcctattattacattttaggtgtcccaacttcaaatttttcatataatataggaaaaataatgattgaaacatttaaatgttcttctttacagatgtttcatttggatccttctttgactcatacaatatttaatccagaagtatttcaaccacagatggcactgccaacaggtaagaaaactcatccctgttaccctgttgttctgctttcagtcttagtaaaatgcaggatttgttaatagtctgtcctagaaactcagttgtgtacctagaaaggaaatggtgatttgttttaaaaaccaatcttttaacatactttcttgaaatatatttgcacaaaaatatttcatctcaattaccccttgtatggtttactgcatttcatatctgctaggactactcagaaggaatttctttagtcaacataaggattttctttattatctctgtattccttttaagtcctttctcccagattcacacgaggcagtctccactcttcatttctgtttcaaacatttaagagggcctgttgtgtactaccagtgtgccagtcactggggaatcaaagtgtacagaaatcataaaaatcatctcattagaaaaatcatctttataaaagcttataactttgcactctgacaagttggataaaactcataatccttccttctaccatgactgtattaattgtgccgattggcaactgtttaatttcgtaagagtaataaaaaaaaaactctctttcttaaaaaaagtgatttatttgtatgtaagcttggtgtgatggctctttttatgttctgtttctctcctcacttcacccgtcaccagtgggacttaacagatgttcaaaagcagtgtgagtgaattatggaagttatgtgtaaaacagagtttggtaatcgctgaaggaggcatcagctcttttatttaccagggacttgcttgtcttcattgggggactttatcccatttgtattattctcatttaaaattatcatggttactacagtacttacttttcttttgttttagatcagaaaactttttctgcatttatatctttagtatttctaggagttcatgggagggaaaaaagtagatctactatactttcaccttcactagtaaaggtgtatttcagaggtttttctgtctttacccctacaaaacattatttttaggctgccatgtctgagatcttgtgaagtgctgtccaatttgagctctaggtcagcttcctgtgaacaagtaaatgtgttggtagtgtgtgtgtttcttgggaactttttaattctggagttcaaagtatttttcttagtattaatgtattactgaaaatataagaacttggttctgtccacaggaaatacacacattttcacttaatgtcttgtgaatacaaaacagtatcctgaggcagacgttttcttaattttattccttcggatttatgggcatgaaaataagattatcaagataaccatctcagtaaatattctgtggtcacagctttatgttgtagaaattattttgccataatattagaaaaactattcaaattacacctaaaaatctaatttgttagttgttgttacaccatcatttttacctgtatgtttttccctcttcattgcagtgtcatagtacaatttttatagtccaagatatataggatgttgtattcaaatttttaaagaggtagagaggttgattatctaaaccaatattaacttgtaactctaaaatggattattttagtcttctagattttttgaaatctaaaacctttagtagatctagtacttgttgaagactatgggatgcgacataactcttaggtctaaagttaaatttctctgcacagtggaatgtccttttcatggcacagaaatgtggccaaaagaatgttggccttaaaacaacaaatacatgcatatcaaatctaattttctagttgatttaactttaatgtgttgcctgaaagaggaaaaatggctctattttacatgaattttcacatatttaaaggaaattaaatcctacaggaaaaataatagcaaatttgcagttgtttttagcagagttaataaaaagtgagagacttgaagtttaatgtaaacatgcttccaactcctctgtatttttcatgacatccaaatattgctctgttagaggactgtcttgatatgttctttcaccattttaacagggaatgtttttataagtgttacattgtcatacaggctgtatcttagtgtgaaaatatttctatttctaatcaattttatttccatatccaaaattaaattctagccatttggtgggggaatttttaaattatgattatgtttctaaaagtaatttaaaatgtccaggggtgaatttcatacagacaaaagatggtaatttaatacattgaccagtgactcccccttttttttcttgtgtatgcttcatttcagatgcattcatttttcaactcgcttccttgtaaatttcttgaataataacaggaagtaattatacccttgttttctccagttctctagccttatcctgatttatcataatattgaaaagataaaaataaattctctggccgggtgaggtggctcacgcctgtaatcccagcactttgggaggccaaggcaggtagatcacgagctcaggagttcaagaccagcctggccaagatggtgaaaccccgtctctactaaaaaaatacaaaaattagctgggcatggtggtaggcgcctgtaattccagctcctctggaggctgaggcagagaattgcttgaacccaggaagcagagattgtggtgagccgagattgtgccatggcactccagcctgggtgacagagtgagactctgtctcaaaaaaaaataaaaaaaattttgagaaaattctcttttgtgttatagtttatttttaatttcaacctgaaggtttatctccttacaaatttatttaaaataagaggtcttgagcttctttctgagagaaaatgaagattaaaatggacatacaagcattctcctaaaatatttttagcaccaaacatcttaatttacattcaaataaatgagaaccaccatatgcctttatttattgcaaagctatggattattgtactattgacataaaaatcagctgggaagcttaaggactttttcatattgaacagtttgtacttatgttgtcagagattctgattttcctttgaattttcaagtcagataccattagggtatggattaagcctctagttttctttgcgtttttacaataactaatttgcatgtacctatcttcaattaaattattttcagtattttataaaatgcctgagatgttttagaacacagtttatatgatagcacaatattcaaaattgcttataaacatcaaaagttatggattaatatgaaaattttaccatgtctgatagaccagattacattgggagtgtcggggaggaaaggggaaacaaactaaccagttaaggaatgaaggcagtactttcccttcaagtaaagacgggaacagaaaacctagtgtaaggaaaaagagatagcctgagatcattatctgtctatcagacgtatacatacaggttgctagatcagtatcttttaatttcacattaagcacactctctttgaggaaggaaagtcagtgtctaatgatgtgaaggccaaagaaaatgtcatagtgcccagaagtggttgctgcttttaattggtatttgtcattttaaaatgctttgttaggagacaagattatgaaggctgttgacatcaattcttgccggccatatgccttttattgggttaggaaatgtgccatcacctttcaacaaacatttacttattgtggttcgctaaactcgtaaaactattgttaaaataagggttaatttaatatttcagacaaggaagagaaattatatccttgtggaattttaaccaaaaattgatttgaaatttctacataaaaacataatttcagttttttacttgctttacgttttataccaaatttgagaagcctcacagtttcttttggtttctgtttgttgtttttgtttttagcagatggcccataccttcaaatattagagcaacctaaacaggtaagattaaaggggtgggactttaaatgttagattccagtgtctaatattgagatcataagcactgaagaatagtaaatgagttctatgaaggaagtagtttatctgaaagatcaacaacctgacaaattatgtaacagctttattcattcactttacatttctcttactcattgttcacactgtcctgagcctcagtatgtagttctgtaaaactgcagttaattacagtattagaattacagttaattacagtattctgctgtctctaccagcttaacttaccagccactcccaggaaaggcagaggtgatttccattcattttcatttataaggaaatacgtatgcatacagttcacatgcactgagcgatatccatctattatccttgcacatgtagtacctcttagccttcctccttcctttggtagccccagccttttctgtgctgcctttggaacatgtaacctaacatactgaaagtaccagtgggaagtaaaatgttagaatgaactattgaattctcttccctctggtgtcagcctctttggagtcaggagaggaacattttttcaggtgcttccccttaccactagagtctgtagagaatagctcagaactgaaatggcctcctcactgtatccaactctgtggatatttataggaaattggatgggaccaatgctgtgaaagagaaagaaaggcaatctttaatgtctgcctataggaggtttcagttattagggaatggaaataatggtgtagttccccacagaatgaggacagtcagtaaatctttggatggataaactaatcacatttgtgtgtgactgaggatatggatacctgtcctcttgcagctgtattacccaatacattttctaagtattcttttcattagctcaggtgagtgaaacacttttgcattttgtaacatttaacacatgctaactaggtcacaagcttaaataaagcatccactgcgttgtggtttccagaatcgtgacattatatatgtgttatatttggtcagcatttgatataaatgtcttaatgattgctgaacaggctatccttataaggttgaaattagatgaaagtttttgctgtgggggcaagaatgccacatgaaactttggggcatggttctagttcttgcaggtgtcacatcctgactcctcaggttgccagtaacactccattgctctacctccatgttcaactcttttaagcagttatttctcagagaaggtcatcaattcccagtgaaattttatcccttaaagttctgtgggctctggcatcctggaaaatttcccagcttttaagatctaggtagtctatgaaacagaaatcaactgaaatttgtctgcatatgccaaagtattttttccaatatcattttcataagcatagcactacaataagaatttttaaatgtaattccttattatggatccaacagttataaggaaaaattggcatttatgatttacctgaagggttaatgtagttccaaaattcaaaatttaattcatataaaagcttatgtgagtaaaacaatgtgtttaccaaagtgatgctattttgatatctgaattcagtgaaagtaagaaggttgtattcaagtcagactttctgactgaatggatgtagccttgcctttgaggttgatgactcattttaagcaaatggagttactgagatgagtgaatgtggattaaaggcaaaattttgatctcagaaatttagaatcagaaatgcatccagacaatgcatttgacgacatcttcctgaaaacagttgtaaattttcatcctcagattaaaaacttctgaggatttagatactcgtatgtaaccatgaaaaatatctattaagtattgtctatttgacaccactcccaataagatataaacacatacgtgtctatatttttccaactgtcccaaaggaattttgtgattaaagataatgaattgtgtgtgtgtggttttggggttttttttgttttttttttttaagttagaaaaagattcttttttctttgggacctcttagccacagattttccccagctctgacggagatgagtcatagcatagactactaatttttagaacatccagttctgttgcatattaatcagtgttaattaactaatactgttcaaaaactcaagttgtgtttaaattagcagtcaagtaaatctctattcttatggttagctaattctgcaggctattatacatgtgttgtttttttcatggttttagaaatttcatttaattatttaaaaaaccaacagtgtttgcttacaaaaggcatagggctgaaattgtaaattatttttaaatatgaattgtgtgagaaccaaaacaaaggaattacctctgaaacttcatctccaaaggcttcccttgtgtttagatctggaatctcccaaggaattgttttaggtctcactgtgatgagttgatcataaactttagacatttgtgtgcattaaggaaatttcccagaccggggaatttactttatgccttacttatctggtaaatgtgtttgaggactgatctttggaaatcaggaagtttttggataatataggaacagttccagatgcttcccagagatttaaatcagttcaaggcacctggactgctcagagactgcaagaccctacttggcataatgaaatgtagtatagtctaagtagtgcatacgttttacatttgttcatgagctcaaagctgtcaaaatctgcatgtttgctggggttccacaatttaatgagtaagggagtgaacccccaccagcagctagtgggtgtgatgagctgatgggcagatgatctagtgctgtatatgcagagttggtcccacaatagaaacaaaaggtgagaatgttccttaaaaaatcttaacgtattttcttttcaccaaaaagtgaatctgtaaaaagaaaatcatctgcttaagcgactatgtggttataaactactaacactaccacaaattgattgacatcattataaagttgaatcaggaaatacagcgaaacctcccttaatatgatgatgaggtcataattatccttgttttattctttgtatacaaatatgaataagttagctttataaatcataaaaagttagaactggagtagaccttaaagatggtctggtataatcttcccttttgtacaaatgaaaaaatatgacacttcttaggtgtttatcagcccacagtagtttatatagtgaaggcttccagctaacttcattaattaactatatctataaaatttctgggttagatagtatttaagggaactacctagttttggaatcattctggtaggttaatattcaatcttgagcttgaccatattaataatcataaaaacaaaaatcttatcctctgaaatgctgagagaagcttaacagatgcagggtctagcacagggtgtgttctacaacgctgaaacagtatatctaaataaacatgtctgtagtccctgctgaaccagctgtaatcagagtagataaaggaatgtctttaagtaagagtcaaggaagcataacttttattaatatggtacagttcagagcttggcagcagcaatttaagacaaggaagctctgactagaacaagccgtaacatgttaagtctaaagcctaaactcttcagcagattactctccacacatgcatagcatgagaggttccatgggcttaggtacctggctttttagccatatcttagtgtacaaatatcgattaataccatttttcgtagtaagattacgggaaaagtgattcttgtttacagagccctctttcagtttcatgtttttcttctctcatttagtagacataagatttaaaaatttgtatgtacctttgttgccgtaatttttaataagtatttctcaaacttaattggcttaacgttcacctttgcagagaggatttcgtttccgttatgtatgtgaaggcccatcccatggtggactacctggtgcctctagtgaaaagaacaagaagtcttaccctcaggtcaaagtaagtttgtggtagctctccttctatttgaattctggaaattttgatttcctacgatttccaaggaattgctttaaatgagtacgggttgccttcgctcctaagctgaagtgttcacatgattattaaaatttttaaatagaaatttgtctcctagcaatagaagtgacagatactaaaactttgttaacatttcaatttagtagaaatgtcttcagcattagctaacaaacttactatttcttgatcatcttaaatatttttaaaaattggatacttcctgaaactttagtaagtctttgaaagaaatggttgattttgactctttggagatttagtgaaaaaccaaacaagtgactgagtgtatggattatatagtatattatttaagattatgaatttggatccagactttgttattagctgtgtagctttgaataggtttaaccaatacttctaaacttcagtctcttaatgtataaaatacaaaaatattaatagtatatacttcataaggtcctttagagattaaatgagaaaatgtgtacatgttccatagagagcctgaaagtaccctagggccttggcctgagcagatgtgtggccctcttggaatgaactgctacgtgacatgctggtggtgtatttggtcataccttttaccatgttcaggctgtttgtttatttgagaatatttttctttaagttaatatgagacttttaatttcataatatgctatgtttcatagactgactgatgataaacatagactgataatcattttgcagataaacgcagtcaacaattgtaatttagttttttataaaagttattatttagtcagtaattcaaggcttggacaaaatagttctcactatgtgtgtgtgcccctcagggtgtaacatacttttggactcagtctttttattggtttgtttttgtaagtagatgaagctcagtagagcaggccctcagcaaagttgtgatgtaaagaaatctggccgggctcgttgactcatgtctgtaatcccagcactttgggaggccgaggctagcagatcacaaggtcaggagttcgagaccagcctggccaatatggtgaaaccccatctctactaaaaatacaaaaattagctgggtgtggtggtgtacacctgtagtcccagctagtcaggaggctgaggcacaagaatcgcttgaacctgggaagcggaggttgcagtgagccgagactgtgccactggactccatcctggacaacagagcgagactctgtctcaaaaaaaaaaaaaaaaaaaaaagaaagaaatcagtctttggttttgccagccttgcattttgtttcttccttttcctcttatccatcttctaggcccaggcctgttaaatttcttatccttattcccaaacaaaagacaaaatgttgtgacgtcgttctttacctttcaagtgaaactcacccattatttagtatgggtactactagtcatagttgcattttaagtctcttagctccaattgtggaatgaaagatgttttttctattaaaggtaattaggcgggtaaatatgatggcttaagtccacagaagcagaccacggtcttatggcctcacatcctttagaaccttgatgaggaatgaggagcagcaataaagaactaatttgcacttattaaacaccaaagacttgccaagtggtttgtataacattatctcttttaatctcttagaaatctcagtaggtaaaaagtgcaatgcctgtgaacccaaacagactcagagaatggaattataataactggcctttctcacaagactagtggctctatatcctgcagcaggctattgctcaccgaacctctcagatataatgtgtgcatttggggtactgggggcagggagataagggacaaattatgggcagacaatggtgtaaaaaggcatggtgaatgataactcttgaaaacaagggagagagaggctcactggtcaatgggtactcaggtattggggaagccaggcccagcacttacctttttaacacatgtgtctgtgtgtcacatgtataaatattgtgcctttatgtatgtgtatatttgtgagaaggggattgaaagacacatgttatcagcattgacactgactataatgactgaagaattaactttaagcgaaaaactgggagttttttctgactggcttggcacaaaaaatataaattatggtattttgtttacttctattgctctagtattttgtgactaagtaacaattcttgatactaacaaacacatggcattaactttcttataaatttattggctaagaaaaaactttatacatccatttattcccagtcttcatacatctttctcatgtagaggtttcatctactcaaaaacatattgctgcctcagtcacaaaataatttacaaatgaaacaacttagtgggcattagatgttcttgtagaatgaaagtttctatatcaaggagtttagtacttactgggaaatatagatatgtaaacgactaataataaagcaggttcaactacagtcacattatttcaccaaatcatttattttttattcactaattcagtatccatttattaagcatttaatcaacttgtaagaggaggaggaacttagaggttagagaatatgactatacaagctgtcattgttcccttagcttgtcattgttcactgaaaattgaaatggttctgctgttcctaacagttataggaagtaattttatttatccaagaaattcttaattggaaggatgggtaggagagaaagaaagagacaacggccaggtattttttttttccagagctcttctccaaatatcccttttaatagttatttctgctcaggatgacctttaagtttacaaaggaattttaaatccccttttcctctaatgtttaagcagaggaaaaaattgttctccatgcatctttctaatcaggaagacctttaaaattgtgcatgtcttttctgtggtactttactaagcacctgctcggcgagagactgtaagggaaacagtgggatagatacatctaaagtttctcaaacttggcattattgacatttggggcttgaaaattctgtgttgtgggaggctgtctgacacgttataaaatatttagcagcctccctgaccttgactcactagatgctaataggattcctataattgtgacatccaaaaagtctccacattgacaaatgtcccctggggggcaaaatcacccctctttgagaaccactgatgtggatgcaacaaagaatcaaccttaaccttacccatttgcatacttttctactataaagttgtctcgcatagattacgtagaatttccaagtgtattattttataaacgtgcctttcttggttattagtagatatttcttattttcaagatggtgatcatggtgtctgtataatttctgttagaatatcagagttagtgtacctggatactaaggagaaagatagaaaagataaaatatgtatcttcaacattttgtattctgtgatgaccctaaaagctaatgtgggagttctattgactgttataaactattacagaagaaaaagtgaaagtggagagttaggtccactgtgtgtgaacaatgggagggtctatggaatgatgctttcaggtgggcagaggcctcgtggagggtggccccacactcacccccagaatccagaagccattcccacaggaacttcagagggagagcatttacatttacaggaaagaaatgatacttctgagcctacatttgccacatattcattaagtgcatttgttcaggcattacagtaaaatgccatgggctgtgcttttcctcagctacagcctctctccctccaacctcacaccctgtcttcctgtcatgcctttgtgagagcgccaccactctgcggtgcctggagaggaacctggaaacgctgatagttcagtgcatactcggtcatatggagacagcaggaaagagtcaggggccaacttgaaagatttggggcctggctgtggtttgcaggctgtagacaccaaactatactttatagaacatgtgaaaatatagcctgtatgggttactctcttactgattgtctagatttgatgccttacattaaatcattttaaaaccaactctagaagtctactcaaatcctgcattttctagtggaatagtgtcccatgcataaaaccctgtttcgcataggtgtaggctagcttacagaccctcttaccatgttgagattatttctagaactcaggctactgaaccatctggtgctctgcctgtgtctttcacatagctaagaagaaaatttccatttagctttctgatatcttgctgtgcaagtcttcatgctctttttttaaaaaaaattttaattataaattctttcaagcatatagaaagtttaaaaattgacataacagacactatgtactacaacacaaatttaataggtattagcatcttaccttatttgcttttgatagctctctctctctctctctgtcctctctctctctcaaataaaatagttacagctaaaaccccacttatccatcactttgtcctccttccttctcttaggtaagctgctactctgaactttcactccccaagatgtttttatatttttactacataagaatgcatctataaatactggcattttcaagaaagttaatttttactaacttcaacccaaatttgccattgtataggatggctccttttcagggcaaacataggttcaaactggacgccattgaagattaactggtactcactttgatcctattgattcctctttgctgtctagataaaaatgtatttgtcacaatgtagtttgtactaactcttatagcaaaaaataatattcagagaaaaatctaggggaagtaagtatgcagactaactcttatatcttgtcctttcataagaaaaatttcccatcattaaacatttaataatctattatactgcctataaaatttccctttaaagttttttccattctaatttcatcacggagctcctaataggagaggctggcagaaaagcacaggaaccttcctctaggccaagcttgtccctgcctgcttttgactcagcaaggagtgccagggaaggctcacttccctatttttcccgaaagccacgcgtgaagttttaaaaatcaaactgtgttccctttcacagaggtgggtgacaagagaagcagccccatgggacttcagaaactctcaccaatcctcctctagagtgaccagaaagtaccccttcctatcctaactaatgtgacacgtccttctgtgtggtccactctatgcaaaaccagaaattgacaagaatgactttgattgtaaagtacaaatagcttaccagttagtattcttagtttctctttagttataaatatcaaatgcaagggacttgaaacccagctgatagaagtgtaactatttttaatcaaacattttctgaaagctggttctcacatatgttgtctttcctgagtgttttatgttgagtggaagacgtgttgaaatgtttaggtcaacaacagcttttttgttgtccccttccactactgatttaaaaaaaaaaaaaaaaggctccactcttcgtgcctttccttaaaaatcctaaatgttaagtttctgtcgaggtcgaatagagactacccgatctgctgtggcatttgaggatatcacatatccttgcataatctccctttcctttgtatagacttgtctgattcacgtggtttggatctatttggagtactaatttaaaataatttaacctgactcaattacttaaaacaacaggggagaaaatcaccaataatcagctatgtgtgcgtatagaacctagttcatatcatttattaggatttccattgaacccctaagctgttcactgcgcaagtatttaattagggaaaataaccatacccctatgtacattatactgtgtgttttgtaaaccatgagaaaagctgcttattgaacagaagggctttgtaacctggggtctatggatccctgttggtggtttcagacgctttttagattcctaaatttatatgcagacttacacatgtatgtatgtgcattttttcttgggagatgagtataactttttatcatattttcaaagggaaagatttaacatggttaagaatcatgctatagcttgtatcactttagctttttgatagcagctatctttttaaatgatctatgtaatattttttaagattttttctttttttattcttgcatttttaatcaattttaaatgaagtgaaatgctttatgttgctcaacacatagcccagaaagcctcccttcagttttccagtaggtggaaaaaagatgaaactgaattgatggccaaaagagttgaatgggcttcactgctttttctttcttgctcttccatacatttgcagattaagcatgaagctcaccattagtgattgaagccaaaagagagaaggcaattcattgaacaaatattgattgagcactgtgtgtcaggtactgctctagacaagcagacaaaactccctcccatatgtaaccacaattgagacttataggtaatttttgttgcaagtagttcagaagttttgtattttgtcctaaaacaaaatattactttgtaaaatatttttttaaatagccctctaaatccgctgtatatattcaaagtcactattataaagtggagaaagctactcattagagaaaacctatcacacagataatagctgggaagcttaacccttagaaattattaggagagatatacactccttgaatttaagaactgtctgaattttaaattttgttttgtcagttctggcttggtgaccttcctctattggccattcccatttttctgccctccactcttccttgacacatgattatttctgggaccactgttcaatccgaaacaaatctctggtggcttcttttaaacccagtggtctcagtctgaaggtatagtggggcaactctcggcattccattctggagtcttgacctcataaagtcacatattggcaattcgccttgataaggtcaagtgaacacacagaagcactaagatccccacatgtgttccactgcctcctccacagacaagttgtttttcaacccatctgcaggtccagaggtgaagctggaggctaccctgcagtctcagtcttttctccccaccctccagatggattccaaataagaagcctccagactaccttcacctccctggggtctcatggacatgggctggaaagtgcttgcagactttcacagacaatgctttttgcctttaggtccccttctacccaacagaatgattataataatggcttgatgtgcttacttacatcatctcatttaatcatcacagtaatccactgatgcaggttctgtgatccgcattttataaatgaggaaattgaagcctagagaaattaagaagcttaacttgggtctcacaggcttttagagatggagcccaagatttcagttcatgccatatggtttaagggcctgcactcttaaccatcgtggaataccattcattatcataatgttaaggatctgtttctactttgcaggaatcttttaaatctatggttcacaatcatgggtgggcttcagaatcgtccaaaaatgtttcaaccacagagacgcctgggaaccactgcacaattgctaaatcacagtgcatcatctagccaatcttggattctacaataattctatgacagtttctaagaatacatgccattatataatggcaacatattacaacagataattgaatagatattcaatgtataccgtggaatagaatattatgccactgtgttttaaaaagataattaagaggatacggcacaacgtggaaaactgcttataacataatattaaggataaacctcagctgggcatagtggctcacgcctataatcccaacacttttgggaggccaaggcaggaggattgcttgagcccaggattttgaggccagcatgggcaacatagtgagaccctgtctctataaaaaaaattttttaaagaaaaaaaacaggatttcaaattattgctaatatttgtagtgattacaaatattagcttctttttataaagcctgggtggaagcatatagatgtatctttagctttatttattcatccatgacttaaagaagattggttaacacctgactccaccttgagtagcagaacattggactgaaggaaaaaaaaaaatgtgaagctgtcttacttagctacagtttccagcatgttttctcaggagctctatgggagacagtgcagtgtggctctcaaaccttactacccataaaaatctgcttcaaaacctacttaaaatatcgattttattccatttccaaagcctggtagagtaggtaattctcccactacaatacacttagtaacactagaaaaaaaatataacattttctttaatgcatagctgagtttattagaaagtatgaaaactactggggcgccgtaagacaaaagaaaactttgggaaaacacaataggatatgggtggactttggggccacagctgccctggaaatatttgctgacctagataatcaagaagcttggtttttaacagcttcctagagacaaaagataaggccttgggcctttccaatctgaggaattgaaactgcaatcacccacttaattcaggactctctcagggctatagtttctgttgatgggtgatcctcaggcagagaggtgatgaggaagttgcctgtctcagcctagggggaatcagaagataaaatgcctctcttgagaatcaataactacaagcccaattcttacagattcagagttaagtgtatgctccctgaatagagtaggaaaccccaagtctagaaatgaatatgaagttgttccacattggggataccctcagagccttgcagaaaagcataaaaatgtatgtggctcaaagaatcatgagctcctgatcaaaaattagaaaatatgtatgcaaataagccactctgtttaagaactggcagaacaatgaaaagcagaattaaatcctcagaatcttcagataattgaattaccaattgtttgatatataaatacaaaataagtttggaatagaaaacagaccaggcagaatgaaaataaaaccaagtcgaatttttaaaattaaatgtgcgacactgaaaatgattcaacatagttaacatggataatttgaaagaaaggatgagctggcaggtacaaaagaaggagtaagaggtgtctagttgaagtcctagaaagaagtattacaactgcagatttctggctctacatttacagtttctaggtctggggtgaggtttaggtggttgtggaccacacttttaggttttaaagcattggctctgaagtcatttggttcagggctgggcatgatgttggttcctagttttgcgacttgcagtgttacttaacttggctaagcatcagcttccttatctatgaaactgaaaaaataatacctatgtcataggatatatgtgtaaatcaagttattcagtacatgccacacagtaagcacttaaaaatgacagttgcttctatttttatataaccaaatacactactacaaatattgagtggcagctttgctggttcatttatggattcatggagctacacaaaaccttcaccagtctattaatttatttttagtacagtctctctaatcagtattgcttccactgtatattgaccccatatcctttcttctgtctggggttaagataggagactgagatcagctgtgtcaaaagctttcttttagatgtaacacatgatttcttatgaaaatctcataggtaggataccagaaaggaatttattaaattcttgttaggctccttagttgtattagttttgtagggcagtgttttaatttaggatacttatgatagagagcaccccttccataatcaggagaaacacaagatggaaataaagattttattacttagtggtcctggggagcacacagcactccagggaaggccacacaccaagatcagggagcatgtggagaaagagagagaaaggaactcacgggccattgcctttactgggtccaggacattatccaaacaggtttcccacagggagttttaataggtgggtttcaagcaagcaggtatgagttccaggaggtcacagtgtgatgaagaagaagtcactgtggcatatctgcacagtccatgcgaggtgtgagcatcagtgaagaccagtcaggtaggctatatgtagctggcccatggggaggcgatcaccaggtggcaattgtataatgcagatatctagattggccacatagaggaaccgggaggaggtgtagtactggaaactgcgtcgacggtcactgagccctgctttaggtatgagaaagtccagcttatattcagaatggatgcaaaggcagcataaaattaaaagcattcactgccagctgccataacaagttaccacaaactaggtggtttaaagcaaccgaaatttattctttcacagttctggatgctagaagtccaatatcatggtcttcgcagggccgtgccccctttgaaggctctaggcaataatccttccttgcctgtttctagcttcttgtggttgctgacaattcatggcagtttgtgacttgcagctgcatcattccaatttctgtctccatcttcacatgaatactgtcttctctctgtgtccctgtgtccaaatctccctcttctttctcttagagacctgtcattgtgtttacggcatccataaccctatgtgacctcatcttaactaatcataattgcaacgaccccatttccagataatacaatattctgaggctctgggtagatgtgaattctgggggtacaccattcagcccactacaaacatattgtggcattgaggttataagccagtagccctacaagtataggatgatgcccatttcagcctgataatacactccgaaagagatcacatggtaacattgttgcctcagttaatcatagaaatactcaattagtatagaaataacaagaaaaatgctttgttattctcatgtgtcatttatcgagttcttactatgtatctgttattgttatccttatacacttctgcacaaaagatggttttatcccaagttttagcttagaaactgaggcttaatgagtaacttgaccaagaatggcttctctttctccatttccttcctctcatggtgttgttttatatacataaaataatatatattattctattaatatagattaatatatgtatttatatatgtacattttatatatgtataaaacttatgttgtaagttttatatacatataatatatattctgtttatatattgaatttatatatatataaaacttaacactattaagtcttaacactattaagtttcatggtgttgagttatatagttctattaattatatatatatggggggaggggtgtttctccagcctagacttccactttgaaatgtagtctccaggctcagccacttgtttgacattgccacttggatgtctggtagacttaacatattcacaactgaatttcaaatcttccccaccaatctgctctgcctcatagcttcccctttccggaatgtggttgctccatccttccagttgtacaggccccaaatcttggagttttccttgactcctctcttcttctcaaatcccacatgtaatccatcaggtagtcttattggctgtgccttcacacttttttcagaaactaattattcttcagcacctccaatgctgccaccctggtataagctaccatcctcagcatctttcttccagtggattttagcatccatgaatgattatttcctaaatcaattatcaataattgttataaatttgtgatttttctatttctatccttcctgtcacttttcctggtttttttaaaagagctttcttcattcttctttaaaaaaaattaaaattaacatcagtatgaactcgtggattcttttgttattcattgtactataagccattcctgtcattattcattttgattcttaaattgtcctattcttggccagtgggagtctttcatgctagctcctatgtctttttgatatgtccctatcttttttttcctaacactttccttatttctgaaattataagctattctaggttcaccctataccttcactaccccagtccaggcatcgtctgtctctctaagaagtcctagttccttttagcaggagaagtttttctagactctttcattaggcagagctacaaaattgattattttaaaaatctcgagttcatacactaattcataattctaattccaatccaacactgcaggcttcttccctccctcccctcatcccatacttgtatttggatttgagatatgaaatgtgtatctcatatcccatatttcttcagtaactgaaaaccctcatcatcaatgatagcagcatgcttactcattttgctcagtccaataattcacacacatttgtagaaaaatagaatagttttagaatggctataccaatatctgcaagcttactatattcggttcaaaatttctttgtagttcttttgaccaaatgtattcaacagagagcattcagtcagagtaatgtgtacaaaagttacttggattaaattttttccttctgtgtatttatgtttccattgagctatagagttaagctatttttttatttctattccattttaggggttttcccatccctgttgatttagtaattttattttttgaatatcaacatttgtcagtttcacatctttcatttatatgagattaactagaccctttagaaatcattataaagtcaggttgttctattaatttttaaaataggtgtataaaaaccaaagggatcaatcagagccttgatttaaagtacgttctgaattatttcagacacccgaatccatctaaacccagaacatttcatttgtagatttcaaagacttcttggccttcctaccttccttacatttatgtagcatgtgtttatccaaggcacaccacctgccaggcacagtgctgggctctgtgttgacacacatgaatgtgatcatctttctgtagcccccaggttacatggcaccacagccaagatacagacatgtgtgagagagtaatcagggtattactcaggatttgctggaggaatccctcttcaaaggatattctaaattggtgtgtgtgtgtgtgtgtgcgcgcgcgcgcgcatgtgtgtgtgtgtgtgtgttgaggtggactgggagaaaatataccctccttgagatcacctcctggctagatagtctctcccttctctgtttgtgatagaatgcaagtggaatttgacaggtgtacttctcaaactagaaactagagagctgctatctcagtcaccgtaagaagaacgaatcacaccaaacctacatcattgtcttctatgacaggatttctacaagggtgagatagtgagatgctggagatccctgttttggtagttcagggattcacagcatctcccatgctggtgatgtcaacctgaagagatatttctagtgataggttccagggatctttcaccgaacactttaatatattttatcattgtcctgaatacagccctataaggttcttactaaatttgcaggtgacatgaagtgatagacaacaaacaatttgaattcaaattaattttgaaagctgagacaatggacccaattcttcagcaattatatttaaaagatataaatacatgcagaaaacaaattacaagtacagagtggaagagagatgatttagcagcaacgcatgcaaagagatctaggagttttagttaataacagactcaacatgaaccagcaatgcaatgtgactacgaaacaagtaattcctcattaggctgcattaatggaaacacgatacataagaccaaggaagtggtggtctcatttgcactctgtgatgaaaggccacaccaggaatacagtgtagtactgctgggcaccacatttgtagagaaatagaaaccaacttgagtgtcttcagagcagaatggtgagagaactcaaacttcattcaaatgaggagtagttactgagcctgagaaatttatagcctggaggatttggttgtcttcaaatatatgaatggctgtgatggggaaaaaaggattaaatgtgtcctgttgtcacaagaggatgaaataaggagcggtgaatggaagccccaggcgatagaggtttcagttgctgctgacagtcagggctgtctgaggatggaatgtattgcctcaggacaaagtgagttcattgtcactgaattggttcaaaaatgaccaggaagactacagggcagggaagctaacttgtattacaataagtaatttttttcttttttatttgtatgcccttagaaagatgtttacttaacttgataaatctgtaacaagggataatcaagatttggttataggacaattacaattttctgacagatcccccaaaataatagaaattaatagcttacacactactttatccaagctgtagaatgtataacttacttcatatactttgtgtttagtcagtttatacaggctgaacaacataaagttaagacataaaagggttttttttgcaggtttaaagtactaccatttttccaaattactggctgatcctagaactttgagaaactttggtgtttccccccttcctacttttgtttacatcatagtacgtagatggtacaatattttggttaacctcagtctgacacttagattgtgttctcttttgccctattaatgtctagagtgtaaaaagaccagtaaagtagcaccaagaaatcaaagaaaatttcccagttctactcacttgtaattctcttaatttagtaggggctttccacaggaaatcacaatagaatagttgaaatgctctttatcttatgtactttccttctgaagaaagggacagttaattggctttgttcccaacatggtccaaatttttatacagggcagctgtatttactgtagtacaaaggagattctacaccgaatgatgtctctaagtattttcaataattaagaacctaattgcttctctagccagtgggtttcagtgaaagtgataaaatagattttctaagcaagaaaaatacataatgagggtggttgtatacctttaagaaaaaagaaatcagtgatattcaatcccaagtaaatttggatatcacagagtcagagatattcttaattattttaaattaaatttgagtcaaaaacaatgtgtttaaagactttaaaatcattttaaaagaatgttagaaatttacattaataatttctattttcaatgaataaatgagaaacctagaatttttgttttggacacactttgatcatatctaatgtgttctacttcctctaattatttttatgttattaggatttttaaaaaacctcttagattaaaatttctcagtgtatctttgtttgcgtgtctttttttctctctccacttatgtaattgaagcatttctgacatatcctcagaacacacagattcttatcaggacttaactacccagggcagggccctccttggatttactgaaaataaacactttgggtactcagtctcagttttaatgacaaaagttgaaatctttgcctaacatgaaggtttttctttgtctctaaattttgattttccatgctatcagaggtcccattgcaacaggtaatttgagtgttgattgtatgttttctcagtttgtaattgtggtgaaatgtatttaaaatgttcacaattttaaagttaagtttacctataaggttctttccaactcagaaattctgtgatggtaaactttttttttgtagtttgaaaatgtgatctttggatgttgtcttctgtgtcctatgcatatgactaggaatcatagaattttagagctggaaaatgagtgagacattatctagtgattctgcaaatgaagaattaaaaggcccaaagaggttaggtgactcacgcagtatcatagcagtacctggtgactagaactctggccacctactgcagcactaaaaattaacccaaatgtttttatctgaaaatttgcagacttcaggctaggcctgtaaataaataaataagaagttaaaacatatttgagaaaggtaagcttaatatgccacatttgggaaaagatgtgcctgacacaaatgtatttggtgtaatagagaacattcttccattataccgaaatgaaaattttgaacattctcaaaattcttgaattttgagacatttatgttaagcacagtttattcagactctctataaactgtgctgtcatccctgttgttttctccaagcggaatcatacttaaattacaactttagggagtttaatgtttcctatttttgcactcctgggatatttttcagtgactcagaagcataaactgacactgtgaagttaaggctgtgttccagtgggaatgacagcatgtctctaggacgctgatggagaaagccctcctcatgcagctgtcttgcggagtctccctgctggtggtgaatgtgagatcacacagggccagcagccagggcagtacatctctgagtctcgcttctggttttacctagagccaacccttggtgattgtttgcctccttggccaagcccccacacaataggaaaactgtgtctcaaggtcgaattctattaatacctgagaggtgaatttataaacatttaagatgttttagcatctctgcagccagtgtctctgtaaatgaaaattgcttctcgaagtagaaaagcataagggagtacaagggcttcaaaaaaaaatccttttaggaataagaatattgccagggttaggtgttcctaactggtttcaagcagaggagttagtaaaattccaaaagttaatcagcttcatgtactcaacttttgctaggactttgcagaaactcctcagggatccctcagagttagattagggagatgaaccctgccaaaggacagtaaccattcaacagctggatagcctgttgggccccactgtcctcagcctttcctaatgttgcctgggaacaccacttttctgctccctcctttttcagtgtagcctggagacaattatttatttattcactagctcttttaacaaatattgattaagtaggtactggttctgttctaggggttggaaaaacagagaaaattaaatagtgcctttgtcctcaggaaacaatccatttaatagagagacgaagatatgcccttaaatacctgaatcaccagcataaccagcacctgcggctgccatgtgggaattgttgaacaagataatttttgaatgaaagagtaaatgacctaattgctctaatgtaaagataaatttctaagagtcggctagttgggatgattatagaaggattcaagggagagatgtatgaaagcatagatctaacgagagaaaacagcacagcagaaaaagcagcaaaggctcaaaagtagaaatctctgagatcgaatggagaatagtaaataatttgctggaatgaagagcacgtggaaggcaagggtggtaagaaggctggagatagtagataaggccaaatcatgcaaggatttaaactgtatgtttttagaaaatgggtaagctatagaaattttatataggaatgagaaattatcagcagcattgtgctttaggactacaaatctggtagcaatctgctaactgatattggaagggaaaggcccagagacactagttggaagaattgcagtgattcttcatgagctaaactaagagttcaagctaagatagataaactaaggaatgagaatggaagaaagggacaaactgagatttttggggtggtactcagctgaagtttggcaactggttaaacataaaagacaagagacagagaggaatccaagatgaaaagacgattttgctgcacttttttagaaggcagcatttgtatttccatttccaggaggtggagtagctttgagaagaaaggtgattagttcagttttgggcacattgagctgtaacggtattatggacaggaagataccctacaaacagctggaaattttgcacatgcttaaaaagaagatgagaacatgagatttcaatttagccatcatctgcatggagtagacaattcaatccaggagacttgataagaatgtcaagggagtgatcacgataaaggtgagaaatggactgagcatcgatctctgctgaaacatctctttgagcaggaagaagagtgccttagcaaaagcagccagtgaaatggggagttgggggagactttcaaggagggaatggtaacatatcccattcccaaagaggtcaagtagggttgaggaataataaatggctagtgggtttggaaacatggaatctgtcatgacctttacacactttttcatttgatggatcgggggattacttacatttgcaaagggcctcagattaagtggtaatggttcagcattagtaattagagattttcttatgtactttgtagggagaaatagaatggcattcaaacaggtttaagttcctcttaagaacctttctcattggattgtagagaagagcaaatgaaagaatcgttcagtatttcttggtatcatgcccagcccataggtttcaattaatgttaacctttacagttgtcatcatcattatccagaaggggcttttttttagaataaggaagaaaagcagtgctcatctgtagacaagggaaaaaatcctttggaagagagaaagagaagggtaattcaagaagatcaggaataaacattaagggtaaaaacagaatggttagccctggaaaagggaacaaacatgtttctctgaattaggagaggatatgtgaagtaacagggatgttttgagcctcagtaacagtaaggagaagagagagtgaaggaacttgcacgcagtgacttctaccttctcattaaagtcaagagagaatctcaactgcagatatctgcttaaggtaggaagagagaaataagaattgctgtcatttattttgtggttttgatatagcaaaaactgtactagacactttacctcctttaatcctcagaaaacttagagattatatatttgtattcacattctacaaatgagaaagcaagtaaaaaagttaagtaactctcccagagtcccccagatggtcatgggagcccagattcagagccagctatgtcttactccaaagcctgtgctctttattgaaacatactccactagtttgagatcttggaggtgtacccctgcactactatcaggactacccctgataaagtcctgtggggtagttgttcctatccatcaccacagtgaatatcaaagaagggccctctcatttgaggaataacagacagtgaaattgagatggaccagaaatgcaaatcctggatccctgagggaaacaacaaaatgaagcatagaggaaatatctgagtctggtgccaagactcatcagtacaagagagaatgcctaatgggcaatagcagttagggtgggaaaagagaagtacaagggggtgtcttggaatttgagggaagaactgctgccttagttttcgaaggatgattattcgagagttgccctcccttcactttctcacagctggcagaattcctacctcttagtggttagattcctttttaccagatactgtagggccagtgcagcaaccagagcccccagccagaaaccctgcctccaatttagaccagtgttctgctctggtgtgtaataatcatattctaatttaaatagcctattgagatgctacattgatatctagccttttttttttttttttttacttttaagttttatgtgcaggatgtgcaggtttgttacataggtagacgtgtcatgggggtttgttgtactgattatttcatcactcaggtattaagcctaatatctgttagttctttttcctggtcctgtctgtcctcccaccctccaccctttgataggccccagtgtgtgttgtttccctctatgtggcaatgtgttctcatcatttagctcccacttataagtgagaatatgcagtatctgtaataatgggttttctgttctcgtgttagtttgctaaggataatgacctccagctccatccatgtccctgcaaaggacatgatcttgttctttttcatttctgcatagtattcaattggccattttttaaaagacaaaataacaaaaaaaagagtacagttatctccactcctcacccactacctgccacctaacccaaccctttatattttagtaattgccttccataaataacattttatcctgtcttaattatgcattcattagtgtattaattattgaatgcccacaatatgacaagcattatttcaagcactgaggatacagcagagaataaatcaatatcctcactgtttttattccatttttttaagagacagggtctcaccctgttgcccaggctggagtgcagtggtgcgatcatagcccaatgccaccttgaacttctgggctcaaaggacactcctacctcagtctcccaagtagccggaactacaggtgcacactaccacacccagcttccccactctgagcctccatcctaatggagaagagaggcagtaatcaaaatacatgaaatgtgtagttattagatggttattaatgtatagagaaaaattaagcagagaaaggagcaagggattagggggtcaaagttttggtaggggtagagtggtcagtgaaggccaccttgagagatggcaattatgtaaagcctgaaagcaggtaagaaatatacaggtatacagatgtccctggaaagagtgttctaggcagaagaaatagaaagtgcaaaagctaagattgctcacctggcaagttcaagaacagtgagaaactgatgtggctgcataggagtaagaagaaaaaggacggagaggacatgagatggtcagatagcctagggccttgtaagccattataacgattttgtcttttaatatagagaaatattaaaggtttttgttttaactttttaacatagaaaaatgtaatcatatacaaacacagaatagtataatgagcccccttgcactaatcactcagctttaacagctttcactttgggaggattttgagtgaaggagtgataagacatggcatggcatgacatggcttgaacaggatcactcaggaaaataagccatggggagacaggacaagcagaggaaacacaggagcaaaagcttaggagacagatgatggtggctggaaaccaagggagtagcagtgaaggtggtgagaagtgatcagatagaggatatttttttgaagatttgaattaatattatatatattatactttaaagaagaatttgaaaatgcatgtagtgtagtaaagatggtaagaaatacagaaaagaggccaggcacagtggctcatgccagtaatcctagcactttaggaggcttaggtgggaagctcccttgaggccatgagttcaaggccagcccgggcaacatagtgagactctgtctatatggaaaaaaaaattaaccaggtgtggtggcatgcacctgtagtcctagctacctaggaggctgaggcaggaagattgcctgagccaggaggttgagtcttcagtgagccatgatcataccactgtactccagcctgaatggcagagcaagaccctgtccctttaaaaaaaaaaaaaaagaaagaaagaaaaagaaatataagaaatggcactagaatatcagtattatatacattattttctgtttaaaaatccacacaactggcaaaaaaaagtgacatacatgaacatttataagacagtgcatttataaattacaaactctctgctcctcccatattattttgcagtgatgaatgattaggccatccaaacgtaaagatttatttgtaatttgctaatgatggaatgacaccttttgaggtacaagttcccagcaattcttggaattagcaatagtgtgttacttctttctcgaaagaagcatgatttgtaagcagctatatctgatgtagtaaaactgaaagttaaaataaaaaaggaaaccgtgggtcaaagtatgagggaaaagataaaactttcagagcaaagttatacatagagattttattcatcgtctctgtgtaactcacgagaacttcttagcttatttattatgtcaaatggcagtttgctcttctaatcccagcctgatatcatgagccatatatgctgttggtcattcaaaaagggcactaaacaaggtgaaagaatgtcagtgaatcaatgcaactccatgagtactaccaggaaaagaaaaacaaaaaaacatgccattaatagtgggtcaaagaggatttttttcatgccatcccctaccttactgagaataccacatttatattcagaagactcataatgaattccagagtcctctgtgtcttggctgtatgactttgggttatgtcactttgttaatctgtttgaacttctgttttcttatctacaaaataggggtaatagagtcaactctgcctccctcacagggactttcggaggcccaagggtctttacaaataatagagaaggaaagaaactggcactttaatagtacctaccatgtaccagggactgcgtagtccccacggcagccctctgaagtcatgtgattggcccattgtgtagatgtagagcttaagactcagagaggttatttaatctgtgtaaggccacagagctaggagggggaaaagctgggattggatcactgactagatcaacttgaaatctcctgcctgacagagaaagaagagactaactttactaagcatctttttatgccagaaactgtgttggacataattctgtactatcttatttggtaaaggtcattctgtccttcctggttgccctggttgctcaacaagtaataaacaataaagcctgactgtttttcatccctgagagaagaaatattattaaaatagcgttattctctttctttctttccttttttttttttttgtgtgtgtgtgtgtgtgcgcctgataatctgacttgcaacctcacagaaaagaatgaatgcatggtttcatgtctgtggcatgactctgtgaaggagccttgcaaggggacagatacacctctaccacttcttatagccattcctgagacctctcttctcacaacacataccagcaaagccaaacaaacaaggtgtttaggaataactgtcatctatcaacactctctaggcaaagtagaactatgaaacactgaggagactgcacacacacagaagaaaaaatgatcatgtcacatggtagcacagagcaatgggaaatgtgaatagtttgttgaggtggacagacccaagctcaaggattgcctgatcgctccatttataggaaccatggcaacctaccttatcttactgagcctcagttcctccagctgtgaaatggggtacaacctctgaccccacagggctgttgtggggattatctgagttagcatgttccataaaacacagtaagttagaaagtatagctgtataggctctgggagtttaacaagcaagagaaatttgacagtaatcatttagttactgaaccctgtcttcatattgcgctaggttgcatatggttttcctgcctgtcccttccaatcacatttcagaaaaaaggaggcagtagtggagccttgtgggctaaagtggtgaggagggtgtcatggaagattcaggttcaggtcttcctcttgaagaatgggtgcttctcaatagggaagtggaggaacaacctgggagttgtcagcttgaagaaaatcctgagacgtgataatgggtaggtccaaggaggtcctgagtaggactctgagcacagagcctttctttgcatgtgctgtttttcctgccagcaagaccctctaaaccctttggcctcacccacccccttgcctggttatactcctagccttctttcagatctccaccctcagtactccctcaggaagctttccctgacctcctgacccagtcaagtgcttcttatatatctcctttgtaagctcttctcagttacacttttacatttatttgtgagattatttgattagtgtcagtcccactctttaattctccacaagaacagagattgtgtctgttctgcattcaccatgcatcgcttcatcccctagtttactgcagtgtgtggaacataggacgggctttaaatactcgctgaataaatagagaaatgttggttattagtgaggtattacctaggtgggagagaggatttatatttgggattgctaatcccattaagtgccaagcactgcattaactcatttaatcctaaaaaaaagtcctatgaaatcaagtgtattattccttttaactttaaagacagagaaactgaaatccagagatgttaaccatctttccccgttgacacagctaagtggtaacagtcggtcttgagccgggcagcctggcttcagacttcctagactttaccacattgttctgctgcttagtgcagtagaggacaaagtgaggtgcacacgtgaagtcaggacagatttccgtttgaaaattgtgtattttcccctcctcttcttcattaccattgtcatcatcatcatcatcaatcacttcacaagcaaagctaagcagaaaagaactacttcatgtatcacctcttacattcatgttaactctacattctgccaaagtgatttggctgaatttacccaaagagcaaagtggacatttcaaatcctgattcctagaaaattatagactacatcctgtaaccacctttgaagaaccagcatgtactttaccccaacgtgacaaaattgttttaaataaaaagaggtaatttgactaagattggtatgatctgagacccatggtttctacatcttattcaaaaagcagatccagcatgtggtcatcagtaggtattgagtcataaagctcctggaagaaaatcttaagtttcatcaagaatgccaagaagtcctgggtgtctccaagaatgatagctgttactataataacataattactactggaaaattagcaaagcccaataaaatatggcatgcaaaaaaatatttaccctggaaatagaagtgacctaaatcagtcgtttattccagccacctgcttttagatagtacttaaaaaaaaaactttcaggatggtcatattgtttaaagttctctaggtggaagagtactttacagtaataaattaataaataagacaagttaatgcttttaaactactattatttgttgagcattgttgtaaaggctttacatgcattaatgtatttagtcctcacaacaaccctttgagatactattatcatcatctcccttttacagatggggaaactgagcagtgcccaaagtcacacaaccaggaaatggggaactatcttcaagcccagctggtttgcgcctaaagtccatgctcttacagtgtccctgggtagctgagtactcagttttgtcacctttgtctccttgactttaactgaaagcttaactctttttttttttttttttttttaaacggagtcttgctctgtcacccaggctggaggggcagtgtcttgatcttggctcactgcaacctccacctcctgggttcaagtgattctcctgccgcctgccgaatagctgggattacaggtgcacaccaccatgcccggctaatattttgtatttttagtaaagacagggcttcaccatgttggccaggctggtctcaaactcctgacctcaggtgatctacccgtctcggcctcccaaagtgctgggattacaggcatgagccaccacgcccggcccgaaagcttaactcttaataagagcctgcaatgttcagacgctttgaaaaaaacctaacagacacagttgctctctataaacttaattttcaaaggaaccactattcaaagaagtaaaagggagactgaataaaaagaactaagttctccgtagagcaaatgaatttctgaatcgattgcaaacagttctccgtcatcatgacatcctatgaagtatggtctcccccatgttagagtgccagtgtcttcatgtaccatataacttgcaaatagtatcactgtcttctcacacttcagctttcttctttcatcagtattttggaaagtccacaaaacccagggggctccctgtctgttgccctgtggtctctgtgaaaaccagatgatgcgatgctgacttggactctttcaaatggatccaacagcacatgagtcactggcagcatgttcagctcctttacctcaggaattacccagttcctcattcttgccacccttcagccgtgaagtagtaatatgaaaaatacatgagtactttttgaggatacctcggacctctttccttcagtaccagagactaattgcctcataatggtaacattgaagagcccagttatctgacgtgattgggctttaattatggattccttctggtgtcctattaaattggaaagcctagctgatttcacccaaatgaagcattacctcatgccttgctctcttgcattcctgtgctggtgtcacttaaaagtgtaattacatggtttatttcgtgttctttcactcttgatttattgctgaagaagcccctgtgggatatatcatcataacaaagactgatttcagatgtcaacaccaagaaacacaactggcatcagcaatctatagagagtatctagggacagcagtcagctttggagaaaacccagaacttctcattccccatcccacatttaagggcaaagactttctccttgttaaagggaaagcactgagttcataattagctttatacccagagttttttttttttaaatgttatacctgtttaagaaattttttgtgctttgaggtggtcaagatcaaatttaattagcaaccctcttcgtgattggcttgctctggggaccctgctctttgagaaggaggttagaaggtttagaagcaaacctttgcagcagttctagccaagtgcatgcatacaggccttgaggtggagctgcacagttgactgtaggggagtctgtcctttgttgacgagtgaaacttctctccctgcaaaccctctggggaataatgccaactctgatcagcttttcgactcttggatgaaatattgggttgggaaaaagtccctactaagaaaattgtaccaaaaccctgcttcaataaaatatgaatccatttaatgaagtttatagtagaagtaggctagtcgaaaaggattctgtctctttccaagtattattggcaggtttagggtcttcctcaagtttatatcattaggacttccatcaaagagttatctttaggtgtgattcccatcctccctccctctctccctccctccctccgtcccatcgttccttcctccctttcctccttccttttctacctttctttttctctctgtctctctttctttcaagctgtgggctgcttgtacagatttatgcattttgaattactgcatagttgagagatttggggcttaggttattcagttcttcaaaaagtacagtatgagctaaggagatagggtgaccaactaatctaggttttggctccaaaaaccctgtgtcccagaaaacccctcagtcctaggcaaaccaggatagtagttcatcttgtgaggagattatagtgcatttccaagtatttagctgaatttatcacagggctctgacttgataggatttaagagggttaaaataaggtcttttctgttatgttagtgtgactttagtcttggcactttctcaaggaaggaatccagtctactacaggggctaggtgactaaggagaagaaagaggatatctaagtgttttttgctaaaaatgtcattatctccatgctatttcctttttattgctattgtcatcattttaaagacataccaataagaaataaattactttaaatagaaaactctaattttatcaagcaacagcaaacaggggtgaaatctaaggatttgtacttaaggagtacacttttttgaattgaagaaacttactatgacctgagcatatgtaactcaattatcagaagtcagagagggctactgaaggctcaggttttctaagagatgactggaggccaagtcctcaggcttgagtgtttatagccaaacttcagaaccaggtccctggcaagattctcctgtctaatcacatggcacagagttaggatggactgtttctgcttacctgccttcttcctttgatttccatcaaccaccagtttctttctcatcaatcatttacccagcttttgtgaccaagaattttgatgaggatgcagaggaaggcatgttcttggttaataggaaaggaggcttcatgacaacacagcatcctctaagatgtgttgctccaactttcacaatacatattgtgttttaagtggcctgcttcttggagtgtatcttcccactacacaaaacaaccaccattaacattttcatttacttccaccctgtcatttgttcatcacatacttttaaaaacagggctgtaatcatgtatatacatatatgaataactttatattgtactttttatacttactggcttatcataaacatgtttccatgttgctggagagtcagatatgctaacttttggaatgtgcttcttatatagatctgcaactatgtgggaccagcaaaggttattgttcagttggtcacaaatggaaaaaatatccacctgcatgcccacagcctggtgggaaaacactgtgaggatgggatctgcactgtaactgctggacccaaggacatggtggtcgggtaagtaggggtatatgatgctgtggaaggtaggaacagatagaatatgggatgcaggaacttagaatgaacaggcccctttcattagggacctttctgagaccctcagatgacctcaaaaaactgtgtaaacttgtgctttcatttggactccaggaagtaaggtgaccacatgtctggatttgcttgagacagcccagtttgcccctgacctaattgtttatagcaccctcttctactcttaaaggtggcccaatttggatgatcacttatatgtggtcacttgacctacaaggtatttgtgccactattaattttttttctcctagaaataaaaataaggacaaatttaaagaaacataactatagcagaaatcatcactttatgtatatttttacattcttgatgatttcttcagtggatttatggtgtgaatatgtagggctttaagtgaatgcataaatatcatttcagctctctgctgcttagaaagtaatgcacagataagaagccaaggaatgcaaatttattttggcattcattaggcttgaaatgtaaataaaaaatgacgtattcatttaagggttgatcaaataaaacaagcaatttttaatgaatgaagttttatagaagtaatttcaatccaaaagaattaagcttttaaataagacatatttattgtgctaaaaaacttgtattttcatcttcctaatacactaaaatggcacacagaataatagtgtagcacacaatacaaactgatatgtgcaatcaataattctaaaaattgttgttttaagtctttctttggaagtccttaaatgcaaaagaagaaatttttaattttgtttaatttttaaaaacatttttcagggttttctaatcctggtttaaatagtttatgctgaaatcccagttaatctggcttattcactcaaaagaaaggaattgtttaaatcaactataattaagctgatggttgcatttcaggctttgaattccgatcaagtttcaaattggttattattttggaggttgtgctttcatgttcctaggtatttctttgtttgactgtgaaaatatttaagtgtgaaaaacctagagagagagctttcttttaagtcactaaaatcggattcttttgatgttagaaaaaaaaaagactctagattgaaggaagaagcttaaattgatttgaaaaattaaagtgtgctttatatgaacttgtttcaacatcctcttgaaagactggcgtgtctcctgttgtatgtcacagtttgttcatcatgtgttgtggaatacccttccagttcctgattgacctaggagagctttgaaatgcaggctaattatcacagttttagactgattgatcacttagtgtttctgcagatttattccagtagggttctgtcagtttgaagtgtttattttctttggtcttgtttaatccctattataatcatatcctttagaggaaattttagatgaagttttctactagtatttattattataaaacctccagtatggtgtctataatttggtgtttctgtggtttgctttagtaatctttcaggattttagaaagaactaatggttatttaaatttgagaccttaaagcgggaatagaagtaaattgtttctaaggaaagtgagggattctttcactcttgtagtgcagtggggtgtgggctcagtagttgggagaactcatcagtcattcactcattcaacaaacattttgagcatctcagctcctgaatttgatcattatgatgtctggttgtagagcagtgagattttctaaccctatataatttcagtgagaaatttaatcaagatgccacttgagagttacaatagactcagtagtcttaacgtttttagtgtttcctatgaaaagtcagtactcactttctaatttgatttttagctgagaaatttttgcttacaatgtttcccaaaatacactatttctttcataattcatttgtttctatctctctctatatatacatttttaagattttcaatgtcaaaacttattgcatttatgtagaaagaacatcgtgctagcattctggaaaccagtattttattcccagtactgttgctctcaacagaggactgggggcaagttacatgacttcttggggaccttaatgtcttccctcataaaatgagagagtttcactacagaatcttatcttcaggctgtttacatctccagaattctggactgaactaacattacgtaatattatgaaataacatgagcaaacttgccacacacatatttatggtatgacattgattattagtatttagttctgacttgtagataagagtatcacatagagaaacttaggaagatagccaaaattatgtcttagacttgtcaatactagaaatgaagctaagataacttgttttcaataatacagattaggcaaagagtatagattcacaagcaagacactaatccaacataccaaaaaagatatccaaaaaatggcaatgagaagacaaataacttttaaattgtcaaaaccaaaagaattactttctttggagtgtttatcttcatctttccctcagtatgaattcttaataaacttagtttctactttcaaaaggattttatctatgttataaatattcatgttttaaatagccaagtcttgattctggtttgattgctgtaatgtaggggatttgtcattttaatattttttaagttagctttaattttgtcttttttaaaattcatttatataattagcctttactgcctttcttggtaaaaaataataataataatcttagtttggtgttttattttaaaccctgaatatcaacaatttgtttcaacatattttagttcgttgacatttttattccatggaaaatatctgtgttccttgactttgctttaggccagttcacttaccagtaatcaccacactctctctgctttctggcagtttagagacatggaatttttttccaattaatacatatagcatataccaactggtaagcactaggagtagatatataaatatcaaaatacagaggagaaacaaggccttcttcagtgtctgttgttcccctttttgtccatgagttctcatcatttagctcccacttacaagtgagaacatgcagtatttgtttttctgttcctgcattagtttgctaaggacagtggcctctagctccatccatgttcctgcaaaacatatgatcttattcttttttatggctgcatagtattccatggtatatatgtaccacattttctttatttatttatgttattgatagggaatttaggttgattccatgtctttgctattgtggatactgccgcagtgaacattaacatgcatgtgtctttatggtagaatgatttatattcctttggttgtgtacccaacagtgggattgctgggtcaaatggtagttctatttttagctctttgaaaaatcaccacactgctacaaaatcaatgtgcaaaaatcacaagcattcctatacaccaataacagacaaacagagagccaaatcatgagtgaactcccattcacaattgcttcaaagagaataaaatacctaggaatccaacttacaggggatgtgaaggacctcttcaaggagaactacaaacccctgcttaatgaaataaaagaggacacaaactaatggaagaacattccatgctcatggataggaagaatcaatatcgtgaaaatggccatactgcccaaggtaatttatagattcaatgccatccccatcaagctaccaatgactttcttcacagaattggaaaaaactactttcaagttcatatggaaccaaaaaagagcctgcattgccaagacaatcctaagccaaaagaacaaagctggaggcgtcacactacctgacttcaaactatactacaaggctacagtaaccaaaacagcatggtactggtaccaaaacagagatatagaccaatggaacagaacagagccctcagaaataataccgtacatctacaactatctgatctttgacaaacctgacaaaaacaagaaatggggaaaggattcctatttaataaatggtgctgggaaaactggctagccatatgtagaaagctgaaactggatcccttccttacaccttatacaaaaattaattcaagatggattaaagacttaaatgttatatctaaaaccataaaaaccctagaagaagacctaggcaataccattcagcacatgggcatgggcaaagacttcatgactaaaacaccaaaagcaatggcaaccaaagccaaaattgacaaatgggatctaattaaactaaagagcttctccgcagcaaaagaaactaccatcagagtgaacaggcaacctacagaatgggagaaaatttttacaatgtatccatctgacaaagggctaatatccagaatctataaagaacttaaataaatttacaagaaaaaatcaaacaaccccatcaaaaagtgggcaaaggatatgaacagacacttctcaaaagaagacatttatgcagccaaaagacacatgaaaaaatgctctcattatcactggccatcagagaaatgccaatcaaaaccacaatgagataccatctcacaccagttagaatggcaatcattaaaaagtcgaaacaacaggtgctggagaggttgtggagaaataggaacacttttacactgttggtgggactgtaaactagttcagccattgtggaagacagtgtggcgattcctcaaggatctagaactagaaatgccatttgacccagccatcccattactgggtatatacccaaaggtttataaatcatgctgctataaagacacatgcacacttatgtttattgcagcattattcacaatagcaaagacttggaaccaacccaaatgtccatcagtgataaactggattaagaaaatgtggcatatatacatcatggaatactatgcagccataagaaaggatgagctcatgtcctttgtagggacgtgggtgaagctggaaaccatcattctgagcaaactatcgcaaggacagaaaaccaaacactgcatgttctcactcataggtggaaattgaacaatgagaacacttggacacagggtggggaatatcacacccctgggcctgtggtggggtggggggagggatagcattaggagatatacctaatgtaaatgctgagttactgggtgcagcacaccaacatggcacgtgtatacatatgtaacaaacctgcacattgtgcacatgtaccctagaacttaaagtataataaaaaataagcaagtttacaagggcaaaaataaaacaaaaaagaaaaagcaccacactgcttccacagtggctgaactaatttgcactcccaccagcagtatataagtgtaccctcttctccacagccgtgccagcatctgttatcttttgactttttaataaaagccattctgacaggtgtgagatcatatctcattgtgttttaatttgcgtttctctagtgagctttttccatatgtttgttggtggcatgtgtgtcttctcttgaaaagtatctaaaacagtcacttatcttttaaagaaactttttaaatcagaaaaaaggtgtttatatttaaccacgtatttatcatttgcagtgctgttcattctgtttcttaggtcaaaatttctatctggtatcattttcttctgcctcaggcacttccttttattatactgctgatctgatgctgattaattctttcagtaggtgtatgttttcatagctttttattttatctttgtttttcaaagatattttgaagagtatagaattttaggtagacaggccgggcgcagtggctcacgcctgaaatcccagcactttggaaggtcgaggcgggcaggtcacctgaggtcaggagttcaagaccaacctgaccaacatggagaaaccccgtctctactaaaaatacaaaattagccaggcatggtggtgcatgcctgtaatcccagctactcgagaggccgaggcaggagaatcacttgaacctgggaggcagaggttgcggtgagccgagatcgcacaattgcactccggcctgcgcaacaagaaagaaactccgtctcaaaaaaaaagaattataggttgacagtattattctttcacatccttaaactatgttgttccactgtcttctgatttgccttgtttccaagaagtcacctgtcaatctaatctttgttcctctgtatataatttttttttctctctagcagcttttcagattttctcttcctcactcgttttaagcaatttgattatatggatattagcatagtttccttcatgttgcttgtgcttggggttcatcgagatccttagatctctgggtttatatatttagtacgttttaaaactttttggccattattttttcaaatatattttctgtccactcctcttcatcttcttctggaaccccagttgcacatatatttggctatgtgaaatttcctacagctcactgatgacctgttttttaaaaaatcttttttttctctttcattttggaaagttttattactgtgtctgcacgttcaccaatatttttgtctgtagtgtctaatatgttcttaattccatctagtgtattttttcctcttagacattgtaatttgcaatttctatagatttgtttggggtctttttttttcatatctgccatgttactccttaacataccaatgctttcttctttttctgatcatatggaatatataatagctattcaatgtacttgtgtacaaattctgtcttctggatctatttttgtttagtttttgtcctaattatgaattatatttttctatttctttccatgcctgttagttttttattggatgacaggtattttgaattttgtatcgttaagtcttggattccttttttttttttttttttttgatgtgcttttaaatacgtttgaggattgggatgaagttaaatttgggaacagtttgatttttttgattctttctaaacttacttttaagctttatcagagagaccagagaaacctttactctagggttaatttgacatcattgctaaggcagtacctttctgaattttcaacctgatgctccatgtattacaagatttcttgaactattccagccccatatgtgttacaataatttttctgcctccacctctgtggtggttcttttcccagctttgacatatttcctcacacacagcactcagctgaagactccagtgatctctgagtgtatctctgtttgcggtttcttcctttccggtactctgcttgtgagttttagcctccttggcttcctccaatatttaactgtgtctcctcaacctcagagattgccaggctctgttggggttcctccttcctgtgctgcagcctgggactctttaggcattaagccagagtaattacagggttcaccttatttatttcccttttcttaaagattactgttctgtgctgcctgttttctagtgtctaaaaaccatttcttcatgtattttagatatttaaggttcaaaccagtctgttttactctatcgttacctgaagcagaagactgacttctgtactgtttcatttgttaaccagagtaaatccttcattattcacataataaattaataaggatgatgtttttctcacagggactagattaggcaatatacatgaaaagcatattattgacagtaaagtgtaagatgctacacagatgtttatcattgctattacaaaggagataaccccgttttcctgcagttagggaagttctatatgggagtaaggctgaaagggccaaaagatataggtattgtttctgaaaaactgcctatgcttctatgcatataagtatgtcatgttgcatatttttctgtgctgtattaattcatgcattcctttatcaacagatacttattaaacactcatatgtcaggcattgttctagggactagagatctctgccttcaaggagcttattttctagtggtatattttctgttctgtgtcttagctatccacttttttcatctgcctggacacgtgacttattctgtctctgggcctctggtatgagtgctcatttcattctgccttataactcctattttcttccctactttatctgaccttcctaccttagcttgttcattctttccttcaatccagttgtcatgaaatctctttctttcctctactaattttttttttctttctttctttctgagtaaaagccagagatctggccccctgcttacctctctgaattctttacttacttctgacaacttgctcatttcactccagctacattgacctccttgcctttgttgtgttttgaaaacaccggcgtggtcctaccgcaggaattttgtacttactgttccttttgccacattcatcattcatatgttcatgtcttccccatcgcttccttcaagtttttgctcagttgtcatctttttactgagtgtccttcctgacctctccctactttaaaatgttatgcttttttctactacctctcctgttcctcattcctaccttatttttctggataacacttattgccttctaaattgtatcgtataatttacttctttgtttcttctccgttgtcacactagcatataaattcagtgaaggtagagattcttttactgctgacaaaagcatctaggacatttcctggcactgataaggatctgcataaatatttgttgagtgaatgaatctccttggtaaagtccttttttgtttgcctgttatatttattgaatagacttctttgtttcatgtactttaatttcaaaagtgaatggctggaacattttatatattttcttataaatcattttcattgctttttaagcttatcacatattttgttttataaatatgtagccttcgtgagataaaagattctccatccctgtttacgtgtatacttagatgacaactctaatggtcataaataattccaaccttatagataactcaggagaagatgagattataagtagactttaaatcccattcagaaacccaaggacaattcaaaaggaaaataatcattccaaatataatattcttcttattcttaagaagttgttagtattttgaattttgaatttttaatacagctcccatagaaaatactttaaaatgaacccggtaagacttcctcattaagacatatagacacatatgctcccactcccgtaatcaaatttggaagtcaaataagctctgaaaaccaaaacattcttccaagtttattgcagactcatttggtagtaaaaaccaatctgacctgatgtgtagctgtttatagtctttatttttccatttggtgagtccaattatatatttcgctgaggaaatactaacatgtttgactacattgtgtgccccagacctgcttagagtattatgtaatatgcagtataggccatatattgcctttttaacatcaaaaataccctaaattctgaaatgcatgtagccccaagagatttgtataaagcattgagggcctgtgtatttttttttaatttacaagtgaagccagattccctagacattaagtgcctaacttttggttgttgttgctgctgctgttactgttttttctccagcttcgcaaacctgggtatacttcatgtgacaaagaaaaaagtatttgaaacactggaagcacgaatgacagaggcgtgtataaggggctataatcctggactcttggtgcaccctgaccttgcctatttgcaagcagaaggtggaggggaccggcagctgggaggtaagcatcattttcctggccttgatcctccaaggggtccaggctttggttttcatctgtatgaattatatgttcatctgcatcccttccagtctctaccccacactgctgtcaccttttccttgctcagaaacctttgatggcatcctgctacttctaggataaaaactatagctccatagcctgtcatacaaagccctgcttctctggccccagcaactttcagcctcatctccagcccaccttgcatcctcctctcgccatctctgctctctgaataactgaggcatatttatacctttgtatgtgtcttcctttaccaaaaacaccccaccgtttccatttcaccctctcgaaaaccaatgcagaaatcaagactttgtctaaagaacacctctgttttaccttccccaactcaccttattataaggcatttttctttctttgggctctgcagacacattataaactattatctttatcataaaaattgtatgattttccattttcttgccttttctcaaatttttttttcaaccccattccctgtcccaccacatgccccatttctacttttgtattttgtcctttactctggccgtccagtcgtcatctgatactcatgtgattcaaaaccgattatcagttttccactaaatatactccatcttctgatacccagactcaaaaccttcccatcctcactgactccccctcctcgcctgtgctgcgaggctgtggtccagccattccgtgctctctggcattccacactacattccattttcattgttccacttatagtagtcttctccctggtctctgtccctccccacttctaatcaagtttacatcttgtagccagatagatattactgaagttctgtatcttgttgctgctccgtgtctccgttttgcctacaaaatccaaattctgtaagttggctttttggatctcccaagagctggcctcaggctgcatttccaatctatttcccgttttgccccttcaggtcaaagtctactacttggtaggagcaccatgatttctcactttcctgccttggcacattctttctatttttgctctctcctcttcctggaatgcctttatccactctcttatatgaatgtgttcaaattctgccaccttttcaatattcagagcaaatacctcttctgctccaaagccctctgaactctctccttctttgaaatcccacatcacttcatttgtagctctcttgtagtacttgtctcttgaatcactaccttttatgatattatagcttaattatgactatatccatcagcgtgaaaactccagcaggagggaaggaaacagatgtccctgagtcattcagttccttcagaagttgtttttgagtacctactatgtgccaggctgtctgcttggcactgtggaatgagctcactccctgtgcccaagcagctcttggaataatttgcacacttctcaatacagctggtgcctagtagggttattcaattccattccatcacatcctgtgtgcctttaactcttactgtagagaggaaagggaaaggtgggggaaggacaggagaggagggaggcgatctgatacacggaagagagtttttactgtaatccggagaaaatgcaggtcttctttgatgcctttcatattggatgacataaatgagactgtttttaacactttattagcaatatgaagagtttcaaaagaggaaaaatgggtttttattgtaagtttacattatttgggctttataaaagcatggtcttttaaatgttcacacttccctgggcatgaatggactgtgctgtatggccctagatcgggaaaaagagctaatccgccaagcagctctgcagcagaccaaggagatggacctcagcgtggtgcggctcatgtttacagcttttcttccggatagcactggcagcttcacaaggcgcctggaacccgtggtatcagacgccatctatgacagtagtgagtacttcacttccaacagggggcacaccaagaatagacttccagccctgccctgccatttacttgctagctgagtcctggggaaggtaacttaatcactttaagcctcagctttatcatctgtaaaatgtgaataggaaaatctagcttgaaaggttgatgtccaggttaaatgaggtattttaagaggggctcaatacatgtaattctttttcctttgatgtacattttttagtcttttacatgaaatgtcacatctcatcttatttatgaatgtcttgctataaagatatatggttgatacttttagaagggagaataatcccaattttctttggtggtggggggactctggaaaggagtttataaaagacaactattattcttacccattttctttcccatatgttactagctttatcaagagagaaacttgaagttaaatgaatgagtagcatagacagcatgtgacttcaaaatcctatttcaagccgggtttggcgtcatgccctgtagtctcacctacttgggaggctgaggtgggaggatatggagtttcagcccagcatgagcaacataatgagaccctatctcaaaaaaaaaaaatatatatatatatatgtatatatatattaatttatagttcctaggactttttaagagttttacagtaaccttcagcatttaccatgcaactttcttgtttgattatgcataggattgattagacaggtattttcaaaaagcctgcaagcatagtactcagactcattgaaagtttatagaatttggcctgtgtggaaaactctgtgctccaagtacaacaactaactgaattctctaatttaaacaagtttgaagggaagtgaaaggttataaaatgatacagactcataccgcagaatcaccttaaaatgcagctgttggagaaaaaaaaaaaggaagctttatgctattaccacaagaaagttttgcctcttcaccacacagaatcctaatttagtttgggaaaaagaaacataacatccccattttccttacctgtaaaataaaaggtagtaagtagtttaagaaaactgtacttttcctaaagtttttaggactcttgtaaatagaataatagcagaatcatggaaacaaatttggaattgaagtcttgacctcattgaaagcccagaaatcaattagcttggtacttcccaatacatcagaaaagctctttctctttttgtgtcagtctctctgtgttagagggagaaacaaatacctgttcctttctacctcatttgttttggtgatcataaatgacccatgcccaagaagtgttccgagaatttcagaagccattcttgttttatttactttgttagtgaaagcatgtatttaagctttgttttggtcatgtgtgctaaggggagggtcctacctaaaggactggcttgttgagctgaggattaatcatgttatttgttgtttttcccctgtgaacagaagcccccaatgcatccaacttgaaaattgtaagaatggacaggacagctggatgtgtgactggaggggaggaaatttatcttctttgtgacaaagttcagaaaggtaaatacattctgtgatctctgatctcaagaggtgtgatcttgacacactacagttctgagtgtgtctgtgagtcacatttcagcagtggacaagaaacatccctctgctgccacagaaagtcttaaaaagcatttacgttttacctcttccaaatgtaaattgtctgtgttattttttcctaagtcaactaaatcacttttagatttcccatggaagtaaaaagaaataagaaaaccgtgataattataatcagtgactttcagtatctttatacattaaaattaatatctgtactttgttaaacaaaaataaataatagcccattcttgacacacatacaaacacacacacagaataatgttttacatagtattaaattgtttttatttcttttgcaatgctttgatataacactgagagaacttctctgaacacttccacagatgtgatgtttaagaaaaggaaagaaaacagggaatacagggaaattctcagagcacatttctctcacaattttccctttgaggaaaggttcttggcgtttatctttcattagatatattacaacattgatagattagtaaaagctgaggaaaatgtgttattttctcaaactgcattctttttttaaataaaatgatagttggaaagtgtagtataatatctatttactacagggtgagcattttcaaagtaagcagatacctaactgaaaatataaataagtaaaataaatcaataaaagacatgtggcttttaaaaaaattatcatatgagattaaattctctgaggtatatagtcagaaaaaaatgggatcagattttaaagtaaacacatatatactttatccaaaaaaatttacaggccaggcatggtaactcatgcctgtaatcccagcactttgggaggctgaggtgggaggattgcttgaacccaggagtttgaggctgtagtgagctattatcatgctgctgtactccagcctagatgacagagcgagaccctgtctcaaaaaaaagaagtttacactttctctgcctacactagtgtcagccttcttccaatccactctgtccaagtaatactcatttccagattcctgggtgtacatactgtgagtaaacacaatctgagtacctttatttgtaaatgagatccttagtcattatcattacattggaatggcttagtaagaaatgtcttgtacttggcttaaagaatctcaataactaggtccagtgtagtcctacctgaaggcaaaggagattgtaagatgttttatccattcctagtatttctaaaattctacttacatagagataaaaactttgaacaaagtcaatagtgtggccctttctatgaaacggaaagtgaagccaggaagatgccaacctaagttacattgtcacatttctgtagaagtgaatagagtatttataaacatgctgaacatggagtatttataaacacactccatgactagagtgtgcaatttaagcattgcattttaattagaagggacctgattattatagtattttgaccaattactcaatatgaactaagagactattatagtgagacagtttaatagtgtgttaagagcctggactctgaaattatactgtctatgttaaaatcctggttcctccaagtactagctgttcagccttggataagtacttaacctctttggaccccagtttctcttttgcaaagtgaggataataatagtacccatctacatcacaaggttgtggtgaggatgaaatcagttaatatgtgtatatatgaagcacttagaatagcatctgccatacattaatagtaaaacttatataagttaattatttttatgtacatctatatattgaattgcactgcctcgttggattctaatattcttccaccatcgttcgtgtttctcaggattggcttaaggatggagaagcagtaaggtcaaagattaaaagaaaattcaagttaactaggtaaatctagtattctgtcattgtgaatgaaagttggggcgcattactgtggtaaataatgaaaaaagtcagtgatttgtgaagattttaaaagactgaaccttttgatcttgttttttaaaagtgtaaatagatagtaggtagaatattaaaccagttttatttttcagcatgtttataaatactatttacactatgtgaaattacacacttcaatgtgattgtttgcagatgacatccagattcgattttatgaagaggaagaaaatggtggagtctgggaaggatttggagatttttcccccacagatgttcatagacaagtaagtgatttattattattattaatccttattatttttagagatgggatctcactctgacacccaggctgcagtgcagtggtacaatcacagctcactgtatcccccaactgttgggcttgagggatcctcctgtctcaacctaccaaatatctgggactacaggcatgctaccatgcccagctagtttcttcagttttattttttttgtagagatgatgtcttgccatcttgctcaggctcgtcttgaactcctggacttaagcgattatcccacattggcctcccaaaatgctgggattataggcatgatccatattactatcatcattttatactttctgccttattgaaatttagtacttagcttccatctataaaaaagaaaaatcataaatatttaacttccataaaacagtactatttttaagactcatgcaggtcatccaaaaaagttacctactgtagagttatgggcaaggttctgttagatcgtttgctctgagatgttggcaagatatttaattgctgcctaatcccctaacccataagacagtgccccacaggtcctttaatgaaaatgtttttaagtgttctaccaaagtaattatgatgagacctattttatgatagcacctaattatgataacaccttaaaagggtgttctaggagtcatcttctaattgaagctgatgtcatcctgttaaatgaagatttcccaatggcaactgattaaatgatcagtttaatcatttaataacatgataatgctgagcccccaccttaattattattctcctatttacaagtaattgaagagtattctcctatttacaagtaattatctggattggaaacaatccagatattcatcagtaagtggccagttaaattatggtctgtccttttgatgaaatatcatgtagttattcaaaagaatgagtactctgcgaactaatatagaaagatctcagttatacagtgttaaaatattttaaaagatgggtgtagaacaaagtgtgtgtagaaatgattctatgttcatgcataaagaaattctggaaggatacctaagaaattaataacagtatttaccactggctggtacactgtaggaactgcatggatggggaacaagaatgtcaaagagaataccactgtatgcttttttatattttataagatctttatccctgtgaatatattacatagtcaaaaaatcaaactgaaaaatgcttaaatccctaacataccaccaagaactaatgtgttatgatgccaatgtaagcaatgtttagtttcttctcttcatcactggcctgtagccatctctctctttccatacccagtctttctgatgttgctctaaataatcttggaggcttttaaggctgctttggaagagaagaaagtatatgcagtgaattttataagcatgatatttacaactagaagacatttgaaatagacaaatgaaataataaagcttcgtagtacattagcatagcattgtattttgattttacagtagcaatttcataaaaatgtatcggtatagaattctgagtttggaactttctccaggacacggtgttttttagtacactgtgtctaaacattgggtataaagaaaagcataaggaatgtgtttaatgagtagcattactgcaaaaaaaaaaaaaatgtagtcctacaccaacatgtggttcttcgtatcctgcagtttgccattgtcttcaaaactccaaagtataaagatattaatattacaaaaccagcctctgtgtttgtccagcttcggaggaaatctgacttggaaactagtgaaccaaaacctttcctctactatcctgaaatcaaaggtaagtcagttgtttaaaatcttatgctcatattttattttattttatttttggtttttgttttgttttgttttgttttgagacagagtctgactctgttgcccaggctggagtgcaatggtgcaatcatagctcactgcaacttcgaactcctggcctcaaacagttctcctgccccagcatctcaaatagctgggactacaggtgtgcgccaccatgccgggctaatttttttttttttttacttttaatagaaatgaggacttcctacattgtccaggctggccttaaactcctggccttaagcagtcctccggccttggcctcccaaagtgctgggattacaggcttgagctgccatgtcttgccattgtgcttgttctgagaagaggacaagctaattagaaaagatcagttagtcacctcctttgaacagctttctagtaacaggtccctggatccatggtgcttatttttagaagagacagtagtatattattttgaggtcatggaattagtctagctttttaaaataatgttatttccaccaagcttatatgagatttagacattgagaatttgtctttgaatttgagaatctaacatttattgactaactcagagttcaagcagctgagatgaaaaaatcaggcttgctgtttaggagaatcagccagttagtcaaccagcctcaggcggtggaacagaaaacttggccaacatgcactgtgaaactatgaaaatgagtaaggcatcattctttctctcacaaaagatgctttaagaaagggcactcataggtttcttaaatagttataatgtaaattatgattttaataagtaccgaaagtgaagcatccataaaaatataagagaatgttgaagagagagcccttggtccctttattctaaagcagcctccaaaaagaaggcttcgtcaaggagatatcatttggccctcagcatttggggtatatttcagcagttgggtgttaaacagagaaggagagggttctctaggtttaagttacttgaggagcttaaagagagaggtaaacacagcgtttatgcagagggaaaaaagtgttctgagcgctcggatggacatgaaggccaatgtgggtaaggaaggccagggccaggctaaagagggctgtgaatggcagcttaagaattttgcattaattctggagagggatagccgggcctgcctaggtttggaatgatggctctgacttctttatgtcaccactgagggtaccatttaggaggcagatgatgagtcagaagagtaatgcaagaatccaagtgagaaacagtgcagttagtaaaggtcctagtgccaggaatgaaaggagatggtggacttaagagagagtgcagtgatactgtgatacagtgatactgtcaagagggcctagaggtcggaggtgtaggagagacggggagtcatagatgggtctaagactccctgaccaggaagcttgtgatgtggttgacttgatgaaaggaacaagggagcaaaagtagatttgggtgggaaaagaaggagctcagagtaaaacatgttatattttaggtccctgtgggaaaatcaagtgtaagttcttagtaggcagatcaaaaggcagaactggaactcaagagaggacagggtgagaaatttagcattagaatcatctcaaaacgagatataacaggcaccaactgagtcatcattcaaaggtatttcttaacctagagtccactgacccccaaagagtctgtggatagaaatgtactttgatatcatcagcttcttttataatcctgttttgtattttacatactgaaaaccatgattctgagaagagatccatagagttcaccagactgcagaaggggctgtggcacaaacaaaattagaaacccctcagttggagggaagtgagactgggaagggaggtcagtaaaatgattgccacggggcacccagatccttgctgaggttggaaaccgcaaaggtgcagcagcaacaagccacatgggtgggtgttgtctcctgtgagagcaagatgtgataggtaatctttgaagagggctttcctttcctagaattcgtgctgccacaggagtgtttagaaaacggttctacaagttcttgtttcttttctgaggttgtggcctctccattgtttggtcagatttgtagtgcactctatatcctggtggtttgaaaacattgtcagcacaataacttttctttcttcacatgagatttcatacaaaatcccagtgtatggacatggtaggctttgattaaaataggggtgaagggccctgccagctcggccttccgagaggctgtcccacctctccttacttccctatcaggagctgctggaggtcttttgaatgcttctgcctacacaaaatgatgtgaaaatcactgctttaatttaaacacccttctttaaaagtagacacagaagaaaaatatggataatttttttagactttctgaggaaaaaaatagatttcttctccagaaatatgtcttcaaataatgccagtttttgctaacacagagaatcatgaagaaagaaaacccaggttacctgtatgtgtatgaacctagaaacattcaaagctcagcttggtatctaggctgcctgtctccctttcccagtggtatctatgcctcagaaaagtatgttatagtgggggtatattcaggtgattactttaatgcctcgttatcatagtaggaactatccaatgcagggattagagaatggggtcacctgaaagttcaaaattgcacctgtatgcttcatgcacctaccttccaggctgtcattgatgaaaagcttcatacaatacaaagtttaagaactgtctggagaaatacttacccattgagctctgaaggaaagaatggacaacatatatatatatgaggacaacaaattacttgattctatagaaaccttctggattataaaaactcaagataataggaccaaggagaaataatctgaccaggcaatataactggtcagaaaagtagtaggccatttagcattagagtaagtagatagaaatggatccaaactgtacaacccagggaaacattgcatacatttctcagaagtcattgaacacacttttccttacccccagtctctgt

SEQ ID NO: 119 - DNA, 3625 bp, Homo sapiens
ggccaccggagcggcccggcgacgatcgctgacagcttcccctgcccttcccgtcggtcgggccgccagccgccgcagccctcggcctgcacgcagccaccggccccgctcccggagcccagcgccgccgaggccgcagccgcccggccagtaaggcggcgccgcccgcggccaccgcgggccctgccgttccctccgccgcgctgcgccatggcgcggcgctgactggcctggcccggccccgccgcgctcccgctcgccccgacccgcactcgggcccgcccgggctccggcctgccgccgcctcttccttctccagccggcaggccccgccgcttaggagggagagcccacccgcgccaggaggccgaacgcggactcgccacccggcttcagaatggcagaagatgatccatatttgggaaggcctgaacaaatgtttcatttggatccttctttgactcatacaatatttaatccagaagtatttcaaccacagatggcactgccaacagatggcccataccttcaaatattagagcaacctaaacagagaggatttcgtttccgttatgtatgtgaaggcccatcccatggtggactacctggtgcctctagtgaaaagaacaagaagtcttaccctcaggtcaaaatctgcaactatgtgggaccagcaaaggttattgttcagttggtcacaaatggaaaaaatatccacctgcatgcccacagcctggtgggaaaacactgtgaggatgggatctgcactgtaactgctggacccaaggacatggtggtcggcttcgcaaacctgggtatacttcatgtgacaaagaaaaaagtatttgaaacactggaagcacgaatgacagaggcgtgtataaggggctataatcctggactcttggtgcaccctgaccttgcctatttgcaagcagaaggtggaggggaccggcagctgggagatcgggaaaaagagctaatccgccaagcagctctgcagcagaccaaggagatggacctcagcgtggtgcggctcatgtttacagcttttcttccggatagcactggcagcttcacaaggcgcctggaacccgtggtatcagacgccatctatgacagtaaagcccccaatgcatccaacttgaaaattgtaagaatggacaggacagctggatgtgtgactggaggggaggaaatttatcttctttgtgacaaagttcagaaagatgacatccagattcgattttatgaagaggaagaaaatggtggagtctgggaaggatttggagatttttcccccacagatgttcatagacaatttgccattgtcttcaaaactccaaagtataaagatattaatattacaaaaccagcctctgtgtttgtccagcttcggaggaaatctgacttggaaactagtgaaccaaaacctttcctctactatcctgaaatcaaagataaagaagaagtgcagaggaaacgtcagaagctcatgcccaatttttcggatagtttcggcggtggtagtggtgccggagctggaggcggaggcatgtttggtagtggcggtggaggagggggcactggaagtacaggtccagggtatagcttcccacactatggatttcctacttatggtgggattactttccatcctggaactactaaatctaatgctgggatgaagcatggaaccatggacactgaatctaaaaaggaccctgaaggttgtgacaaaagtgatgacaaaaacactgtaaacctctttgggaaagttattgaaaccacagagcaagatcaggagcccagcgaggccaccgttgggaatggtgaggtcactctaacgtatgcaacaggaacaaaagaagagagtgctggagttcaggataacctctttctagagaaggctatgcagcttgcaaagaggcatgccaatgcccttttcgactacgcggtgacaggagacgtgaagatgctgctggccgtccagcgccatctcactgctgtgcaggatgagaatggggacagtgtcttacacttagcaatcatccaccttcattctcaacttgtgagggatctactagaagtcacatctggtttgatttctgatgacattatcaacatgagaaatgatctgtaccagacgcccttgcacttggcagtgatcactaagcaggaagatgtggtggaggatttgctgagggctggggccgacctgagccttctggaccgcttgggtaactctgttttgcacctagctgccaaagaaggacatgataaagttctcagtatcttactcaagcacaaaaaggcagcactacttcttgaccaccccaacggggacggtctgaatgccattcatctagccatgatgagcaatagcctgccatgtttgctgctgctggtggccgctggggctgacgtcaatgctcaggagcagaagtccgggcgcacagcactgcacctggctgtggagcacgacaacatctcattggcaggctgcctgctcctggagggtgatgcccatgtggacagtactacctacgatggaaccacacccctgcatatagcagctgggagagggtccaccaggctggcagctcttctcaaagcagcaggagcagatcccctggtggagaactttgagcctctctatgacctggatgactcttgggaaaatgcaggagaggatgaaggagttgtgcctggaaccacgcctctagatatggccaccagctggcaggtatttgacatattaaatgggaaaccatatgagccagagtttacatctgatgatttactagcacaaggagacatgaaacagctggctgaagatgtgaagctgcagctgtataagttactagaaattcctgatccagacaaaaactgggctactctggcgcagaaattaggtctggggatacttaataatgccttccggctgagtcctgctccttccaaaacacttatggacaactatgaggtctctgggggtacagtcagagagctggtggaggccctgagacaaatgggctacaccgaagcaattgaagtgatccaggcagcctccagcccagtgaagaccacctctcaggcccactcgctgcctctctcgcctgcctccacaaggcagcaaatagacgagctccgagacagtgacagtgtctgcgacacgggcgtggagacatccttccgcaaactcagctttaccgagtctctgaccagtggtgcctcactgctaactctcaacaaaatgccccatgattatgggcaggaaggacctctagaaggcaaaatttagcctgctgacaatttcccacaccgtgtaaaccaaagccctaaaattccactgcgttgtccacaagacagaagctgaagtgcatccaaaggtgctcagagagccggcccgcctgaatcattctcgatttaactcgagaccttttcaacttggcttcctttcttggttcataaatgaattttagtttggttcacttacagatagtatctagcaatcacaacactggctgagcggatgcatctggggatgaggttgcttactaagctttgccagctgctgctggatcacagctgctttctgttgtcattgctgttgtccctctgc

SEQ ID NO: 120 - DNA, 2907 bp, Homo sapiens
atggcagaagatgatccatatttgggaaggcctgaacaaatgtttcatttggatccttctttgactcatacaatatttaatccagaagtatttcaaccacagatggcactgccaacagatggcccataccttcaaatattagagcaacctaaacagagaggatttcgtttccgttatgtatgtgaaggcccatcccatggtggactacctggtgcctctagtgaaaagaacaagaagtcttaccctcaggtcaaaatctgcaactatgtgggaccagcaaaggttattgttcagttggtcacaaatggaaaaaatatccacctgcatgcccacagcctggtgggaaaacactgtgaggatgggatctgcactgtaactgctggacccaaggacatggtggtcggcttcgcaaacctgggtatacttcatgtgacaaagaaaaaagtatttgaaacactggaagcacgaatgacagaggcgtgtataaggggctataatcctggactcttggtgcaccctgaccttgcctatttgcaagcagaaggtggaggggaccggcagctgggagatcgggaaaaagagctaatccgccaagcagctctgcagcagaccaaggagatggacctcagcgtggtgcggctcatgtttacagcttttcttccggatagcactggcagcttcacaaggcgcctggaacccgtggtatcagacgccatctatgacagtaaagcccccaatgcatccaacttgaaaattgtaagaatggacaggacagctggatgtgtgactggaggggaggaaatttatcttctttgtgacaaagttcagaaagatgacatccagattcgattttatgaagaggaagaaaatggtggagtctgggaaggatttggagatttttcccccacagatgttcatagacaatttgccattgtcttcaaaactccaaagtataaagatattaatattacaaaaccagcctctgtgtttgtccagcttcggaggaaatctgacttggaaactagtgaaccaaaacctttcctctactatcctgaaatcaaagataaagaagaagtgcagaggaaacgtcagaagctcatgcccaatttttcggatagtttcggcggtggtagtggtgccggagctggaggcggaggcatgtttggtagtggcggtggaggagggggcactggaagtacaggtccagggtatagcttcccacactatggatttcctacttatggtgggattactttccatcctggaactactaaatctaatgctgggatgaagcatggaaccatggacactgaatctaaaaaggaccctgaaggttgtgacaaaagtgatgacaaaaacactgtaaacctctttgggaaagttattgaaaccacagagcaagatcaggagcccagcgaggccaccgttgggaatggtgaggtcactctaacgtatgcaacaggaacaaaagaagagagtgctggagttcaggataacctctttctagagaaggctatgcagcttgcaaagaggcatgccaatgcccttttcgactacgcggtgacaggagacgtgaagatgctgctggccgtccagcgccatctcactgctgtgcaggatgagaatggggacagtgtcttacacttagcaatcatccaccttcattctcaacttgtgagggatctactagaagtcacatctggtttgatttctgatgacattatcaacatgagaaatgatctgtaccagacgcccttgcacttggcagtgatcactaagcaggaagatgtggtggaggatttgctgagggctggggccgacctgagccttctggaccgcttgggtaactctgttttgcacctagctgccaaagaaggacatgataaagttctcagtatcttactcaagcacaaaaaggcagcactacttcttgaccaccccaacggggacggtctgaatgccattcatctagccatgatgagcaatagcctgccatgtttgctgctgctggtggccgctggggctgacgtcaatgctcaggagcagaagtccgggcgcacagcactgcacctggctgtggagcacgacaacatctcattggcaggctgcctgctcctggagggtgatgcccatgtggacagtactacctacgatggaaccacacccctgcatatagcagctgggagagggtccaccaggctggcagctcttctcaaagcagcaggagcagatcccctggtggagaactttgagcctctctatgacctggatgactcttgggaaaatgcaggagaggatgaaggagttgtgcctggaaccacgcctctagatatggccaccagctggcaggtatttgacatattaaatgggaaaccatatgagccagagtttacatctgatgatttactagcacaaggagacatgaaacagctggctgaagatgtgaagctgcagctgtataagttactagaaattcctgatccagacaaaaactgggctactctggcgcagaaattaggtctggggatacttaataatgccttccggctgagtcctgctccttccaaaacacttatggacaactatgaggtctctgggggtacagtcagagagctggtggaggccctgagacaaatgggctacaccgaagcaattgaagtgatccaggcagcctccagcccagtgaagaccacctctcaggcccactcgctgcctctctcgcctgcctccacaaggcagcaaatagacgagctccgagacagtgacagtgtctgcgacacgggcgtggagacatccttccgcaaactcagctttaccgagtctctgaccagtggtgcctcactgctaactctcaacaaaatgccccatgattatgggcaggaaggacctctagaaggcaaaatttag

SEQ ID NO: 121 - DNA, 73634 bp, Mus musculus
  misc_feature (10357)..(10454): "n" at positions 10357 to 10454  can be any base
  misc_feature (30446)..(30465): "n" at positions 30446 to 30465  can be any base
  misc_feature (56069)..(56088): "n" at positions 56069 to 56088  can be any base
  misc_feature (71991)..(72107): "n" at positions 71991 to 72107  can be any base
  misc_feature (73254)..(73441): "n" at positions 73254 to 73441  can be any base
ccaacacgcagtcccagtggttgggagacacagggctccctgtcattcttcagaggagacgcctgcctcacttcagacttgcaatgcagatggcggctggcagattctgctgtggctgtttccacaaccgtgcttccgagcaaaggggcaagcgatggggatgccacgcccactgtcccaagcttgctcctttcgatgcgcttttcatgttttgttttgtttttttttttttttattacacttttacttaatctgtgtgtgtgcccgggcaaagcttccatgcaaggcgtggcatggaagagtggaggtcagacaacttgggagccatcagttctcccctctagcaggaatcaaactcagacctgtgggctttgcagtaggcatccttactcactgagccatcccaccctccggccatctgcttctgtgagagctggatcttcgtgactagtgctactgaattaaaggaagagaaagaaccccctgttttctgaaaggctggggctcatgcagaatcatctgtccaggaacccccatgctgactggggggatctgcggagtgaggttttgtcctgcctgagaaggaacctcctgggctctcatcctcctcctacctatagaaaggacattggcgatgcctgttcaggcagccgctttgttctagtgtgtttgcttgtgcctatgccaggtgacactgtgactcctggcccaccgccagtcccgctacaactgttactaaaacagaggaggccagagagccaggctttgcgactgagccgcagatgtgacactggctttcctgcttgtgctagtttgcgactagaagcccgtggttctacagagcatgtgcagagtgggggaaacaagcctgactggatatgggcagtgagaagtgatgtatccagcagaccttagtgtttcagaagagtgctaagttgtataaagtggggctgctccctcctgtgctccaccgggattcaggaaaactagctcaaaagtcaaagctagctgggcagtggtggtgcaagcctttaatcccaacacttgggaggcagaggtaggtggatttctgagttcgaagccagcctggtgtacagagtgagttccagggctacacagagaaaccctgtctcaaaaaaaaaaaaaaaaaaaaaaagaaaaagaaaaaagaaaagtcaaagctgtgtcagctggaaagggtgaaaacaacaagcataaggacaaatccccctgcctctacaaccagcagcatccagagagtgagtgctggttagacctcccttccctagggctggccagtacacagctcagcccagtccaagccctcagttccaggaagagcctgcttaattaaggattgtcattcctacatggttagggtctccaagcatataggacttagaactgaagcatattcattgcccccaccttgtctgcctgtaagactctggggagccttagcttacctgggaccccctgagtgaaccacgtgaagccgggatcgatgcaaaaagcaagaggaatttattgctccagtgcactggggccatcccagacccgaaggagtggtggctactcccaatatcccagcgagttcttatatggtttccaggggcagaatagagcatcagcaactaggcacaataagattggtggaatagtgcaccctttaaactgattggtctttagggaatgaggtgacaaagactttccttgtctgaaggtggcaacagtcagtactgtggaatgtgtccccaccggcaggtccgatcctgccatgtggtctgagaaatggtaattagcctctcccttccggagggtcaggtgtttcatgaccttcccaaagttcctaagctgaccttttcatgcccaggtctggcgtgatcacccattgcgtcctcaggtttgacatcagtgcctctgcttcccttgccacagtaaggtttctgcagctctctctgtgtgttctcactgcctgcttgctgcacaacccctcagcacccagcaaggagtagaaagcacgctcactgctcttgactggttagctattgtgccttccagaagttgcctcttaatgtgctcccctcccatctccagttttatgctttattactatgtgattgtttcaacttacatacaaattcagttgagaactgaaacaagggaacttgaactcatcaacatggtgcattctcacagtgcagtctctgtcacgcgcctgcggtgattcagcctgtccccctaaagcgcatcgcaggcatccattttgtagctggaatggcccagtgctgccttgacacagcgcactgcttcagagtactcaccgtgtctgttttctcctctgcttaccattctgtcgtagacataccttataaattcaccacctctcattaaacacttgcatgttttctaatttccaaagtgatgaacagcattttataaaacctcacttagcacatactcacaggcccaaaggcaagcctgtcttaggccccttgttgacattaccagtttggtttaccagaagtccccacagtactgtaggagcaaactcatttcaagggaccctctgtcactgttgggtagaggattcatctgtgaatttagttactaattaaatcacttactaatctaagtgtttccctgattacttgtggaaactggtgtttcccctaaagcttcagtggtgtggggggagaggaaggtgctaccaatagtgttccctcatttcctgcctagttggtttgtcttatctatataaatccattttttaaaatatctatctacaaaataaacttgtacataaatgtggataacagaattattcaaaggaggaagtatccaggatattcatgatttctaaatggatgagcaccttatgatatagtcatacagtgacagatatttagtgattaatgtaatgataactttaatacaatgctatattactacactgcagatgaatcttaaatgcgttgtgccctgatgaaaaatagaacgaaaccaaggttgtgtatcatgtgattaaatccataccaaatatctggattaggcaaacccacagagacctaggtaggttagatgggcgtcagggaagataggggtcattggcaagtggctgcttagagcacaggggtttctttgaggatgaagaatgtgttctggaattaaatggcagtaatggctcctttataaaaaccaactgtgccacactcttctgtggtctggaagagttggggaaggtgtgccctgcctctccagaatcccttcgtacaaacagggctaatactctcatttgcatcagcaccttctctctctcttctgtcgactcagagatccaaagcaaactgggcgcaagaagcatctctccctctccctggagcccttccatgattccctgttaaaacttcatttggccatttaggtttgggagcccatccagtggctggctggctgacagcagtgtgaatgctcactctcgggggctcacgcttctgtctcccttccattaagccttcagagctccaggcgcagtgaggggggtggggtgggaaaaaggaaaagactgcagtttctcagcctaggggttatctacacaagcatcgacagagctgattccaggtgccgggaatgcgcctcttttctgctgtgccatggtgttctatgagtgattggtttcatccattgctgtcagggtgggacaggatccatcctcgtcccctcagagcctttgcagtgaccacacacatggatgatccagacacttgctgtttgtgaagtaaagctttgatttgatgcgtagcaggtccagtcttctggccactgcatgtggtcagtgtctgcgttgtgcacactcccctgtcccgtggccttctcacctgagagactgcagggtgtcagaaggagcgtttggtaggggctttccttcacagcattctaccacaagtacatacgtcttttgtgtttggttgggggtggggcagattatacgaacacttcacttcatgagttaatttgcctgtaaagtgaatcatgtcttaaatgcaataggagagctcatttttataccaaggaaactttccgctaccgcctccctcgtggtatgtataaatacccttgccacagatagggaagacggggaaattgagggctgctttagttttgttggctcaaacagtcattaagatgccaaaccataccaaggaagaggtgactcactgtggttccagcacctccatagaacccactattcacagtgtggaatgtagatggagacagaggcaccaaggctaacagaggcactgtgctctctgtccctggacgtggtgtcaagaggcgtccttccctctgactttcccgccatgcctcttttgtacacttttgtgtggacttaccagggctccatggtacagaaagcagctttgttgcagaagtcctgagttctggacatggactctagtcacctgttgtcacctctcgtccccaccccgagctgagctgtggacacattcccctacctctctataacagggcccatgtttgaggacttagaatgtggtggtggggttgcgttttccagtgcagtacagtgcagtgcctggcatacatgagtatgcatacatacacttcggatgttggctatgactgccaggatgtggaaccaccacctctacagtgccccatcccgtaactaggcattcatcttctgcaggcttcggacagcatccgtgtattagctcaccattctgtgggccgtaagccggcacgtagcatgaccggaatctctgatcagcgaggctgaactaagggtgtcagctgagctgtcactggggccttgctagggaagaatcggtttcctgactcacacagactcttgatcagtctcagttgctctggtttgctgtggtcttggaactgacatgccagttccctgctctgccagctgtgagcgctcctcagcagtggagagcccacatctggccacgtgttaagagctgcaggagagaggatcctcactttgaatgcttcttctcacacttcggctctgcatgtgcaagaagagccatgacctccagggcttacttgatgaggtcagctcacggggacactgtccttcctaaggttggctacgccaagtgacacagcctaacacaggagcggctgtttaattcacacatcctggagactgtacaggaagttggaaggtagcttacagttctgcgcaccacagcacaacctcagcagggccagggacaaatggctcacttcttccatccatctggcagcaagtatactttgccaagtgggcagaactgcactgcactgcgctgacacagggtggacccagcactaaggctgtctgcggctcagcccccaaggtcttacagttgcacaatgcaaacccggctggatctttcctttggcttaggacctccaccagtgcttatgcaaccaagaggcaccaaggcaccctgctttttctccatccacctaattcctaggacctctctgactgtaccgaaaagacagataaagacccttaagctgccagggtcatctggctgtgttctaggaagaaggaacaacccattgggcaggatggaaaggtgttggtgaatcaggaaacttggctggcaggttctgtaacccagctaccactgctccgggcatagtgttgagctgcctaaatgaggctctagcagttatgtgcggaaaactcctaatcagctgccctggctcctcaggggattcactgtctgccgagaatctagtaaagttccttaaagtcctagtaaagttactcatcctgtggatggtgttgattttctcagcatcaaaagctgtgtgccaggagcctctctcctaaggtcgcctcactctgactgtgctccgcctcctcctgccctctctcatcccactgctgttcattcatgaagcggtccacttttgcctctgcccctgacacagtgtgaggagctgcaggggacctacaactctgctctgaattcctcattgcttatgtgtcgttggtccggctcccatccttttcttactctccattgtcagctttgcccaagaaagagcgatgctagagtggaagggaccatgaggcaagtcgtgtcagagttctgtggccagacctcactgtcctttcccaggccagcgctgcccactaggctcccagggtgagaatggggcatgggagggggatagggatgaagagctaagtctagagctgtcacttctcccattccttcttaagttggctccaaggtagcagcctactctgctaagatggcggctactcattggctcttttccctgtatgttgcagagaaaggcatttgccagcatgcccggtgtctcatccaggccttgttacccagcagctgtagaacttgatcatgggcattgctcttgggttggcagctgaggaaatggaagctttctcattgtttgtgtgcccagcctcagaagttgagagtgggtacccacctgggcccacctctggtcagaacgtacctgacctgtgatagctgagccccccccccatactgcagggccccctctgtcacagaagaactgtgtggagggtttgaggccacaccatgaccgtagtataaagcgatcatatctgctgtgctcatgggaggagggtgtggctgtgtttcagtgtgtctggcaactcttcccctgttgtgtaacttaaatagatttgtgggactatgtccatttaaggaaacagggtcccttagctttcaaagggatggagaaacaggctataatctggatatctggactggtcgcacaaggtcaggttagtgaagacgctctgctgccagctcttctagacagacacattgactaggtacatggatgtggtgtcttacgagtcagcactccagggccccagtgttgtcagagtggcactgacagtgctttgcagtgacctacaaatcaaaagcaactagaatagttagtacacttactccatgttggtggacacagaaaacaccgaataatagagatattcttttctggttttttttgtttgttttttgttttttgtttttgtttatcgagacagggtttctctgaatagccctggctgtcctggaactctctttgtagaccaagctggccttgaactcagaaatccacctgcatctgcctcccaagtgctaggattgccgtgcactaccaccgcccggcagagagattcttatcttagtccaaatgcccagaagtttgcctcacagtgaggagcctgatgacacagaatgccatctgtatagtgtctcctcacactctgtctaggagtagttaggctgcctgggccacatgggagggtgaagaccacagattctcacacagatcatcatgatggactcttagtgtctgcattatttctgttttgtcttgctcccatttctctcgttactcctgattcttcctctaaatcagtcaagaatagagcgagatccgagtagaagcatatagttaactcagaacatcaagggcatgcactgcgttccctctgcaaagattaccttctccaaaattgttttttgatcattttggtttagtcacttgatgtctgtagcatgcttagctctgcaccaggcttgtaaggtgcacacagctgggaagcagaggaccagcagccaggccctgacttcaaggggattatgcctttcataccttcactgtgaattctgtgttaacactgtggaactctttttagggactttagaatgttgccttttctttgttacgtgagacacgatatcctgttttctgcaagagttctaatgaggtggctttgttgcattaaaaagatggtttgcagtgaaagttctcattggttttaggtttcggagaaaatcagggtttctcccgggtaatacctgtgacactgggaattgcttgttgcaggagactattctgtgccttgtaagaagtttgacagagtacaagtacccctttccctaagttttggcaactgaaaacatctgcaagcattgcctactatgtctcctggtggacaggggtgccaggtgtgagcgtgaccctctaattctaggctcacatcttctgcttaaacaaatcaatgaaatccccaagaaaaaaagcacttggagcaagtatgttctgtctggtccttgccaaagctcaaagcaacgttgtaccatggaagagttaagacaaagtcagcgaggtacatacccatctgatggtgcagcagtggtggtgaaatgcctcagtagattatgccttggcgatagtttcctgttggaaactcattaaaatccttcgctgtccataaacaagagaacgccttggacacagcatgctgtaaattcatcttgaatgatttatgaggaaatgggttccagatttggtgatctcagctcaagtagtaggcgactgcctgacaaacattctcattcccaagaacttgaagtcaactcactaagcatttgctgaagtgtaggttgtgagagctctggagtgtctaatgtgtcctggtaagacgagcgcagtgcttaagaactgccaccagcatctcctcagcctgtgacagctcctacgtggatatgagttaccctttatggtcttgaatctcttcctggtctgtgccagccctgccttccccagagagtgtatgctattagacatcatgtcacgtggttcttatttgacgctttggtcccaaagcgacttttcagagtcttggcagggacacttcctgcaagttctgtctgcccacagtgcacttacagtggtaacattcattaccttccctgtatgtctgagttctcacttctcacctacataccagtaacattagaaaatgcaggacagtatggtgatgcacagcttccaggtcatcctagtctacatggacagccagttacatagtgagaccctgtccccaaaaaggggggatggggtcgagggaagcaggacatattgttgatgaaagtcactggcagaaaggttgggtttggtacagagagaaagaaaaagaaatacagcacaaaacagactttttcctcatccggttgtcacttcttcagtaactcctgtgtgctgggcattggccgtatatctgtgaagaaatggacctttgtccatggggcagagggacagtagacaggccacctcttaatgtggcacagtgggtcccaagctgaaggaaagcatagaagccagtgggcactgggacatggtgggttccttgcttgtccggaagaaagggcagatgtggtcaaggcctcatccccagcaggaaggtaagagctgacgcaggaagagtgaagtaaacagagcagccctgaggaggaggcccctcaggattcggataggagcagctggatctttggggatttaccagatgaggagccctgggaaggcaggagagaggagggtggggcggcatagctcagcctttccgtccaccactgcctctggaccatagcaacactctctctaaatgagcatttaagaatgtcaaactctaatagaaaattgaaatgctaattagcagcgtcaagtgcttgtgcttctggaggctgtcatgacagcctctggtcctgcccagctttactttcacgcagtcactacttctcagttttaatgcggaccatccttttgtgagtagtaagtgctcacagtgggagtgtctggtaaatagtcctggggctgcatcctctcctgtccaggtaacccagcatcctccttagagggcactgtattggaaggttttgctctagtgttgaaaaactcactttattgctcatattagtccttgcggtgactaaagaaaaacctaagaaattggtggccaactttgggcagtggttggccgaggactgagatacctcctcatccttgccccttggccctgctttgatcagcctgatgcatctcctgcccgtcttccgtgttagagcagccaggaaacctgcatgctcacagcctcctttctcttccatcaggagcttggataatgggctgtgtgcaatgtaaggataaagaagcagcgaaactgacagaggagagggacggcagcctgaaccagagctctgggtaccgctatggcacagaccccacccctcagcactaccccagcttcggcgtgacctccatcccgaactacaacaacttccacgcagctgggggccagggactcaccgtctttgggggtgtgaactcctcctctcacactgggaccctacgcacgagaggagggacaggtaagccattgtcaatcaggatgggtgagggcacagctgtgctctttcacagtcattgctgtgtgtggatggggtgggtgcaagcatgccacaggtgnnnnnnnnnnnnnnnnnnnnnnnnnnnnnnnnnnnnnnnnnnnnnnnnnnnnnnnnnnnnnnnnnnnnnnnnnnnnnnnnnnnnnnnnnnnnnnnnnnacacacacacacacacacacacacatacatatacatatacatgcttcagttgactcattttaacagagaagttttggtcaactttaggcccaagttgactatccaagaaccaaatgcctggcttctcaggagcaggagacctcttgtcactgctctgagaattcagcaccagttagtgctgctaactgcactgcagtgtccactgtggcctgtcagccaagggctcccagtcctgcctaccctgaatagggccagctctgggggtacccaagcactccagtgtgatgtacccttcctgacttacggggtagtttctgtccctcttcccactcttcggcctgcctggccagtgtgggtggttgtcagcatgttcctcatttccgtctgcttgtcagtattccagcctggacagccctcgagttttcattcatctctatattctattgttacattctctgtgtgggttgttttgctttgtgtgacttttgagacaggctgccattttgtagcccaggctgtcctcagactgttaataatccctctgccttagtgagcgttgggagtacagccatgaaatatcacaccggctgtgtgagtttcaagctgagctctgtgtgccaaaaccatttcatattctctctcgtcccttcctcccccagggctccttctgtttcccaccacagggctgggtttcacccgcacatctatttgctgacttagctagtgctctataacgtatctgccatacatcctcacacacattccctacagtctttgtaagctgcctcgtgtatttgtagtcttccaaatactgtcccagagtgtgaaccatggtaaccagatattttgcattatttgttccaaaattgtttattacaaaagtttaaaagaatgtagcgtctcttggctcatctgggggcagatgcctcgtgtctgctctgacaacctatcatggctttttacccggagagctgacgctgccgaggctagggctctttctctgtggacagcttatgcagtggagttggaagagggtcctgaccggcctttggacacgtgtctcttccagcactgcactgtcgatgtctaccctgtagaacaaaccctatgctcacccctgtgctgtaatgacaccagcttaccctcaaatccagccttgtatgaggccctaaccaaacctccatggcctgtacctgccccccacctcaggtgcctggaaaggaaacagacaaacagtctagggccctctgtccttagaaaatacagaagaagaaggaaagccaaatgaatactcaacacacatgcacctccactgtgagaggtgtttgttgagatttttatgtttgctgactcttaattaagcaaacagaagcatcaaccctgttcattcattcatgaaggctggatgtgaatcccaagtgaacatgtctcattcattaaggtcaccagcatgggctccttggatagacttaatggaagaggccatctgactccttatattatttgaagtgtacaccgccagtaccctggggctggagaggtgccctggcttaggggttaagagcccttactgctctgacagatgacccaggttctcttcccagaacctccatcaatggctaataaccactggcaactccagttcagaggaagccagtgtcctcttctggcccctacaggctctggcccacatatggtgcacataggcaaaagcacatatgtttaaagatatattttcaagaggcagagcctgggatatgggcgggcgttccatctttggggagggggagtggttgcattgtgtgtcctgggctttctggatgccttgctgtcagacccctaaggtcgtgagcagtcttcattgcttcctcctccatccccagggcataaaaccccccagtgatggagaaagagtgcaggaagggctgttttccacgagtgaagatggcttggatctgctcttataaaagaagagacatctgtgaatgaagtacggaatcagagtaggcatggccgtagaggctcccacagtgtgttctaagccagactcccctaatctcagagaaaccttaagaaaggaagactgaaggagcccagctccccggtcaggacatgcacctgagacagatgaaaggcaggtcctccctggaaaggatgatccccacagcagtgtggccttgggagaggggaagccaggtggtgataagccatcacactgggaaatgtgccgaaattaaaacaagaagccaaattacagagaaattcaaagctcccattaggtatcacatcctgtgtaacaaccacaaaattaacagcttaaacagcacatacatttatgatctatatctattacctgcgttctgtgggtctgaatctggaagggagagcccggttagaggctgtaggcatgagtggcagaatcaggtccctggccagggttagccagtctgtcatcatgctggcgtgacaccctccttaaggtagtgtggaagtagagaagtcaccttcttctgaaacatgtgtcacactggggacatctgtcccctttgtacactgtgttaagtaaatcaagttgttatgttcctaaggaagagtgtgctgaacaagggcatgagaaccaggcaggagtcactgtgctctgtctactgcatggggcaagccctagactgagtggaatgctgggctgatttttgctgttggaacttctgggatgtgggacagtccatgggagtcggcaggtgagagaacctaagatggacgtgaggatgagggagtagccagagtgagagaagtaaatgcaaggcagaggaagaaccaagggggcaggaagtagcaacagcaagaccccggaactgacaaccatgaccacagctgcgggtgggggccaagggcactgcatctcccacctggggtgagcattgcagagacgactcgatgtccccgagccacagaacaagtctcttccattcactgctaccttgtgctagggatggaagagtgatccatttacccagaccttagctcaaccttcagggaaacacgtgggggataaagtaggccagtacttgccacagattgatgtcagtcagagccttgtctcttactcagtgctcatccagagtcaacgtccgtcagctctagggttttgtcataaagcctcctctatacagaccacattataaagccagccatgtgactatgaccatattaattacaatgcctcaatatgtttattaatgctaagtgtagatttttaaggatgagactttaacaaaaatgtgatttcttagtatcaattccctgtgtaatagtctccgctcttttttttggcaggagtgacactgtttgtggcgctttatgactatgaagcacggacggaagatgacctgagttttcacaaaggagaaaaatttcaaatattgaacagctcgtaagtttggggtggagcacacatgctctttggtttgggggaaaggttctcacagcaaatgcatgtgctatctgaaagtaaggaaagaatgccttctgcactcactagctcatggcattcgagcctgagcgaactgaggacaaagtgcaatactacatggtactaagtgctaaagagggcaccagagtccttttagagcctacttcttaagtgtgcacgcgagagagcaagcttctgtgtgtgtgtgtgtgtgtgttgcaaggtcagaggaagcaatcgggtgtccacctccgtcactttgaggcagcgtctctccttgatcctggagcacctaggtttcagctcggctggcagccagcaagcttagcagtggcctccccccccctcccccgccccacacccccctcggccagcactgcagttacaggcttgtgagagacacgctgctgggatgcagacttgtgagcgagcactcttaaccactgagcatctctctagcatctctctaaccccagggtccgtgcgtttgcatctcagtaaagaacataaagcagccgtgcccatccccgggaaaagccgcattctcagatgactggcgcacggcttgggtgccagccacgtgctctctgctctgagctgctctccattattcaggtgtgggcattgtcagaggcctcgcccttcaggccagcaaccagatccccccatcttcacaactgtgaagcctgttgaggtggtttcctgagggaaaatatgggagtgtctgtgctcttaagaagaaagcagaggcctttcaccgacttgagaatgtgaccaccaggaacaactgtcaccagggagcaggcaaacttagggtaaaggttaacacccttttcaagccccacagttagcacctgtggaggaaaagcagttgtgcctctgctttctgtcagtgccagagcatcacctccctcagcatgcatagatgagagaacggaaggaaaatccactcccaaggagatggtactgtcgtgcctcagcacctcaagtgtgttgatgagtgctccccactcatgggcaaagactgccacctgggacgaggcacctggggtgaggtggggtgggcgctgctcttgctaagaagtctgattgcgatttctctggctgaatttcaaggcagttgaatggcttgaagcttggcccttctgccccccccccaaaaaaaaagaggaacctaggggttgaggtaagaggtaacacatactggaaagaggagggtgtggcaatggagaaccccctgtaacctcaagagtgtctccatgggaggcctgcccttctccagggtgcccctggctctcagcactgcacggagaacattttcaacagcaagaccccatgcctccagacacactagtaactcttctaaatgccagcaggcactgtctgcataaagcaggaggcttaaaattaggagcagttgtcaacaccagaagagaggtggctgtgttttggtgttttaatttattgaaatgcatggcaaaggtgtgtataaccacgcctggtgctggttgggcagcagtgtatatgctgacttactgtttcgtaacctcacatttaaaaatacaaaaagtgatacattgatgttacatgtattttaccacaaatttcaaggacagaatttactgtattctcacatactaagcatgtccgtgcagccagaattacctccccctccacccccagagagctcctgcaggcacaggggtttttaaaatagtaaatggctgccatttattgaaagtgccgtatgcactgaccatgtcattgctgtcgctgatccttcacaacagctgtctgaagtatgtgccgtgacatctgagagcacgggttagggagctgcccagtgcaccgtcctggcaggtggcaaagcccagggtgagatgtggggctgagaattcagagtgtggtgtcaggtgtgacctgggaaaagcccagatgctgccatcaaaggcagctggagtgtcttaagtgacggtgggaatggagggaggtggctgcagcgttggagagaggggcgtttgcctttgatctcttcccgtttatgattgcttattgttagtttgagtctcagatgagcgctgcttgtcagagtctattgactgggttttgtgtaaagctccccagtgggtacaatgtcctttaactgacaaggtcactagaagtttgaaactctgtaggccctaggaagtaagaagtagaggggtagaaaaaggcacatacaattctgggcacctgtgcacactcccgacataggcctgttttgaggttgcagccatggcccagttagtcactggcaaagtcaagtccctgtcattgtcctttgttatggaggagtctacacagtcaacatggaggagtctacacagtcaataaagcggattttagaggaatgtttaggggatgcagcctatctcactgtgcattttatttgactgcatagcttttaacggttgcagagttctctggtcctctgaccctgttctcctagaagagaacattgctaagggacttttcctttaaggataaaattctttgtcctacatggtatttaagtgccccttttcacggttatggaaaagaaaagtaaggtttgtacagcaaaacgatatcctggagtcaagggtaataacagggaagggaatacagagcaaaagacagagcagatggtgtgaaggcctccctccctccctccaccaccaccagccctgacaggagaggaatggggctctgtcctccccggggcagctgcccccccatgtgttccttctgactacccctcccatcaggacgtgctcagaaggctcctcccagtgcacacagggttggaggggtcctcgctgacccgttgggagttctcagtagtaaaaggcttgcgttcacagcactgtaagttcaccttctctccccacccccgttctcacactttgtaactggtgatttacccaccttgaaacagcatgtccttaaaatgcagtgggtgttttacataggtgcaatcatggcctgacccaggacctactgaaagctagtttctgtcataatcaggaaaaaaaaaaattggtttgattttttttttttttttaataagtttggtggtttggtttggtgttcaaaacagggtttctctgtgtagtcttggctgacctggaactcactctgtagacaaggcttgtgtccaacccagaggtcctcctgtctctgcctccccagtgcttgagattaaaggcatgtgccaccaccacccagctggggaaaaaaaaagtttgtattacccagacatgtgataaaagtagtttcaagagtcttatctttgagtaagaagtacagctgtggaatgcaggaagaatccagtatccctggctggccagacagctcaaggctggctgctcttggcaaagccacttcctgcctccatctgatctccaaagtatctggacttccagcacctgaagccgcagccctgtgagggacttgaggattaaagacgggatggaagaacagagtctgttacaaaaacttagaagccattctcaaccagtgtcggattaaatcacgggtttgggtcagacaataagacagtatcttaccaggtacgagtgaattaaaaagctgaactgtaagaacagtttaaagaactgcagctttataggctggagagacagctcagcagctcaggccagggaacctactacagttcccagcagctcaggcctgggaatctagtccagaccccagcagtcagtcctaggaaccttgtctagtccgcagaaagctgagtgtggcaggcagcactacttgtaacccattcctgggaaagcagacagacaggaggagtcactgctcacccagtctcgctaaatgagctagctgcaggttcagtgagagtgagagtccctttctcaaaaacaaagaagagaataactgagaaagatgcccatgtagtcctctggcctctgtagacatgcaaacacactggcaagaatacctgaacagcatgcatcacacacacacacacacacacacacacacacacacacacacacacacacacacacacacacacaggcacagattttcaaatgctgattaactacagtagctcaagtcaagaataagggtcctgggctggagagacggctcaaccgttaaaggctaggctcacaaccaaaaatataagtgtaagggtcctgttagagatcccgctccaaaccaacactgtgtgcaggactgtggaggtgaatgggtgctgccagtgaattaaatagtttttgcttgtttatttacctaacagcttgtagtagatattttgagtctaggaccagtgagaatagagtgtgagaaaaatgccacaagatgtgacatttgccttataatgtgtgactgtttgtcatttgtgtgtcactcttgtgagggggaaaaatggcccagaaacgttaagtccagagtggtgctatctttcttctgaacaactgttacattctaatgtgtgtaaacttatttagatggctacaccaaaacaagacagctgatactaacttaaattggaaattgcctcattagtgagtcaattcatgattactcagtcacctgagtaagactgggcttgtccccgattgcagcaagatcccccaacatcctgacatcacctgaaattggtgctcgctctttttcactttgatttaactagaagtaacttgatgaaggttagcatgcgttaggagacaagcctgggctgccagctcttcattcttcttcactgtctggagcggttcccaggctgggagcagtgaaggttggttgctgtgaagagccagtgggtgatctttatgtttttcaatgatgaaatgtctccatctagtggaatttcagagcagtaaacactcactattaaaatgaaggtaaagcctttttcttaaacacatggtggtcagtataacttccaatatgcatttagatgctagacttacaactacatatatttctgtggggctagaaatgggaacagtgctgacttaaaatgttaacttggttttctccttgggggtggggatgggctcctggccttgtgtgcactaggcaggcacgcggccacaaagcatctacgtcatgagatgtacaaggcagaggcacacatgcacacatgcacgaatggtagctaagagagatgttcacttgacaaaggacatggctctccttgggggagttttgtctatgtaaattctttgatgtgtataaatatttcaaataagaatatggacacaatgtgattataattaaacagttttctgggtaagagaactacagtatcactctcatggttgatctgttagtttaataaggttaaaaaggaaagatgctaggagtttctttgtttgtttgttgtctcactatgtagccctgactgtcctggatcccactttgtagaccaggctggctttgaactcattgagattcacctggctctatttccaagtgcttggactaaatgtgtgctctaacacccctaaccaagaaataggttttataatccctcaaaattagagagatagctcaggagttaagagtgtgctgccagcacccacatcaataagctcataaccatctgtagctccagcaggatagaggtctctggtatccaagggcacctccactcctctgcacattactgcatagagaggcacacatgcctacacataattttttaatataattttttaaaacttatattagcactttgggtgtgtgtgtgtgtatgtgtgtgttttctactgttatttatctcatagccacacccacttggatgagttcccattttattcttttattctgtgactttctaaagccccaccagatgtcactggtccttggtacccctgctcagaagttttttctgtagggaacctgaaggagggaggactctggcttaacaggaggccagggtgtctacctaatgttgacctggggaaggtcttcccagcccaaaatcagtacgttttcttccctgactgagcatcaacagagcccagccaaagacaattttaaaaaaaagaaaaagaaaagaaaggcctgaggtttctcttgttaccttcacagactaaaaaaagaagaaaaggaggtgatgtgtctgtaatggtcagaggctgaggcgcctaatatggtgaccggcaggcctgtttccctggccctcatagatagagaggctttcatttggtgcaagtcacagctaaactccacgcacatgatcattggcccacccactgttaatgggaggaagctcacatgccataaaccttcatgaatccaagcgtatggataatagttctatatatagtgactgtaaactgagagtcggaagtgcccttcctgattcacactctgagaattttgctgcagtggctcagagatctcttctgccctccagctacacaactgcctggcctccatctgaatctgggggtgggggtggggggagctatgaatgtttaatagagtaacatcctgttgagagtgtctgaggaaatcctgttatgtggtgttcttatactacctgcagaaggtcatgtcttcttcctacttcgtcaagagcaagcttgataggtccactaagcatacatccaaccctcactgggcctcctactgcttctccaaagtaaactgaggctggtgtgtgtactccacacacacacacacacacacacacacacacacacccctcattcaagattgcctcctacccagaaagatgctcctccccgagccctaagtgggaaagtttccgtttcaggatctcctgatgatgcccttgaactcctcaacctcctactgggatttccacccttagcttatgtggggccgggtattgaacctagagcctcgtgcacgtaagaaaagcactctgacttcagcgcgtggtgctttggatttcttagggcccgtgttgaaagtttgcagaagggggcacaaggctacagaaaaggcatagggtcggcctgcagaattcccagctggatggtgcgttcaattcatgtcccttcttttcctttgcagggaaggagactggtgggaagcccgctccttgacaaccggggaaactggttacattcccagcaattacgtggctccagttgactccatccaggcagaagagtatgttgttgttgttgttgttgtctgtctaaatatctgcttttaattgtcacataaaatgccagtgacacagcacaggagcgagaagacctttcccagtggttaagggttgagaggctacagtcctgctgtgctgtcgagtctgcgcagtacactgttattcacttcgtggtttcctttgagcccgtccgttttctgattgagaagctctatgtgagtaccctagatgaaaacccagtaacttgctccagatgaaaaaccaatgtggggaaaccacagctgcagtgtgtgttactgagagcccaccgtgcgcctgcagtctgctccctgagcacttgggaggcagataattatgagagattaagcccacacacacacacaggagtcctctgcttgataatcagaaatactgagccttctgaaaagacatagctttttgttccccaggcagaagagcaacttggaaactactgcagttgtgggcttcgagggatattttccttggactgaggtctcggttggtgttgtggctggtcgaccttgaccagcagttatttggccccaccctcccactggagggaggcagttttggaaagtggtaggagtctggggctctcaaaggatggctgactggtcattgttcattctctttccagagaaacctgtaggaactcttaggaaatggggagggaggttgatgtcccaagctcaggaacatggatggcctctaccccacctacagggacagacctcaccagaaagagaaaggagtcactgtcggttgctcacggcctgcagcctgctgtggatttgcggaggcacagcacagaggagtagaccttcaccctagcctaatcctcatgcgtccatcattcttctttaagtcttttgtactcctacacttcgatctgtttctgcttctccagcactgtgttttgagctgttttacccccttcgttactagtgtgtttcattatcagaaaataggaaatatgtgtatttgtattgaatttttaggacagattggtaaatatctcctgtgtcttttcggaatttaaaacttaactacaaagtaacattcctttgatttaactgagaatccacttgggggtgcatatttaagtcatatttataatgataaggtttttttttaatattttgggctttttagagtataagttagctttttaaaatacagcctgtggtttttacacgtgcaattaatcggtattttgcacaagcagcgtgtggttaagtgtaacctcttgttctgcaggccttcctctcaccagttttacacagcattttaattgagttactgatacaaaccaaaaaaagacatttctcacatagctggtgtcgtatcctttacagcagctattgctacgctgggattgtggagagtttgggtacttctcaagtcactgaaggtgacgctccttcggtgaaattctttgactcacagaaggatctgatggtgaacttcctagctacattcaggcatggtgaattgaagcttcatttttaaaaccatttgctttcatagatgaatactgtgatggtttggtcctgaaagctgctcctactcacagattctggtggaatgttccagaactctcccttgggctcttggcatacttatcctctcatatacaatccagtgctgaaatgtgaacggattgccgggcgttggttaggactcagcagctcaagtggagagacaaaagacgcattccggtcctgaggaggcctgtgaggcttcctgccacggcacaagtgtgctgtcagtgctgttgcaagggaatgttaaaatgtctgcaccaccgactcatttttatggacatgcccattaaccgtgcacagctttctctcagatgtgcagtaagcaatccctgcagctgtgtcagagaagcgcaactgcagggcacaggccaggtacttggtaaacgctcctcacgaatgctggacagggagagaaaatcaaaccaggcttccaagaacagcagccatctcagatcaggggtagagctgagttcccgtcttcagaattcctgtaggtagagactaagtagaagtgttatctgtcttccttctttatccatcctgagtgggctcctttaaaaaaaaaatcatgcttgattgatgatccttatactagagctgagtcttggtatttcccaggagttgtaattatgctcagaaatcaagggtcgtacagctgagctatggaatcgtcccctgcagttggcatttcaaacaaggtggtgggtttctctctgtgcgtgcaggtggcatttcacacacacatccctgtcgtcctggagggaaggaacacaatccatgattcaagatttttttttttttaagaatggaagagatgcagagtggatagaatcaggaaagattgaaaaaggactgaatgaagctagaaaaaactagtttggggcagtggaagcaacattagaggcgaaggaatttgtggaggaaaagctagctacattgctcagtcacaagtgtatttattttcttgcctgtgtctcccttgaaggtggtactttggaaaacttggccgcaaagatgctgagagacagctcctgtcctttggaaacccaagaggtacctttcttatccgcgagagcgaaaccaccaaaggtaagctaaggagagggcaaaactgatgtgctgttcagatctgaaggtctttgggatcggaaggcgtggctcttgcctggtccggggccttctagcctgagcctcctgctgctctccagctcccctgaagacgctggaactgcatttagctcccagagatgatcgggctcagagggaggcgcctccagaaacagaggccaggcttccgcctcagctcagactccgtcctgttctcctgttcgagtgaagggcgggaacttggtttttcttacctttttgatttggggtgtgtgtgtgtgtgtgtgtgtgtgtgtgtgtattttcaagacagtgtttctctgtgtagccctaactgtcttagaactcacactgtagaccaggctggccttgaactcagagatccacctgcctctgcctcccaagtgctaaaatcaaaggtctgcctgccctaccaccacccagtttaaatttgtttttctttccttccactctgttttgttagtggaggactccttcctcttccctctgtttaataactcacttcagcaggcagaggggcagagaaccatgctgccacacactggtgacctgtccctgtgcagattgccaagcagagctttggagcttcctgctaggggatagacttccatttcttttgttcccaccctctgttcctcccgcacccctgcctcccatcaaccacctctgtccccacccctgcctctccaccaaccacctctgtccctacccctgcctctccaccaaccacctctgcccccaccatccctgcctcacacacacacacacacacacccacagccccaccacacacacacacacacatatgccatccctgtctcccagcccctcactatccctgcctctcagctaggccacaggaaatgaaagcaggaggcaagctcacctggagtctgctcttcatctatcccagtgggatttggtctgtgcaatattagacaacacaagaaactgaaaggaaactttgagaaaaaccagaagtttttagttccaagagcaaagtcaactgtattgctaacatctctgaacactggcaggatagcaaaagttgtctttgtcctgttacagagtggagatatatctgtctctttcgtatgtgtgtgtgtgtgtgtgtgtgtgtgtgcgcgtgcgcatatggtttgtaataattattaatcagaatagtcacataaatgaggcctgcagagcagactggggctccgatgattggtgtggctaatgcttgcacgtttaccaggtgcctactcactttccatccgtgattgggatgatatgaaaggggaccacgtcaaacattataaaatccgcaagcttgacaatggtggatactatatcacaacgcgggcccagtttgaaacacttcagcaactggtacagcattactcaggtaaccccagtgccgtcaccgtcaccgtcaccgtcaccggttagaaactggaggctgtgagggaggaggaggagatacgggacagagtcactaggtagagctgtcctctgcccgcccacccccacagtcagacagacagatggagtccggggttctgttgctcttctgccccagataggattttcctcctgtgttttccagaagttccccccagtagaaggcagtagtttaaatcttgaaagctgtatttgtatattaattttcataataaaaatccttgcacgttctttacctttgccttcattgccatgcagaactgtgagaggaaaggaggaaaggagctgtccctaggcaggctcagacggcccccagggagcctcacttgatccttcaccgcagcagagggaagcacattcttgcactctgtagaagaaaatctgtgctgctgcagggttcccctccgccccgcccccactccccccccccccccagcttgcctgctgaggccacagctcccttacctccatctcctggactttcttggttttttgtttgtttgtttgtttgtttttgttttttcaatttttaaagactgggtctcgctatagccctggtggcctccaactcagaaatccccctgcctctgcctcctactgctgagactgaaggtgtgcgccaccatacccggctactgtgatgactttaaacaaagattagactttgtctttacgtcccataatcctgttcttctgctgttcttggccattcagttattgggtgtatgtgcgttcatgtgcgtcttatgtaaatatgtagctctatgcgcagtgtttagtgtgtgccgcttgccctccttggttaacaagtgtgtcctgctaaacaatgcatgtgtacatgacccctccttttttccaaggtaaggtctcacttgtagccctagggagcccagtatccactttgtagcccagggtggactttcagagtttgagcaatcctctagtgtcagcatcccaaatgctgggattacggacggagccaccacaccctttttaccaccattgaaaaatacctgtgctgtttctgccacaccaaagagacttgtagccttttaaaaataacaatacgaaatgcctatgtactgattctggccactgatgagcagttaagaaattaacagtggctgagccagtgatttgggcattagctctctcactctatgtggattctaatgaaatactgagagaaatggagcagaaaacctccttgcacttcagtgatatacacaaaacgcctgtatgttataaggatttttttcaaatgctgaaatatatttcattacaggcaaacatccgcagggtccccagggtttggatcatttgaaaatagtgtgctggaaagggcaccttaataacatcataaagctgaaggagggagccgatgtgaagcaccctagacgagttttaatctcagggaaaaaaatccatcttgagttagatttgtttttatattggcttttcctctttcctcttctctcttgcacatagaatgcctttgaaataccgacacataaataatttcctgcctaaacatctcagaaacagatttaaaaaaaaaaaaaaaggaatgaaaagtaagttaagaattcccagaaaagagacagccacagtttgtgcttagaatccaagaggcttccagggacgtagggggctttggccccctcggttcagggtctctctggcccccatctttccctgcctgcttactctctgttggcgtttagtcagtctccccatacctttgctagattctcaaaggaatattcttttcaaaaagaaggggtgggggaagaccaagttcccagtaacctgaatggaagctactgtttccctgcttttcatgtcactgagtttctgtgaatgttgttaatttccattacttctttaaatccagactcctaaattatgcatagaaagctgtttaaaaggtcgtgtttttgtttttgtttgcttttagtggaaaattgcaaaaaagcaatgtgagcacacaggagcagtagagtcagaaggactgcagagaatgtgacatcctctcccgctgcaggtgtcctcctgagaccggctagctctaacagaccagaggtctgtgggaggctcctatgccaaagtcacattttaaacagacatttaccagggagagtccctcagtccctagataccggaagggacagggacagtttttatttttatatgtactttttgaaagtagcaagggcattttgaatttgaggcagtgaatacgagttcattagactaaagtacacagaagccaaagcaggccgtgcctgtgagcagcgagcatgcccgatggtacagcggtgtccatatctgacacatcctcatctgcctccagcaaatgtttgctcatgtgcgtcgaatctcctgtggcctgtgcgtgttgtcgttacatattctgctcttctctccctcaccgctgccctgctcctccagagagagccgcaggtctctgctgccgcctagtagttccctgtcacaaagggatgccaaggcttaccgatctgtctgtcaaaaccaaagatgtctgggaaatccctcgagaatccctgcagttgatcaagagactgggaaatgggcagtttggggaagtatggatgggtatgctgagattcaattactctcttattagcttcctcgtttggaaaatcccaaacatcaagatggaaggtggaaataaagatattttatgatcaggacaaacagacagtttgaattattcaacttttatttggaaaaatttggaatctctcaaagagagctagaaacaggcaagaactacagctgtctccagttgtgctacagtgttccaacctggctcaatgttgccgtcagggaagtcaccttccatctttcctagtgcatgcatgattatggattataaggactgttttctttattaattccctttcctgtagagaaagctgatggtttgtgttttaacttaactgtggtttcatcaagttgtaccccacaaacttctggattggctaaagatgcttgggaagttgcacgtgactcgttgtttctggagaagaagctggggcaggggtgtttcgctgaagtgtggcttggtaaggcagagggcacattctgttttggctgcatctcaaagccaatgaaaaggacagttttgaacagaaatgtgtatgtggccgttgggacaaagacccttaacctttgtgactagatgggctcaagccacccaggtttgcagaagtcagtggcacctcgctgtgttcacctgtcctatttcatgtggctcattaaacacctgcaggacaggaacccagtgatggtgacgctttctcttcctgtgaaatgggatggtaagatgccatagagtaaggtcctgggctttcttcacaccaagcctgggtctaaacccttgctgggtgattaagtataaatgcagggcctgtttaactcctctggctccagtcctcatctgtaaacttggaatagtacctgcttcgctggattatttaaggattatatcagacatggttaaaatctcctgtagatcttggatccatgcacacatatcttcattgtgtgcacattcttcagtaacggcaactgcactgggcccttgagatggctttcatagccctctgggtcagttgcaactttacttacagacagactataaacttagacccctccccaaaatgtttgtccataaaatgataacaaagtgtattggggtctcccttccttagagtctacaagaatacaacatgtacagatggtcgtaaggtgtcaatcttaagccattacataagcaccagggtgtttcccacaggacatcagagctggcgtaggtgcctaggcagttacccaagctgtgaggagtggagatggcactatgcttaaagttacaaaatgttatcagtcagatcccgtagaccacctaaatgatgtcagagttcccgttacaccaaaaggcagacactctctgagatagaagaactctttacacctgccactggttctttttcacttgtttttcccctgtaggatgcatgttgtaattttatgttttaacagaataataaatgcttcagatatagaccccttagagtggaaagtcatagatgacacctaggtaaatcttagtgtgaacctggattctctttcaaattgtaagcaatagaatctcaaattagatttttattttccttttataaaattatccttcaaagccattggttagaaatagaacaagccagaattctgtctttttatttgagaacagaaagccaagctagttcattcctgttttactgatgaactgacagtggccatgagccaggtctggcctttgggtcagcttgatttttaaagacgtacttaaacatgtcacatgtacgtacttttctttcctggctgctctttgatttcccagcccacctgatagaaggcattgttcctgtggctaactcatgggaagctggagaaattgaccttacctgggaaagtatgggcaaggagatggtgtgctcctggcctgtgcttaagggtgcacttagcttgtcttctgaaggactcagtcaagtgtctcatccagtagacagttgaaagcctactccaagcatccttggtatggccagatttttatagcctctaagatggaatttaatctaatttctctcaggcttttcctttatctaagggacagctgttggatactcaggccaattctaaatcctagactgtcatgacttaaataagagcccagagctttctggtgtaaattcacaattatatgcataagccataaaaagagtgatacatatcaaatgggaaaagttagtgaattattaaacagctgtgagtaaacttgcttttccttaaatacttgacagagtccttgccattatctttgctcgtaagaactactttaaggtttcaaaatttaaagtctgattttatgcacaaagttgctggtcaaaattatttttcccatcaaaagagtacctttggattgacttactgttgtggggtatctgtaggtacctggaatggaaatacaaaagtagccataaagacccttaagccaggcaccatgtctccggagtccttcctggaggaggcgcagatcatgaagaagctgaagcatgacaagctggtgcagctctacgcggtcgtgtctgaggagcccatttacatcgtcacggagtacatgagcaaaggtcagccgcacccctccccctcccctcctctcnnnnnnnnnnnnnnnnnnnntccctcctcccctcctctccctcctcccctcacagggctgccggggaccggaatcctcagggattccactctgctcactcaggataacacttagaaaaggggaacatggagtttgcccctggattcctgagaagtgcagtgccttttgcatgttccacatcaggaacgttcctctgcacagttaaaacatccatctttctatccaagctaatgcagagctgaggctgtgagagctgctgccattttgaatgggtggcttctgttcggtttccctttttagcgctaagtaatcaatagcagatggttgctgagttaagttctgtccccatctcaacatccttccccccagctttccccttaaacatcaggtgaagaggtgacacgcagtcatgacctccctccctcccctctcggcgcatgcatgtgttgacgcacacgtgagcatgcgtacatcattataatcaaaccggcattgttggggaatgaagccagagatcattttgttttggaaaaataaatgagccaaacaagaaacagccttaaaaggctgtgtgcattgtacatcagaagacaccagggtaatttttcttctctgtgtactttcttttaaaatataattggaattttttcctggcagattatatgccctttggatccagggttattttgtaaataactttgtgattaaagcattaaaaaaaaaaaaaaaaaaaaaaaaacactgacagccatccagcccctgcaaatgattatctccgcctcggtgtcagatccgtgcctcctcactcagcctcacacgagtggctctgaagctctggctgtccgaggcacaggcgtgactggctgggatctaattaggaagctcctgccccacccatattccttggatgcttaaaatctgaaaataagtcagcagttctgaaagtcccttgtacctgaggcacctagagagcttctaaaaatacgggcatctgtgtctgactctgggattcctgatgtagtggatagagcctgaggacacgcccttccagcaaatactgtcactactgttgctacttgtcggagcctcagcctgctcacctgagctggctctccacatcagtcgcctgtacgtcgtcggttactgggacatgaaggatggtttggttcctcctggtgacaacataaaaggagacgttcatttcttctggttttactaactcctttctcactgcttattttcagaagctacaactcgcttcttaaaacataaacttgatttcttggtttttgttcaaagctttctttttccattgatgcaattatccttttcatctcccttttacttccactaaggaaatcaaatacagccactattgagaatctttgcctctctgagtaaactaaaattgttttgtttcattcataggaagtttgcttgacttcttaaaagatggtgaaggaagagctctgaagttgccaaaccttgtggacatggcggcacaggtgggcctggggtcttaattcaggctgtggctgtaccagcacggactctcaaggtgttgtggtgtaacagctgtgcccccttccctgggtttccacaggttgctgcaggaatggcttacatcgagcgcatgaattatatccacagagatctgcgatcagcaaacattctagtggggaatggactaatttgcaagattgctgactttggattggctcggttgattgaagacaatgaatacacagcaagacaaggtgggcacttccagggcagtggctcctgattgatctttgcctgcacagccttctccttaccttcatttcctccctcttccctttgtttgtctgatctggcgcgagctgcacagttctcaggtgggagctagtggatctagttggcgtgtgcagtgctggtctagtaagtgggcgtctgttcccatggcttgcctggcttttgggaagtatctaggcccacggtgttccacttttggagaaagaaggctttgagaagccaagttatagctcattctccattagccacctctgagcagaaatcaggtgacactccaagtcagacaagttcctttacaaaggaacaggcgtggtgttggaaaacggagaacataataaatagcaggggagccaaggctcagaatgcaacaggagtaggtagcgccagagcaaagacacctcctggtagagagcctgcacatggaggcgattcctgatctcagtcagcagctgcctgccaggcccagccaggaccagctgggaccagcctgagactgagctctgcagagcgctgaggagaaaagaaatggtctggagggcctggaggactgcagtgctggagaagccgtctcttctcctgcctcacccaccccctgcaaagggtcaaagacattagttttatgtaaaccacgtaccagaccagaagccaacccacttggggaggagggattgtttgtcaagcaccagatgtcaggaaagaattcccaaggtgttttctgccttcctggctggctgcttgcatggcagtgtccaggcatagcactgaggaactagcaacagtggaggcctctgtgtgggttttaaagccggaactcaggcagggagtaggtttccttggtgaaactaaccgaagcctggccaccccagccaagctgagcagtagtggggatggattacaggatggtgcattctgcagttttatgttgaatagtagttgtttcgctcatttttggcaattccttccgcctttcacttgcctcagaatggaagtgcagtgaatgatgtgagaaaatgttaaactggggccctgcctaggtactgacactatccaagtgctcggttgcatgtcggacaaaccgcccagctatttgaattccccactcccacccctggcacacgccatctcttgcccttgtgggatcctggggggtacggggggggggggtatgcacacagacacacacccaaagtcaggggtcacaaaagcaggctgtatctctaagcagagaggaatacagacgtgacttggtgacagggcatgccaagagggtctgagtgaatatgatcagaggccttgccctgagggagagcctgtgagggttgataaccagcatgttccatttaggaaatggctccaaagaaactcaggagcttccgtctgtgtgtgagaaagtctccgtggcagagggagcagtgcaagactgtttacttttaactagactttgaactctgtagagtctatggttaacacccttgacccatctgtgaatgagaggtgtcaggccaggagctaacagatgctaccagagtactgttgggatggactgggtacataagtcatgcatcattcataagggtgcctaagactgtggcctcaggcggctggcacctctcatgtcaggttctgcactggaacccatccagggccctctcagcctggccatgcagccttccttcccacttcccaccatgactgcctctctgccctgcctcccccccatgacatccagaccacagtctgaggccctttccaaggacaagcctcagtcctttgttcagcatttccttgacagaagagtccacctttccctcttagaatattatttcttctttcttatctttgtcaactgtcttcagatgcataccaaacactgaaaagggtaagcaataagggttacaggagctagagtatgacaggagagacgggcagtctgtgctgtcctgaagctgagaaccaggaaaggccaaggcacgtcaggacctggaaggggcaggaaatagacccatagttagcatatttgttcatacaaatcacaaagctcacaagtggaaggtccggatttgaaaacagtacagcccacctgaccaggtgtgctcttgagctgtgcccactgtctccccccaagacagtgaatcagagaatagaatggaaaaccagagagaattagtcctaagtcccacttcccctttattttatggaaaaagcctcaagggacaacctctcagattcacatgtgtcaggggaccagagagacttttccttttgcagccttggctagcccagctgttcctacagttccttcactgtgcctgccctgccctggcctgtccacgagatggaaaggtccggcatgtgtttgccaatgtattctgcagatggcatgtgtgctgcatgccggcgttcctgccggggattaataagctcctctagacagctggtccatgtgcctaataatatttgcaagtcgggttttatgtcacccgcaggccacagccgtgccgcgtgttgattatgggagtgcaggcagtgttctgaaacatgtgccaaatgtagctattttaggaccatgaatgacaaattgtttgcaaaacagttgtgagtttcccatctcaaggtgctctgaaatgtctgtcaccacggacagacacacacacaaggtgtgacagcacaggacacaaggacactgcagtatggagctctgttacaggtcttccatgtgtctttgtctcctacaagccccatactcaccccctgcctgcctggcttgtgaggagaagcccagtgtcaaagaagaattcaagaccaggcctagtgcctatgaaggttacccttcacttgacagcattctagaagcaactagaatcatttggggttccttgtaatggcctggacacttcaaaataagaactagttcttgtttagtcataagctctgcactaaattctgtccatctggagtcgcttaaataatccatagcaagtgtttgaatagtttgtttatcaaaggaacttggctaaaagttgttaaggagatacccaggccaaagcagaggccctgtgtggtctcagctcctctggggactgaagagggaagatctcatcagcccaggagttcgagactggcatgcacaaaactgtaagattccacgtcgaaggaagaaaggagggaggggggaacgcagaggaagcctaagggcacataaggacagttggctagcatgagaaagaacacaagaacattaaactcatgcagcaaagcccagcaatacccactgacttgggccctgggcaagctgggtgattcgtccatgggcagattacttatttttaactgcaaatgcatcttccctgtctgtgcgtgtttgcagctactggaaagcacttgtgtgtctaacctagccccagcgagtaggaactggacagtgtcgcttgctgctgttctgtttttactatacagaggaccaggctgctagagaataaacaaatgggtaggttgcagttgtactggaaagagccaattaccattcagggttaaaaaagaagctaaaggccctttccaggaggcaggtgtaggctatggttagagtggcactgtcagcagcagagaagggagaacgtcggggccatcttaacatctcagcgagagagaatgagtatgagttgggatttgttgtatttgaggtgtctgtgccggtgcatctaagcccagagaagctgctgcagcatcgcagctgatccactgccacagcagggtcctctgaccctcatccttcccactctgtcacctacgcctctcctagaactctactgacagccacctctctacccccagtcccacgatccttccagaagttactggagcccccagctgggcccagggcttcgaggtgaggctgtgctcttgagccacaccctctcctcagcatcagttgtttgctcctctgtcacagcccctggccatccgttccttctcatggaaaatgaaaatgggtgggagaactctccacagacttggtctttttcctcattcctcaagcagctgagagctggctaatgctgatttgaacctggcacactcagctcagctagacctggccatgtttagcaatgacttgctcttgtggacacttgatttctcttctcttctcttctctttctcttatcttctcttctcttctcttctcttttttttttctattttcttttttaaaatttacattcatccagtaaagtagacaaatctggtatgcaactgggtatgtgtttacatagttttgaaagcacctcacagagaaagacagacctataaagaccatttcattccactctagtccacaatcggccccagagagggctgttttctgttgcttcagattccctctgcctgtaaggaagttcatgagtgtgacttcacagatcccttccttagtaagccaccactctcaggaatagcctcgcctagccgtgacgtactctttgatctgcttcttgcttcctgtaacaggccttggcttctcacagcagactgatatttcactgagcagaggtaccatgtgccccatcactgtacggaggagcagtagggcaaactctacttgggctggtacagatgaagctgccgggcgggagacacacccctatctcccgggtactcaccctgtcagaagggctggtactggcttgtcagcagcaggtgctgtcccaagaacaccgatttaaaaggcaactgcagctaggtgacttgcctggtttggaaatcagaacccccaggtttaaaccacttctgtcactgacacacagggtggcctcaagcaaatcagctacctctttggagcatcatgtttatcctctgtaaaatagatagtaacagggcctgcctcacatggatactatatgattgagtaagcaatctataaaaatttgagggtggtaaaatatgaagaattattttaaaacttcaattttttgtgattgacatgttttccatagagagggttttatggtattaaaaatcatttaaagagaaaaaaatgttagtaatcaatagaggaaaggtacttataaagccataatacacagccagataggtggatgattgattgattgactgattgatagatgatagataggtgagtggatgtgtgtggaatgtgtgcatatgaatgtgcatgtgtacaagagcacacacatatcattatttatagcccagaccagtctatttttctggttctatctacatgtcccacagaccctctgttctgaactcaacgaagggagagtcaactaaccctgcccctccattgtcttgggcaggccttcattctttcctcctgttaagaaccattcatggctgggtgggtatggtggtacacacctttaatctcagcactaggaagtcaaaggcaggcagatctattgagtttgaggccagcctggtctgagttccagggcaaccagggctacatagagagactgcccactcccacccccaccctcacccccacccccaaaaaagaaagaaaagaactatccacagccccgagctgcatgcacatggtttttatttatatttattatatatcattattgtgtctgacatcacatatgtacataagttctcacatgaatcctggtagcaattctcctggatatcactaacacaggtctcgctgttcctctgtggggatgggggcctaaagactgaatacagccctcatgagcacggaacatttattggcactgtctgtgtacagcagtggacatagctcttatcactgcccttctcctcgctctctgcagacacacttttctgctctctgtgcagtatgtacaggcttcccagaaatggagtgctagaattctgtaatcctgcaagaacccttagagaaggttgttgcttatgtcggtgtttgctgcacactgtgagctggtctctgggggaagttcaggagctagcttcccagctagatagacctgtgctcagatgctagcctagctctgccttcccttgggttgcagcctctctgggcctcagcatagtcatctgggaccccctctctggtggctgtggcttagaaagggcagagctgtttggtgtcctttgcttctgttctccctcacaggactttctcctcccagacctcctacctcctttctctgtattcctcactctgttcaaaaagatggccaggcctgggctgactctgagcctggccggagaagtcgtggcattatcttagtatgagtcctggaatctctgcagatctgctcgggcacctgggataagttgctttgaacctgccttcttctgcaaacaaaattgtcacacggtctgagaacagacaggaagcactcaccacagaggacttagtgcagttggcagtggcattaacaaaagcagtgataagttgaccctatagacacatacagccgtcctctgcatacacgcccacagatagtacccacgagccatgctgtacagggccttcccactgcctcctgccaggccttgtccccatttgaatcatgaagagcaggaacatggagtttctctgtgggtttggtgggttggttgatttgttccaaggcagcaaccaaacgagcatataggaaacacatgtcaaaacgatgtaatctttgagtctgtggactatttggacaaaaggagaacactcagaactctgggtaactttgttactggtttatatattaagtagaacaagaaaaatgtgtctgttcaaatactcccagtattgagcatttaaattgaatagattattgtctagagtaaaattcacttataaattagactacaaagaattcataattgttacagtttccatgttcattcgttcacgttaaaaattgttactgcataaattaacacgttctttcttggagaacatattttagaaagatttgttactttaataactctttgtgtattagaaatcccagatgccggtgctaattaaatgtaatcagattttggattcaaaaagcacagtagccatttagcacaaaggagcaggcagctaggttgacaaacacggtcaggaaggactgggtccctgattcttttagctttccagtttcacaatgcagagctgtgaatgcagttcctgtctttcctttgttctgatgactggggattattagactcaggccgcccgccgctgttccagctcaaggactcctgcagaattattaatcagctgcttcagaggccctgtaatccagtggcagatcaaggctgatctcaccacgaggtgccctccctctgctcccctcagcgtatgaatttcttgttctctgtcaacaacagcatcgccattcccacactgtgtgctgtgacctgaacagcaaatgtcagcagagaaggggggaggtggaatcctgttaattgttgaatttaatttaattctttccttgctaaagaactgaacccatcttttaagaaaagcaaacctcttcccgtctcttattccccaggcagagcttttaaaaggctgtagtgaagtgaccaggccacaccaccccacaggcccacacggggagtttatcatccccagagctgccagaagccatgtgctgagccccacgtgcagaactgagccaagctgcctccctgaactgtccagggccagagtttggtgcacctctgtccctgggcagaagtcggcttcatttgtattccgctgcctctgtctctaggcttcctaccactggtgtctctgggagggacagctttgttcatctgctgtagcttccgcctagattagtagtcaggggagcagggcagatgctgggaaatggagatgaactgttgggagcatcatcccctcctagcaaggctgtgctgacagccagatgaaataaacgaagggggcttttaaatcactcatttctccctagtcccttttaagattaaaaatgcttgcagggtggcaggaaactgatttctaccacttccatccttggacagctctgtgaggtggcctagggaatgcagacagggcctggtgccagcacaggtccctgagccgactctgagcaccttcctctgtctgcccagcccaccagtagtcctgctttgtgctcacaggggcatcgtcctctcctctgtgctgttttgggcagagctgcctggcagttgtttatgaatggtcaggagcaagccctcactttgtacagcccacgtttcttggtaatcgtcactaaggaagcagatggtcaccctctgtgattttaaagtgtttaaataggaactgcagactgccatcaaacatcagaaacgtcttctggcttccttgtcgtactctgctggctggcagaaggagcctgcatttgcatcagctggagagtgagggacaggcagagcacatgcacactgcctgcagctacgagcctttctcctaaccaaaggaaggtacctgggcccaacacactgctctccacagggtcccagaaacataggcactttgccagattggaaagcagaagacagtttaaaccaacctgtggtcatgcttgtcttctgtacgtcccctcctcttgggacgttttttctagactcagagccaagccccagtatgatgagcctgtcccactcagtatccccactgtccacactgcctagcacagtgtggcctggcgtcgcccaggtccctctggtgggtggctcactctgtctgtgttctgctacattcttaaccgagtaatgggcctgccaagaaccctctctatccatgctcactgttcagcccccggggagcttgctcacgctttcagcttgaacgtttcttccatggatttatcccaaacagaccttggatctgcgcctagttaatcagcccagagttttacattatgttcaggcccaactcctgtctcctggcactcaggtttcactcatctctcccctctcagagtccctgatgagacagcactgtcttaatccttgtcaccttctctgtcagactccttcctccacgccccatccccagccccgtaagctaaaaatttcaaatggaatatcaatcatcctttcgtgcagctggattttcctttatatttattctcaaaacatgacgctaaactctatgaacttagagtggaaatttcagcagaatatgttaccaggggtaactggaaacactcagtttatgatttcagaagcatttgggaaatttgaacgtcatccttggcctattatgagaattaggagttttcctctgccaaatttgaccgggtttgaaattattattgtacttgaatcaccaccaaattccaggttgggtcagctttgcttcagctcctaacacaggatatcctgtcctagacttcttgctgtctccaccatccagtcagcttactgttactgccatagtcatggctgctgttcttctctagggtgactgtacagtcaaagtactacatactgttcagcattgtataggataattcgcacagtctgtggctttggagttaaagaggctttgggggtggctctttggtttagaaacctaggctctattgttgaagccagtgcattggatggcttcctctgctgccctggttctttggatcgcttcctccgatgccctgcttctttagctggaggagataatctctgagacagtgcagtggaactgtcaccgacagtcccaggctggactgagcttgtggtgtgtgatggccccaacaggcttgtattgaccccagctgtgatccgttctgtgtctggggaagtcatgagtcacactggtcccttctctgtcccccatctccctcatctcctccatggcccgagccatcatcttcgagacaaaccactttgtagctctgtaggttcagcccagtagctgcattcctccagctttagaacattcctacaggaggctccctcctcctggcgaccctggagtgccccacgctgtgctcagggactcggcggctccctcctcctggcgaccctggagtgccccacgctgtgctcagggactcagtggctccctcctcctggcgaccctggagtgccccacgctgtgctcagggactcggcggaggacacttggaattctcggtggctgatggatgagtgtggggattctctgcatcctctttccagcttttggaagtttcgaagggcagtgatgctgagggcctttgtcagtgcaactccatcaaagcattttctcagctctcagcttgttacttactgggcatcagacactctgctgagacctgtgtacctcctgccatcccaagttacagacaggaaactaacactggggcttttttttttttttttttttttggtttttcaagacagggtttctctgtgtagccctggctgtcctggaactcactttgtagatcaggctggcctggaactcagaaacccgcctgcctctgcctcccaagtgctgggattaaaggcatgcgccaccactgcccggctgacaattgggcttttaagggtctggcaaacccagtctgcaagcccaggtttgcctcactccaaaactccttttcttcatttattttaacgtcattaaattccgtctttaccagctccactcgtatctgcagagcctgatttctacatgaccattcttgccctttggaagaacattctagcccagcccaccgtcgggcttgctgccactgtcactacagagaggtggtcctttttcctagctcttccttttacatcattcagaaagcagccttgggacaaaaggtatctggagtgtccctgtgagcatttcaaacattgtcaccatcttaacgtatgaaggagagtccgctacaggaagctactaagtcaagacccgtttctgtctgaggcagaagtagaggacaggtttcctggctgaccattgggcatgcagccattcctttaactggactgtgacttgggcttggagtggcccatcctgatgtgactctaaccggacatcgcgtcttcacttaaagcagagagcactaggctgggtaggctgagaaaagccatcatctcttacattattatatcgctagtattttctttgtagtcagttttttttttgttgttgttgttttggggtttttttttgttttttgtttttttgggttttttgttttgttttgttttgttttttttaaatcttggtcaaagaagacaacatatttggccattggggattgagtaagtcactgctcaagtgggcctttgttgttttgttgttgtcgctgctgctgctgagcagttgtggtttaacagctttagccaaagtactgggacagtgtaagtatagaatacgccaaccttgaaggtctgcgctgtgctcggagctacactcagcagcatggagcacggggtctaagtgctctgacgctgcagccagtctccttccacacatcccgtttccatgccttacacttgttcctcgacgtgttgttctctcagctgaagaacagaaacgtctgcgtgtgtcagatgtgcggcacacagagctagtaccgatgatctgttccataatagcaggcgcttgtagtgtccagcattaaattgccacttctgatcaggttcctcccagaagacttcaggaagaagtcttgaggagacagacagaaggctgcagctaggcaagtggagggaaagatggcatttcaaacaagccgatacaacagaaggtctgtgatcacgccaggtgtggtacctgctacaggagcgaaacgcaaactaacctggattagctgtatgtttgcaataggaaaaaccgaggctgactggatatgtgcgccctggaaaccaggtggtggattctgatttaattcagttgggaccctcccacatggctacagaagctgccatttacaaggattaattggaggggcactgctgaaggctaggtaccaaggcagggggactcggcaggggcactgctgaaggctaggtaccgaggcaggaggactcagcgggactggtgactagaatctgggtaattttgagagacaggtcaaagagcagaaccaaggtgccaggttaacagcaagaggacagtggtctggaaagagcaaggggaagaaaagtcccagcttaaggtttctgccctgaagcctagcaacacagtgaccaaaccccagaaagggatagtaaaacacaaacaaatgaagggattttgttcctttcttagatgtaaaaagtaagaattaatttctttttttccattttttattagatactttctttatttacatttcaagtgttatcccctttcctggtttcccctcccaaaaaaaaaaaaaaaaaaaaaaaaaaaaaccctttccccatccccttctccctcctcaaaaaaaattaatttctaactcagtcatttggtgacatttttctgcccactgcaagactctcttataatcttgcacatagtaagatgatatactgaacaataaattaagcttacagttgctgtattttaggtaaagccaggagaccctagaaacccataaatatttggaaataaagagccaggagttcaaatgagaaacatctgaatgtgcccatccccctcacacacgcagcaggaaaaattagtgacaagagaggacatagtggagagaagagtcgggaacactgaagccccaatggctgtggttagagtgagtggaagaaaattggacattggagacgagagagacaggaagaggctatgcgtagatcagatgctaggcctgtggggaaaactccaggctcacttatggtgggaaggagagagcaagccagctcagcagcggtcaggtggggtcttgttgttgttactgttcttagggacaaacttaggtaattgagtaagacctgccatgcctcttcccctgactaggcacacagatgattacaaacctgcttcgatggtaaggaccagtgcccagcaagccagaaatgactactgcccacttcgtcttgctatgactactgcaaggccccctgttgcctgctctttctgccaccaaaaccactaacatcccagtagcagcccaggaactgccccctccctggtcccctgaagcatagctatggctccctctacatctctcagattcactctgacactaaggggctctgagtactctgcatttggtattaaaattcggaatctgcaagtgtttaggtttcattagtgtgtggcagatgctttctcattgtagttaattagcagttgttagacccttaaacagccatccagacatgacactagtactgtcaacaagaacaagggaagacacctcagagacaagagaccaaataagttacccataggaaaccaaggctagtcagcaggaaggagagctggacagctaacgcactgcccagctctgctctcatccagttggttctctcaggagtcttctgtgtaccagacatgccaggctctgagctggagacacacacagttgtcccaaagacatgttccaaccctcagagacagtgctgccaagagatacactaatgataacctatgcatctgtcacatttcaagctataataactcggaaaaacaggctgctatggcagcatggagttggggaacctgtccaaatgttattgatcaggcaaagtctttaagcacgtagcactcaggccaagagcagaggggtggggagggtggcacagcagggagtttcatctccttctgagtctctaagctctctaatttggcccaaatgaagcacttactccagcccctagcaggaccccttatgtgccccattgctgggtgaccttagacatacccttctcagtctcaggttttacccctgcaccctgcataggcatatgcagagagaccaggagaaaccaactctctgacatcccactctcagaaccacactgtcaggcctgggactttgtaccctctggagggaggaagctaagacaagagcaaatagaagtcggaaactaagcactgcttacttcttttcagtaatagcttgtcattgcttcattttaaccttttgtcttgaaaaagaaaacattaattttattttttttttaaaaatctgaaaaccaatacaaacaaacaaaaactacacctttaatcctgccaaggcagaggctggtggatctcttgagttcaagaccagcctcatgtatattgtgacttccgggcagtaagcgacacagagaaaccttgtctcaataaacaaaagaacaaacaaaagttgtgttgaggctggagagatggctcactgttcaggctccagaagccctcagttcagtcccagtacccaagtcaagtggttttacaacctcctatcactcagactccaagtgagtccacattctccttccgcctcagagggcaccagcacacaagtgcatagacttacacacaaataaaagaaatgtttttaagcttgtgttgaaggtagctactaaaaatatggacaaagccattctttaaattttatccttttaaatacttgttgcttggtgtgaaaaatactttgtcttacaaagcaataatgcaaactgactgtatgtaagtcccctcccacccatcacatgcatactcactaatgccctcctgtcagaaaccctcagatgatgcagactctgttctttatgtaaattttgcgtatcttttttgtcattgttttgtctttgttttgtgatttttctgtgtaacagcctggctgtcctagaacttgctctgtagaccacgctggtctagaactcagagatccacctgcctctgcctcccaggtgctgagattaaagacatgtgccaccactgcctggtttaatatctttattataccttagaaaatgagaaaatgagaaagcagattagtatagctggctgatacatttactttttaaaacctgaaatcttaaaaaatctttactcagaaaatcagagtgaaagccacaggttaccacatctgtaatcccaggactcgagccacagaggcaggaaggaccaggagttggtgggcacagcatcttcagctacatgagtctgtctcaaagaagggagaccaagataactgtctgaattgtgcgtagtttactgccagaaccccatccactggccattgttgcaggagtctgaggaggaccccaggattcttttcctgccatttatggtacagggtttttatgtatgccagagagaaatatcccattttactttagatattgtcagattatagagccatggattgctctaagtgaggatgtatttaatatctgtccatccattcatttatttatgaacaagagaattccagctgaggtgcggtcctggctgtacactcgacactgaggaaagcctgaccccctgaccccagtggcttggagttgaagctggacggacagaataccaaggacagagagctgtgtaaagaatgcttttaacgaaatgttaaaacaaaatgactgctcagagaatcccagatcatgcaggcggtcgccagcacttaaggaaagagagaaactcactttaaatggaatgcataagagtggaagagagtgataagcacttgcctgctccagtgttagggtgagatgccacagagagaaatcagaggattttctgcaattttgatttcatactggcatgaaagagatggaaaagaaaattgcattgctggaaaacgccagggtatatttgttaacattgctatggtgtactgtatttaaagcaaaaatgtaattgctgtaatttatcacgtctggctattaaaacctccataatttaaagattttaatcatttgccacttttgcacatagtgacttttcgtagatgatgctgtgacaattctgatttttatcagcctttatatgctttgtggcagctcctaagcatcattagtgtgatttcagcatgctattgtttgcataactaatacaaaatccttgtgtttttttcctttgggctgttcaagcagtgcccagaactgctttatagttgctgaccctaacatgaaaacgcaggctgctaggtccatcttcatctgtccacatctttctaactctgagacaagcagggtgggctgtgcctgtcctttagatgtggaaagcggattcttctaataaccagagactcttgaaagtgtctctgcctttgaaatgagtgtgtgtgtgtgtgtaatgtgtgttcaggtgtgtgtgtgtctatgtgtgtgttcatttgaataagaatggtcccccacaggctcatatatttaaatgttagccatcagactcataagctgccatccaggcatgccctgtctagtagtgttattcacttgaaccctctctggctggtaggagaaaaataggaggaaagcagtcacacagtgcagaatgaaaacgtcccaggaataaagatggacagaatgggtaggaggaagtgagaagtcagccacgggcaaaatcatttccccatggtatgtgtaagaaatagaaaatatggcccatttcagtataatgtatgggctctatccattcactccatcctaggggaagctggaacttctgtgatttgtggcacctcataagaccaatttgtgactttatatacctcaggacacaggagaatagtatgatgacctaatcctgtgtgtatttattaaaatatagcattatttgagagagatatgggagtattcatgtatacatacatattatcttagacactgttctgttgctatgagagacaccatgaccaaggcaactcttataaaggaaagcatttaattgcggatgacttacggttcagaggtttagttcattatcatcatggtgggaagcatgatagtgtgcagtcagatatggtgctggagcggtagctgagagttctacatgcagatccacaggcatcaggaagaataccactagcctgccttgggctttgaaaccccagagcccactgacacactccatccataagggccacacctaccccagcaaggccacacctcctaatctttataagtagtgtcactgcctgctgactaagcattcaaatgcaggaccctctgggggccattcttattcaaatcacacacacacacacacacatgcacaaatcaggaatcatactccagaccaagcacataccattcagtgtgatcatggaatcgtgttcagaaagctagctagctcttctctttactgacatacaagagttttgaagtccaactctttgaagaaagatttaaagttatttgcttaaagtcactgagccaggcccagggcataattcatcgccacacccgctattccttcaccatcttcttcctgttctcgtcccccaacctgtcccctgcagatgactttccaatacttcgtcttccctcttcaccccagtgtaggatctccggctcgtgagtaaccgcgtctccattctgcaggtgcgaagtttcccattaagtggacagcccccgaagcggccctgtatggaaggttcacaatcaagtctgacgtatggtcttttggaatcttactcacagagctggtcaccaaaggaagagtgccatacccaggtaaggacacagacccgagaaacggtttgtctgttgggttctattttaacttcattttacaggagtcttgcccagctgcctttctaagccctgtgctcagccttctgccaaggtatttagccaggggaatgcagaactcagaattgccgtgacctgtacaccaaattcaatgtgctaagcagctggtataaatgttccagttcccacaggtcatggaatttgtcctgtctcagtaggtgcatgtgtcatggctcccacagcagaaatgtccctggcagagcctgtgcccaaatggagcttgtagacacgtctgggaaagggaaggagaaagggtcctgttgccttttgatctcgtagcactgacccacagagcaagcctggcaggaagatgcccgtcctgttctctctgaggctccagccccagatggccccaggcggaggtgcaggaaaggcagtttaggctgaccaacccattctctgcctgtggctgaatggccaagatacacaaaatggagtgtattatgagggtgcgggggcctctgggagcctgcagttgttctgggctgtcagatgctccctctgtgaagaagctgtgggttaaggttgcccatgcttaaattcattaacttagccagacggagacataaaggacacgcaccatttcgcctccacactttactggtttcagggcagggacggtctgctttgtgaaatgttaaggacatatttttcagttactgctgagcaaagaaagagcatagctggctcactcccttcattccctgcctcttaaaaagggagaaaagaaaaggcccacagtgatggcaccgatagtagagattaatgaggaatgtagggctcttgcaaatcctgggcttgtaatcatatctctgcagtcagaggagccagcgagagccgattaatttgtaatccctttgttcattttgtctgattgtttctggtcatcatcagagaacagagaagtgttcataaagagcccctctgtctaggctagtacagcctcaagacctctaagggaggaagattggcactgaggcaggattcacaagtgccaggctctgaagccccagcccagcattgggaggtgtgggtgtgtgcgtcttctttattgctgctgctgctgctgctgtggctgcggctgctgcagcggctgctgcttccggcatgcacaagtgggcagacactctgggaatagtcaactggcagagaagaaagggctgcccaggagggggtggggcccagcaggggtgcttttgaattgcttctcaaggatgaaaatataccgtctccaggttttaaaagtgagaaggcactttttaaaaattattattgtctatattttgaactaatttcttcctgatctccccaggtttatagacacccggtgtgttaaaagcaatcacaggaaaaggttaatgttgttttgcatttccgtgaagctttctcttacagtaacacaaagatgctttttgttcttgggtcacacacacacacacacacacacacacacacacagaggccaagacaaagaggtgggtgtgggggctcagaagaggaagtatttggagaccggggttttgtcaggttgggttttagcacaaagaaaataacctaggtttacaagtctgagtggatgccttcactcagcatcattttgtgtggcctggcctagcatttgttcccttgggaagtagcacaaatgagccattcagctctcaggtggcactgatgagttcctgtccccgagcaggtactattcgagctggagggaaaaccatgagccactaaatagtcctgccctcacggagcgttactgcgggagagtgtttgtgccgtgcttatggaggggaggttacttagatgggcagactgtgtgtgctccccgacctgagttctcattatatatatggcagaatcggggacacaagatagcccttcattgagagacccatgaagagagcagaggagttaagtgagaactgggtccagcagagtatgtgtatttactatgccttccatgactgcagctgcctgcaggggccatgggcaagggagaaggcaagtaaatgagaccatggagagcaagaggctcgctcacgatgaacaagatgtgtcgtcctgcctgtcacccggaaaagctgcagagactgtagggagggtctgagacgatggatgaggtgacgtccttgatggccttagaaaggggaccgagccagttgtgaggggtctgtgtgctgccgtgaagagccattggagcctggcaggttgacttgatggcccagagagctgcctgcagcagagaggccattccagacctgttctcatagccacggacactgcttagttttattttgtaactcagctactcagttgggcttctgaaagtgacagaaactctaagggaggagctcctgcagagacattatagttacagggttgctagcctagcagagggtagcacttagcattgtccacatgtcaccatggttgtcgctgtggcccagtcggccagcctgtgctgagtgctcaccttgcttcagccctcctgcactggatctcccattccctgctggtgggagtccaggagaaagtccaggtctctgtgtatcagatgcttccattatgcactttgacacactaatttctcagtttcctagaacatattttcatgtaattctcttctcaagaatggaaggtggtgataaacttgcctgagttctttcatacctgagattggccctttgtccccacgtcacataggaaagtgctctggctcataagtgacagtgaaaggagatgggggctgacttacaaatgagcttggcaaagatccccagacatttccacccagcatgtaagtcagtgcagtcagcgtagaagggagccttggagaagaactgagtgatgctagaggcgtggccagatgaagggcaacctagcactgagtaggcgctgctggtgtcctcaggctgtgctcactgaactgaccagagacggaggaaggaaagaaggacacactgaaactgaacaaggccttgaagccgtagaggaatattgaagtgttgtcctgaggttaaagggagctggtcaggtccctatccacttccaagatgggtgacagagacggacaccattgcaacgcacagctcgcctgctgcagccctgtgggctaaaaatggggtcccgcatcctgcccagggctcaggctgctgggtaaggcaggacatgggaagtctgacttggtgcaccccatgccactgtcaggcttgagaagctgcaggaccctgctctgggggcagggtagctcattctgaggtctctgcggacctgccggggttggcttggggtccccgggcctgcacagaggctgaggacagcaggttctagctcttgggtaccacagaatgcctcagaagagctgagaacagagtaggggccttaggggctggctctggaaaagagtgggaagagagctcaggctggttcccgaggggaggagagtctttggcttgctcagtggtcaactcaggttggttaaaagggtggctgagaatgcagagaggccttctgtgtgagattaggttctgttctttagagcattgttccccactgcgggtccccatgagaagagacagtccatggtcttaaggtgtttaaagagaaggaagagactagggaagtagagaccggccatggccacattggagggaggggggtgcggagaggagagcaagagagaagcaacccagaaacaggagtaagagagggagtagggggcaaacatcccttttgaaacctgagcttgccaggtaacggtggggaggagcatatctggctgttgccaagtaaccgtgggggtggagtccagacagaataccaggagcttggggccctgtgtgactggtggccacagaattatggagctggggcctcatgtcaggagcccagtgtctgggggcgtagcaaacgccttctgtcccttgcaggaacacctgctgggtctccagggtttaaacctaactcaaccagaaaacaggctgcctttcacagtcctagacagcctatcagctgtgccatccttgctggagtccagcctgctttctgtatgcagcgctttaagtgttctttgcatcgagattagaactgtgtttaggctaagggattgttgtatgtgcgcaatggtaatgctggcgccaaagctgtttcctgagcttgctgagtaaaatcgtagctttgcattttagcatgacatttcacctctagaagctttctcaaattctttccccctccgccttccctgcccctgcctgtatcaggctgtcaccactgggtggtgacctcctaatggaacttcctgccccccccaccccgttcctctcccttcctcccctcatcctccaccattttgtcattgtcgccagcagaaatgttatcctggaaaacagatgaattatctcactctggtcctgattaaagatgccaagggctcttgcccttgccctccagataactccagaaggccgcaccctgcacaagtccacaaatatttattgaatgcctgttatgcattgagtgcttttccagacccaaggattatagcagtgaagtaacacgagagttcctgccctcaggaacgttttttttttcttgaagaatataggcaatacaaaccaacaaactacactcaccctggctagtagcattgagtggagcaaaagaggaatgtggttaggagatggtgacagtggaagtcactaagaggtgctcgctgactataactctgataggagctagccttgggccaggtgggtgtctaggggcactgtgccacctgcagggagccaaggagccagggagccagaggcctggagcgatgactggtggcttgtggggttgtaagcaagcatgctttttactctttttgttggggtttagttttgagcttgtattctcgttacaatgtttctccttggcctttcctccttctaaaccttcctagttacccctccccacacactctttcaaactcatagcctcttttttcatcagttgatattgcatgcatagatgtgtctgtatacacatgcatatatatttctaaatacagcctgctaagtccatacagggttgcttgtgtcaccattccacactagatgacgagttggtgtgcttttccctggggagggccacctctcgctccagcttcactcagttgccaatagtttttgtgtagggttcaggtctcattgggctttttttccattcagttgacataaccattggtgtcctccttcgtcaggtcatgtttaggcagtgatgctggtgagactttacaggcgtagcttctgatgttactaggagacaaaacctcacagaatgctggtcccctggctcttagagtctttctgcctcctctttgcagtgtccggagccttaggtgtagctgtgtattgtaggtgtgagtgttctcctaacgtgtgtgcagtgagcagtgtgaggggaagacttgacttcgggtgtctctgctgtctctctccctttacatcttggacaccccaaggaatttgtctatgacagcatctcactgggttagccgagaagtggctatgtagaccaagctgacatcaacctcacagaggtctctctgcctgcctctgtctggaactcccggcagctctgccttccttgagaggaacggggcatcttccatgttctgattcccagcagtgtctgcccacagtagactctgtagaagcaaataaagggaatgtgtgaataaaaggggaaacatttgaactttttttttaaaaaaaaaaaaaaggaagactcataggtttttaaacatttttaaagctgccccatagcctccagagccttataactctgcccggttatcctcacatatggccaacacggggtgagtgttcccagccgcaaggtagcctctgtccccagagttctgagaagttgaccccacgttcaaatttcatattccagtaacccgataggcagaatgtcctggccatgccaagccgtggccctcgactgaacacctgcttgtgtgctggcgggatctggcagaacagggctcttctcttaagcaaatctgtttgtctgtgcattggaagcctcctcaaatcgttctttcagcaagtgtcagctgcttaacttccttgagcagaactagtcacttggtaatgacctggaggagtaaggtgagcaagcaaaactgctcgcacctcctgtaaaagcccaagcgccgctttttgcccccttccttccccccccnnnnnnnnnnnnnnnnnnnngcatgatcacatgccatgaagacaggtattcttgtgttcaagctgctgacaggggcagactccctcaaggaggcaagtgtggactgtccaggtagaggggccatgagaaacagtctgaaaacagctgaccttagcagtgcatgatgggtcctctgcctccgcagcccatgggccccagggccaaagcactgcagtacactgtgttccttcagagagctcggaatgctgtctcctcccctgcaaggtttctcttggctgacgtggctgataaggggaagaaaggataggaggctgtccgtgaagctggagggcataagaaggggcagtctcccagtacagcctgagcgcagcgctctgccgctgtctggtcttagctgtggtcaggcccctgcctcccacactggcaccttcaccctcttttttcactcctctcttcagaggacagaggagttctttgtagcactgtattatcgaaagctcaggcttggaatcccagcacttgggagacaggagcaggattattactgttagtttcaggtcagcctgggctacgtagcaagcccttgtctccaaaaataaagaaaaagaaaacaagaaaggaaaagcccagaaagtataatgctgcattatccacttcaaatcacctttgtgtgccgcagctctcccaaccagcatttctgattttattaatacagcggttttaataaaaactgctgccccaggtgactggtgagggggctaacagtaaacaaaactagtaattattgtcttctcagggtcagtccttcatctccatctgtaccctctggtcagtatccctctgctccacatttgtactctgatccatggagtggctctccaaacctcctggttgttcctgtaagataagggaaaacactgggtaatctgataacacatgcagcggtgcactgcaggctcgctgagcaagcaccattaactccactggcctctctctcagcacccgtgtggcagctcacaacagcaagcagacagatgggtttttaagagagcttatacagggaagcaaggggcctgagacagaaggccccatccatacacaatatagtatcattctctttgaatgaaaagctcagttcgaaaaagaaatttgatatcagatagcctgagtatcatctccattgttaaaacatttatttacaccatgcagttgtcccgattcccacagccatggtgaagtccacgcatgactagaaaataaaccacagactacaggtacgtctgctctgaggtcccttgagaagccacacaagtgggaagcagtaaagtattaatacttttttggtgagaccttgtgctaaggtgatggataaggtgttctgttaacaaaaggaggcgctgaggctggagcaaatcgggtcccctgccaagaggtacagagtctggaagtgacatctgttcggcgttctgcctgttgaagtggcttttgttcctttcctcaagagccagaaagaaaagtgaggagggtctactgagttcttggacagctcaaagaataatactgatgcctacaagaagaggagaggcaaggacccaaaggataagggaaagaaaacatgggtacatatgacagtctgcgtggcaactgcacaatgtctgagtttgaaggaagagttggagagctgacttctcgtgtttgagaaggaagccagcaaaatgactcagaaagaataatacagagatcatgtcaggaagtgagtgcagtccacttggccagaggctcgcagctacaatgttttaggcagaaggactggagctgttacagccatgaccatgtttgaaaacatgaaagaaggagttgaagggacatctcagagcagcaggttgtggagttctgtgaactcaggcccatcacctgggtcctcggaaagagtggagacatgctgttctcctgagctctggagcagaggagagctgagatcaaactgggtaacggaagggtattttttaagaatattatcatgcatggtgtacttaattgaagtactgtttatgaatggcaaactcactgagtccttgctgagccagaacatcttgaccattgcaaaggttcactgcagaagtggcaggtttgcagggccgcccacccacgtgtgttctggcctttggttggttggaagacagctattctgttgcactcgtcactcagtcagttgcagtgtctactcttttgacaaagctgccgttggtatgtgtctgtttcagccagtgcgtagaattgttcatatattccctggactttgggaggtctggagagagtacctggaaaaataaaaggagaaatggggtgggggttgggtgctgcaggaaaggaggcagcaagctaagaatgcatatcaaagctgacagtgtggccttgcagtctagtccagtcctcactctgcatatactgagtatactgcatatattctgtcccatggacggaggccttctcagcaaatgtgacatgctgttttgggttgtcacatgtactatgtccaagtcttgggtggagcactggaaaaataggcttgacccaaatggccagttaaactttccattggcagagactgaattaaacgtttaaagaaaagaagtatttccatttgaggaatttggatttttaatgaaataaaccatttactgacaaaaaattcacggaattctgggaaagtagttaattgaatcctgtggtgctgtgctgtgcactcagggccaggttaaagccttgagatgtatttggggagcggttggagcggttggagctgctccctagaagccagattctagggagagtctactgtcatacctctgagcttcaggcctctatggacctttcctccaggggctcctggcaggagccagaacaagggagattcctgcagacccaagctgtgtagttccagaagcaccatgaaactaagaggtttatctacttaattgtgcagcaaggaattgcctgagagaataccagcccctatgtatggctgtgttcttgtcttggccctttaggcttcctggaatagagacaggtggctgtcttggagccccagcttctcagctaacctcccatgggagcaaatgcacattggaatcagacattgttttaaaggcagtgcactgatgtgttacataacacagaaggggagtctgggatggaacataggaaggaagtgccatcagggcttcacaacacagagggtttatggctgcttcatgtttgtagaaatttttaatcccagtccaatgtttctagccacttttgaccatttagttagcaggtaaaagatgcacacaacctctatatttagagtaagcctcaatcagcactagagctgggcagatacctaccatctatgctattaagcctactttcctatcgataaccctgagctattacttactgtttcatttgagctgcacttaattccaattggccaaccctcagggccacagtttcaggcctcctaacccatggcacttctccttcctcctccaccttctcctcttcctcattcccccttgtcccccaccccaggcccaggaaacctgaaccccacctatgtctcttctgtccagctattggctgttggcatttttatttaccaatcaaaaataacttgggggcagagtcacaggtctacatgaaaactccaggtcttgccccacacacacacacacacacaatattacaatagacaagaagaccaaaccccaacaggttcagctctgttattctgccgagtgccatttcctgagcttactggggtttgaactgttcctgaggaagtgctggcctccgttccttccctttctgtctggagtatctcagaagagagctgcaatccgtgtaccttcccttgccttcagctctccatcctagatcctggctcctcagtatctgggggaggaattgagctcgttggctccagggaacacccaacagaaaaaggtactcccacactggcctcagcattctcccaaggcaaggggcttgcctggctagagtgaaattatttggtcatattaaaggtctacttaaacacagtcaaaggaatgctaaattttgtcaccaccagaaattataagtacagagaataaaagagcatcctacaaggacttagacaaacagatgactgaaatagttgtcatccaggaagacctagctaggataggtccagcttcaaagatgagagcaacccagaagcctggatgctccctccagagggaaacaggaatgtgacctctggccaagtgacaggttctgacccagtggtcacctcccccagaattaaagaaggctgtgttgaatattatgtcgattccttactagtgacaaccctgagactcatgctgtaaattacagcagattcttgctgctgtaaactaactgtcaagagttagggaagattttagatgtcaggctcacaaggtcttggcagagagagggagaaggaagggaggaaagggagggagggtaggcgggtgggcggacaagggagagagtacctggaagcagctgagaagggagcacactgagtgatgcctgcttcagcttcccatgatgccttctgctctgcagcctgagaatgtcagcattaggcagctcctgcagaggggcagggaggtctcagatgatagatggccggatgctgtcattcataagcaaaggccccagagacaccctgcctccctgtcacagttcccaaacctcagagcactgtgagggtcaccaggccagatggtgccaagccctgctggcatgaaggcaaacctcagacgccatgcctaagcatgaggaaaactgtgacattcactgtagctctgcacatagaagacctgttgcttttattctacagggtgtttgtgtgctttagtcatacaaacatttcttttttaatttctttaactttacattggtgttctgcctccatgtctgtctctgtgggggtgtcaggtcctctggaactggaactacaggcagttgaactaactgccatgtgggtgctgggatttgaacctgggtcctttggaagactgagtcatctttccatctcccgaagattcctttttaattatgtttcttgttaattgtgtgaggatatgtgcacgtatgtaccagtatctcctgaaaccagaggtgtcagttgctctggaactggaatgacaggccgcctagtatgaatgcatgctgagaattgaacttgggtactttgcaactctaagcaacattctagcaacattaagccccttcccctagtcctgtgttttacctttcctagtgagtataatttacacataacaaaggttaatttaaaagtatactcccatgagttttgactagtgaaatttgattgttcacacggactaactacactggggtcatggactgcagcctgagttatttctcatggcagagcatggctcccaacctggctttgttttaaactgtttcagtgacagaaataagacagagcttgcatgtagcccacacaaacaaaatatttgctgttggcctttcacaggaaaaacatgggcattcaaccatggcttctgtcacctctcagctccctctgccctttcacccgtggcccccaccccaaccccaacccccatccgtgcgcagcaacctctgatctggtttctatcatgcagtctctggcctttctagggtctcatccaggtgaaatcgtacagtgcgctgcctcttgtgtctggcttctttcacgtgtagtgctttgagagtcactgtctgggcttttgcatctatgagttctccattcctttgttccactccttcgtgctgtgatagcctattacaggcatggttcccctcctgagagggaggacggcctccttatgctttaaccttagccacgtgcccattctcactggcccctgtcttcgcaggcatgaacaaccgggaggtgctggagcaggtggagagaggctataggatgccctgcccacaggactgcccgatctccctgcacgagctcatgatccactgctggaaaaaggatccggaagagcgcccgaccttcgagtacttgcagggcttcctggaggactactttacggccacagagccccagtatcagcccggtgaaaacctgtgagagcctgcgcttcagacgcctcttcccgaggcctccctacccctccccattagcttccaattctgtagccagctgccccagagcagcgagaaccgtccaggatcagattgcatgtgactctgaagctgaacttccacggccctcattaatgacacttgtcccccagtccgaacctcctctgtgaaccatctgagacagaagcgtgttatttctcagacttggaaatgcattgtatcgatgttatgtcaaaggccaaacctctgttcagtgtaaatagctgctcctgtgccaacaatcccagtgctttccttttttaaaaaagaaaaagcaaatcctatgtgattttaactctgtcttcacctgattcaactaaaaaaaaaaaagtattattttccaaaagtggcctctttgtctaaaacaataaaattttttttcatgttttaacaaaaaatgatcaggacaggtgtttgggttttttttcccttttttatacatatgatatatatgttaacatatgttcctgtacatacaccatgtgggtgctaccatggagactggccagcgtaggccacatagctacaggaccggagtggggattactgcagaaccctgccagcaaagcactggtgtcagcctgcaagccggtggcctcattttttgacttctacgaagcatgacgtcctctccatttggactgcacttttttggttcctaatcatacctatagattgttcatgtgacttttttcaggtcccagggcctagtcacgagttttagtgccagtttttgctccagcgaactgtgattcgttcttgaaacttaggagtgagcattttaagcaaaaagcagccagccagttctaccacaagagctgcaagacggagaccacacaaacttcctgtataaatatgaatgctgaagggttcaggtgttttccttttatttaataaatcttgtaaccacatttaaatggtctaaacccatagcattgtagtcatggcaacctactaaactttctcatgcaactaaaaattatgggaaggcaagggtggggggttgtacacgtcccattgtaaaataagtgttttactgtcctgtactgctaatgagtgactctccgtgtcaggagtgctccagtgaataactatgcactactttacatttcatgggggtgcacaaaaaaaaaaaagtattacatttttagttgctgtttgtaccaacctcgaattacgtatgtttaacaacaaatcaattcctatttctattgagttttttaatactgactagcaattctgaagtcttaattccttttttttgttaatgatttacttgtgagtttacatttttaaattgtttaactttcctaatttagtaattaaaaagagagcattttacatttgaaaaaaaaatttttgtttatttgtgtacaccacagaaggtaccctaggcgttctgtgacatacctggcccgtcccagatggtgaggaagcacctggtaaatcgggccactgtgcagcgatttccaaacgacagaaacatgcagagcatctggagaccctccccaccaaaaggcaaagcagttatctggctaactcagagtggctaaagcaaaactgggcgtacttgagcgccatagtgtatcccgcactgtctctcgctggaattcaccgtgtcctatttgtacaggagacagtagtctttcttggtctcaagtcataaatacatttccaagtatcctacttctaaaatgaagttgctaagcatgtgaccatgtggtatgggggagagggggaggggggactgggtagccatccaggcctggatctaccatggttccctgcagaactccgaacctcccctgcaggccagtgtgtctggagacaaagtacagacaagatgctctcccagcctctggcagccctgccttcttacaactctaagtccaccgtgtcatatggagccatataaggaggaaaatctttcattgttgtggaaataattacctttagaaaagattatagcgttttggggaggaagatgaaacattttttaaatcaaaattgttactattttggatatgaataccattgatagagttttgaaaacttacgaggtgcagtttttatcacataggattagtcattagcaggttttagatttttgttaagataattttattttcaatcctcactttgcattagacaatttgcaaatattccctggagggtttttgttttgactcattgaaagtctttgagggaaaaaaaaatgcacttttaatttcatacagctttttaaatttcatcaagtgagttctctgtgggttcctgtatataaaagaaaactaaggacatgcatcactgagagagcacgcttacgaggtcagagtcctggagcactctagaatagaagaactacagtcaggaagaaaccaaagaaatgtacaggtttttccaagagtccagtgtgctttctagggaggctcaactcccatctggaagtgtctgcttcgtaagtgatagacactgggatcgggaaactgaagttgctcaccagaaagttctcttatgacaaaggaaaaatagcacttactgtgaagcaggtgaaaatgtttggggagaaaacctctttgttgtttctctttaaaaaaaaaataataacatttttatgtgtattggtgtaagggcgtcggatcccctggaactggagttacagacagttgtgagctgtcatgatgggaactgaacctgggtcctctggaagagcagctagtgttcttgaccactgagccatctctccagcccctgttgctttcctttagtaacccagaatgaggactaaggacttactctctgagagccaactggggttacctagtttgcacttggatacctttttaataagctattctcttaaaagctcacataggaagctcactggagaaggccattttcataacacaagagtaaacattggttcactccactgtcgttgcaccacacactcaggctgctgcgttgagggacctgataggatcccagcagatgcggggtgccacatgtcagcagcgactcagtggactttaagggccctgccccagtgaccaggtgtttccatggggaaagccaagggtaaccatggtccctcgaaacctgccgtgtgactcaagatctccaggcacctggctgtgtttactcacccggagacgacaggaatcctgtgagtaaagtcttggcagcagaggattctctagtaccagcagagctatgaaatctatctatgatttctcacggggctataacagcgcccgccgtattaattgggatggttctttcctgggaaggtaagatgctcagcggtacacccaggagaaaagcgccatagctttgctgcagaaaagatgccatgtctattgttggccctgacgcagaacaaggcggcccacagggtgggcgtttcctaatggtgtatttgagtaaaatggtatttggtcagtttgttctggaagatattttaatacattcagatggcttttgttggctttcttgccactgtgtgttacactgaccttctttctgttaggctagtgtcagaaatatactttctggaagggagatgagacggagggaaggaaggagattagctttgatcctgaaagaaggggaaaaacagcctgtggcatcattatctaagtttaattttttttttaattctcaaatgtagattccaactctacagaatgtaataaaaatgcctttattatcttctaaatatcaaatgaaccttcacaactgtgtttatatcaatattccatgaagttttatgacaaacatccaaactattcctcatttttcccgatgtatgaaatatacagaatcctatgggaaggacatggagacctctttatatatctttattttaaaataaaagcgggagaatatagctaagtggtaagccacttactttgcatgcctttgtctcttgtctctctctgactccctctctctctctctctctctctctctctctctctctctctctctctctctctctctctcaccctctcaccctctcaccccacccctctcaaactctaggcattgaaatataaagcggtttgtgattttgtaggaaccaccctgtaagaatgcagtcctagacagcagccagaacaagcagacttcctctctggagtcctcagaactcatgtcactgtgtgcttcaaaccacccgtgtgttcagtaacacttctcttctttcagtgggttttctgtggcagactgagcactcctggagaccagaaactgcccagcattaacgattctcctctccctcaccttgaacggagatgagcttctggcagatgtggggccaatgcatgagtggatggttagatggatggtgcctaccacccagtggggtggcgctttgccttcagatgacacgcttatctcagagcctgctgggtgtgggggagctgcggcatgcggccccagcactagcctggcctgctacaactcgaagtcatcagtcttcaggataactgtgaaagctttctctccagcctgaaccaggcacaaccagtgaccccactccttcccccaggtctcggcacaacaccctcggtagaaagtcagacttcttggaccgtgctaggtgactgcccagagtaaaagaccaagtgaggtatagttcacaatgcatgcaagtgaggtgccatttgaatttgataattttatgacaactggatattccagttcctaagataaccatctttgtgttcatataaaaatgtatctcaactgggcgtgatggtacacgcctttaattccagcacttgggaggcagaggcaggcggatttctgagttcgagtccggcctggtctacagagtgagttccaggacagccaaggctatacagagaaaccctgtcttgaaaaattaaaaaaaaaaaaaaaaaagtatctccatgccctccagatgttcagtgtccacggcctgtggcttgcaatgcccctattgcagctctcatgacccaggtacttctggcctacgtgagaagctctgtatgaagtggtaacttattgtagtgtgaagactaaacgtgaaaaaggtattgttgccccctacgcatggggctttcctgacttccccactcaaacaagaacagcctcatggttgagtgggagggaagccaagggagagctttatgacagaaaggaaaagataagccagctggagcctctggaagcagaggtcagatcagctttcctggccagtctgttgcaaatcagagcaggagggatggaaaccttaaataaaggagaagactgagctgggaagagaggcgccctggtcatcactctctggaagagtgggaggaaggcagacatgacaggaggtacacatgaggactagttattccttgctttaaacttctgatgaacgttcactccgagctagaccacgtgtaccagaaactcaaaggtgtatgttaatattcacaccccagtgaagacagagacccagagctgtctgtagatgggaagcccagggctgagtcgaagggaggcacccgtgcagcatggggtctgcagggcaggcagcacaccgtggagtgggttaggtgtcacataatagggacagaacttcttgctttcaaggtgacacctgattctcatgcattgaacacagaagctggtcagtaaatggatctgaacaaagaaaaagcaaagctacatgcatcacctccccacacacatctgtccttctagatggaggtgtggtaaatggctgcagtcaaagacgggtaaggtgcttcgatgtgtgggtgggggaggtgtagcgagtgcatatggaaccttccttacctgccagcctgtcagagatgcggtgtcactgtgcgcctgtctctgcctcctgccttgtgcaaagaatgttgggattacagacatatgcctctgcctccaaatttacatgggcacaagagacccaaattcagttcctcacaaaggcaaagcaagcacttttttacccagtgagtcatctctccagtcccaagaataagggaccagacagggtgttgattcccagggtccctgctggagtatgactaggaatatagaatccaagaattgctggcaaagaacttgtactaactcggtcgctctccctgggacatttgacagagctctcctgtttgtccgttcttcgcttgttggccgcttcatttgctctgtcatacaatttgcaaatttataaaagttactgctcagagtcacaaggtgctctggttgttttgttctgggtatttttcctttagttaattatctagtgcttgctctgtaataatcaatgggtagctaattggaagcaagagagaatgaaatgagtattatttgaatagtgtttttaatgaaaagcacacatgaaatactatagggaaacagcacaagagaattttttttcttttttttttttttttttttttgcatgtgtttacaaacagattcacataagcttgtcacaaaccaaatccaagtgtatggatcattttgtttcattttccagatccccccccccccaagggggtgagtgggcattggaggataccaggcggaggccaggcctcaggagatggagaactagagccccagccgtcctaaatgaagctgaagggctgtcagttcccaaagagtgcatgaggaaatggttagcacgagacagcacttgcatagagaatcagagatgagtaacaatggttcctggtaaattagccatattacatcatgcacacagtaacggagggacgattaggaaaaatgaatactaatttgcccaaatcctttacataaaatgcattgactctttttttaatttgatagactttttgattttttaaaaacatgggcagctccaggaagctcccagcagagcatcattgtgagaggaggaggaggagggggaggaggaggaggaggaggaagataaaccatcgaaggccttcataagccatttcacccccctcctctcaacctgcgaatatcagaaaatatttgtttgtacattcctgaaggtctctaagtgaaaatggaaggcattaatcattgtctctgctatcactaaaccatgacctcaccatgttggagggcaggaaagtgatgcttccttctatctgtatgtctgcgctgactcagacggtctctgggttttgagtagtagggggaggattggaatggagcagagctgtacttaaaacggcaaaggcaagaacaaaagcagcatgcgtgcagccaaaggggaccttggaagttacacagatgaaacaaaacgctatgcttgcctgagagtctggtttccaaagcaaacgcaaaatggagagccttgttccaaccataaaggtctcaccatctatagttcctttgcaataaaaggggccctgtaatctactgtgacagccagaagctgcactggtgctctgaattatgatatttgctcacgactaatacagatttttccaaagcagcgtagcatttgtagctatagcatcctctgccctttggcagaacacagccatgtccgccagctttccctgcttccgttccttcctgtcccagcccccacgcctttccacctcttcccattacaatcagaccattcttgcttcctcctttgtttgcttcggcacacctcccttcataggatccctgttaatttattaaaatcagacttttttttctttcttttttaagatgtattctcactatgcatcccaggctgacctcaaactcaagacctgcctgcctcagcctccctcccaactgctaggatctggggcgtgtatcccttaggtctctacccttcaaggcaaacctgtggctgctggactgcatcctgagcaggcatcctgtaggagagttgcccagtctcctctggaaacttactggtctcaaagttgaactttgtaaccctcaaatctcaacacttctctcctgggagcccattttaggtaggcagttccctgaccccagttctcctccctgcctcgcccccagcccccagcccccagccctgcccccgacctatgatttatcagactttatacctgagtctccagcgacttgctatcaatcagctttatgcaaatagaaaaggcgaccctacctcaacaagctttgctgccatctgccaggaaattgctacaataaatatgcaaaaggataatgattcaaatgtgaatgccaccctttcaaatcctgcagtacaaaaaaacggcacaaactggggtgtcaatcctgcagtgtgaaatcaccggagctgtcctgaaaccctgcataaaatcatggccccatgaagtcagccttgcctgttcgtagcaattttaaaatctaagcctttcaaccgtgatcagaaactgtggagaggcggtccccaggtagcagcctgtaacaatgacagacttctttctagaactcagccagagcgtggactctagtgtagggcacacaaaagcatccaagttaaggagtgggcacacttgaccatgagggtgctagggcagagaccatgctcaaccagggtggggcagggggtgcaccacacccctctgccttctcactaatcactccagcatcacctccactttctggtaatctacaacacaaatcaaccccaaaacctcatggcagaaatagatgcacatgggtgcattttgtacagaactctgcagttcagagggacttctagctacgactggcctctgctcctcagggccgcagctgggactgcatggaggaggctgggcatctttcacaatagctcctagctgctgagcaagaacccagctgggactgtgggtgaggacctgagctcccaggtggcccgtgggctggctcacaccgtggggatcaaccgtgttgagacatcccagctgactcatggcaaagcagagacaagctgctcccaccaagccccgcccaaaccaagtttctaaacaaaagaaatgactgaggactctagctatgaggtttggggttgttttatagcagctcatcaccagaatgtgtaggctatcacagctccctcgtatgcctcccctcatgctgtgtctaggaaaatgaaaaccgaatctcccaggctgctatactgtttgcaccacaaccgtgaattagactataccggtcagatgtagttgtggaaagtttgtaaggccaaagggaggtatatgccaggcccctgaagcttgtgcttgtgtatgccctaggaagcaagaacatgtagccacagctctgtagcagcagctccaacattggttttctgtctctcaccctcctggttcatgcaggagaccacagttccgctgtctgagtggttcccttggtgaacctcttccagcccttccagtaagtccataaattgttacattacatctctcttcacttaaaagccatagggtggggcatgcatcctaggctgacctgagtcagcatccccaggtgagccccactgttccatctcctatctctctgtccttgcttgcttgctcgttttctctcactgggcactcttgttttctttccatgctgaggatggaaccgaagcctccaatacaatacacttatcaagcactctcagcccgctggtctttcttttagtatttatctatacttgtgccggtgggttatttctctgcccgttgaaatgagccagttcaagccagattagattatatataggcaggtttatttgggtggggaggaagggtggnnnnnnnnnnnnnnnnnnnnnnnnnnnnnnnnnnnnnnnnnnnnnnnnnnnnnnnnnnnnnnnnnnnnnnnnnnnnnnnnnnnnnnnnnnnnnnnnnnnnnnnnnnnnnnnnnnnnncttcacccccacctccacacacaatccttctttttttttttttttttttttttttttttgctcctccaaaaaaaaatgtctggattgtatagggagtagcctctgggggaagggcagcccagcccctgggctggaaagttcagggttgggggcagggtatgccaggtaggaactgagagatgctgggagaacctgcaggccaggtctgctttgatgtgtaaaacatgcacctaagtccctaaacccaacagtgccaacccaagtttctcatggctgagaaaaaagtccattagctaatgggagacaaggagtgaggactagaaaaggacaccctccggggcctgttgggttgctttcttttgtatgtaaagttttctagaaacacagccatccccatttgattctgtcctgtccagagctggcttcactcaacactgacaatgttgggtgactggttgacccaaaactctgaaaatacttagaattgtctctctgtggattctgtaggcactgtgggtcaagtaccgccgcgttcgggctaagcacttcctgaacatccccgctgtcatggggacttccatctgtcatcactattagtctttttctgctgctttgttttgtttctgtgcaaacaaaacaaagactattctggaactcactctgtagaccagccaggctgtgaactcagagatctgcctgcctctgcctcccttactagtcatgggagtaacaagtaataacttacttgtcagttattactgacaaggaaaccaatttagagagatctgggcccagttgattgagcacatggcgatgctgttagcagggatacaagagccaaaggaacagaaaggactcatggactggtgactggtgaggcacctgcagccccatgtgctgggctgtgccctctcatgtcttgctacatggctaggaagggtttcaaatcaatacagcattgggattcaaagcacagttctgtcaccagctagctgtgtgactctgggcaagctatttgacctctgagcctcttgcttagcttcagggtcctcagttagtaaaggggacttttgaggaaaaaaaaaaagtcctatgtgtaggatatgaaagcagaaatggatagtgtgtggaggtggggtgaggatgnnnnnnnnnnnnnnnnnnnnnnnnnnnnnnnnnnnnnnnnnnnnnnnnnnnnnnnnnnnnnnnnnnnnnnnnnnnnnnnnnnnnnnnnnnnnnnnnnnnnnnnnnnnnnnnnnnnnnnnnnnnnnnnnnnnnnnnnnnnnnnnnnnnnnnnnnnnnnnnnnnnnnnnnnnnnnnnnnnnnnnnnnnnnaggtcaggacagggcagggtgggagtggggtgggatggggactgggtgaggtgagataggggtgaggtaggaatgagctggggccggggtggcatggggatgaggtagggtggggtaagagtgaggataggagtgaggtggggtgggatggagtagggtggggatgggataggggtggggtgggagatcagca

SEQ ID NO: 122 - DNA, 3258 bp, Mus musculus
cctgggccccgccgcggacgcgcggagccgcctgggccgcgccggaggagggcggggagaggaccatgtgaatgtgctccggagctgagcgccaagccaagcagtgtttgaaaggaagcaggatgctgatctaatcgtggcaaaaagtcagtccgaccgctggtttcgaagacatgtggtgtatataaagtttgtgatagttggtggaaatttgggagcttggataatgggctgtgtgcaatgtaaggataaagaagcagcgaaactgacagaggagagggacggcagcctgaaccagagctctgggtaccgctatggcacagaccccacccctcagcactaccccagcttcggcgtgacctccatcccgaactacaacaacttccacgcagctgggggccagggactcaccgtctttgggggtgtgaactcctcctctcacactgggaccctacgcacgagaggagggacaggagtgacactgtttgtggcgctttatgactatgaagcacggacggaagatgacctgagttttcacaaaggagaaaaatttcaaatattgaacagctcggaaggagattggtgggaagcccgctccttgacaaccggggaaactggttacattcccagcaattacgtggctccagttgactccatccaggcagaagagtggtactttggaaaacttggccgcaaagatgctgagagacagctcctgtcctttggaaacccaagaggtacctttcttatccgcgagagccaaaccaccaaaggtgcctactcactttccatccgtgattgggatgatatgaaaggggaccacgtcaaacattataaaatccgcaagcttgacaatggtggatactatatcacaacgcgggcccagtttgaaacacttcagcaactggtacagcattactcagagaaagctgatggtttgtgttttaacttaactgtggtttcatcaagttgtaccccacaaacttctggattggctaaagatgcttgggaagttgcacgtgactcgttgtttctggagaagaagctggggcaggggtgtttcgctgaagtgtggcttggtacctggaatggaaatacaaaagtagccataaagacccttaagccaggcaccatgtctccggagtccttcctggaggaggcgcagatcatgaagaagctgaagcatgacaagctggtgcagctctacgcggtcgtgtctgaggagcccatttacatcgtcacggagtacatgagcaaaggaagtttgcttgacttcttaaaagatggtgaaggaagagctctgaagttgccaaaccttgtggacatggcggcacaggttgctgcaggaatggcttacatcgagcgcatgaattatatccacagagatctgcgatcagcaaacattctagtggggaatggactaatttgcaagattgctgactttggattggctcggttgattgaagacaatgaatacacagcaagacaaggtgcgaagtttcccattaagtggacagcccccgaagcggccctgtatggaaggttcacaatcaagtctgacgtatggtcttttggaatcttactcacagagctggtcaccaaaggaagagtgccatacccaggcatgaacaaccgggaggtgctggagcaggtggagagaggctataggatgccctgcccacaggactgcccgatctccctgcacgagctcatgatccactgctggaaaaaggatccggaagagcgcccgaccttcgagtacttgcagggcttcctggaggactactttacggccacagagccccagtatcagcccggtgaaaacctgtgagagcctgcgcttcagacgcctcttcccgaggcctccctacccctccccattagcttccaattctgtagccagctgccccagagcaggagaaccgtccaggatcagattgcatgtgactcttgaagctgaacttccacggccctcattaatgacacttgtcccccagtccgaacctcctctgtgaaccatctgagacagaagcgtgttatttctcagacttggaaatgcattgtatcgatgttatgtcaaaggccaaacctctgttcagtgtaaatagctgctcctgtgccaacaatcccagtgctttccttttttaaaaaagaaaaagcaaatcctatgtgattttaactctgatttcacctgattcaactaaaaaaaaaaaagtattattttccaaaagtggcctctttgtctaaaacaataaaattttttttcatgttttaacaaaaaaatgatcaggacaggtgtttgggttttttttcccttttttatacatatgatatatatgttaacatatgttcctgtacatacaccatgtgggtgctaccatggagactggccagcgtaggccacatagctacaggaccggagtggggattactgcagcgtgatcatgcaagctcacccccttccagcaaaacactggtgtcagcctgcaagccggtggctcattttttgacttctacgaagcatgacgtcctctccatttggactttttaataacctaatcatacctatagattgttcatgtgacttttttcaggtccagggcctagtcacgagttttagtgccagtttttagtccagctcaactgtgattcgtcttgaaacttaggagtgagcattttagcaaaaagcagccagccagttctaccacaagagctgcaagacggagaccacactaacttcctgtataaatatgaatgctgaagggttcaggtgttttccttttatttaataaatcttgtaaccacatttaaatggtctaaacccatagcattggtcatgggcaacctaaacttttctcatgcaactaaaattatgggaaggctaagggtggggggttggtacacgtcccattgtaaaataagtgttttactgtcctgtactgctaatgactgactctccgtgtcaggagtgctccagtgaataactatgcactactttacatttcatgggggtgcacaaaaaaaaaaaggtattacagtttttagttgctgtttgtaccaacctcgaattacgtatgtttaacaacaaatcaattcctattctattgagttttaatactgactagcaattctgaagtcttaattccttttttttgttaatgatttacttgtgagtttacatttttaaattgtttaactttcctaatttagtaattaaaaagagagcattttacatttgaaaaaaaaaaaaaaaaaaaa

SEQ ID NO: 123 - DNA, 1605 bp, Mus musculus
atgggctgtgtgcaatgtaaggataaagaagcagcgaaactgacagaggagagggacggcagcctgaaccagagctctgggtaccgctatggcacagaccccacccctcagcactaccccagcttcggcgtgacctccatcccgaactacaacaacttccacgcagctgggggccagggactcaccgtctttgggggtgtgaactcctcctctcacactgggaccctacgcacgagaggagggacaggagtgacactgtttgtggcgctttatgactatgaagcacggacggaagatgacctgagttttcacaaaggagaaaaatttcaaatattgaacagctcggaaggagattggtgggaagcccgctccttgacaaccggggaaactggttacattcccagcaattacgtggctccagttgactccatccaggcagaagagtggtactttggaaaacttggccgcaaagatgctgagagacagctcctgtcctttggaaacccaagaggtacctttcttatccgcgagagccaaaccaccaaaggtgcctactcactttccatccgtgattgggatgatatgaaaggggaccacgtcaaacattataaaatccgcaagcttgacaatggtggatactatatcacaacgcgggcccagtttgaaacacttcagcaactggtacagcattactcagagaaagctgatggtttgtgttttaacttaactgtggtttcatcaagttgtaccccacaaacttctggattggctaaagatgcttgggaagttgcacgtgactcgttgtttctggagaagaagctggggcaggggtgtttcgctgaagtgtggcttggtacctggaatggaaatacaaaagtagccataaagacccttaagccaggcaccatgtctccggagtccttcctggaggaggcgcagatcatgaagaagctgaagcatgacaagctggtgcagctctacgcggtcgtgtctgaggagcccatttacatcgtcacggagtacatgagcaaaggaagtttgcttgacttcttaaaagatggtgaaggaagagctctgaagttgccaaaccttgtggacatggcggcacaggttgctgcaggaatggcttacatcgagcgcatgaattatatccacagagatctgcgatcagcaaacattctagtggggaatggactaatttgcaagattgctgactttggattggctcggttgattgaagacaatgaatacacagcaagacaaggtgcgaagtttcccattaagtggacagcccccgaagcggccctgtatggaaggttcacaatcaagtctgacgtatggtcttttggaatcttactcacagagctggtcaccaaaggaagagtgccatacccaggcatgaacaaccgggaggtgctggagcaggtggagagaggctataggatgccctgcccacaggactgcccgatctccctgcacgagctcatgatccactgctggaaaaaggatccggaagagcgcccgaccttcgagtacttgcagggcttcctggaggactactttacggccacagagccccagtatcagcccggtgaaaacctgtga

SEQ ID NO: 124 - DNA, 78313 bp, Homo sapiens
tctctccctcttaatttttcagttgacaaagtatacttcatcaatgtgtagttgtttcaacttacatacaaattcaatcagtaactgataatattaaagggaactttcttatagaaaaataaaggtgatttattctcattataaaaaaagtacattcttggtatagacaaatctgagaaaaaagacacagagagcaaagaaagaacagttgcccatagtgttatcatctgcacaccaccataatctcagcatgtttccttccaaagagttttctaggcatttgttatatagttgcaatcatgtgatccttcctaatataacatgaacatctttccatattgctgataatttcagtaaatgtaagttttaatttctgcttaacttgtctttatgggcataccttacaatttactttagccattgccctcatgctaaacaactaacaagttttctaatttttcaaatgataaataatacttcatagaacctcttcatgtcatttttttaaaaggcgtgtctttagcacacatttacaggttaaaggacatgccacccccgacaccctttttttttttttttgaggcagtctcactctgtcacccaggctggagtgcagtggcgccatctcagctcactgcaaacctctgctttcctggttcaagcgattctcatgcctcagccactcgagtagctaggtttacaggtgcctgccaccacacccatctaatttttgtatttttagtagagttggggtttcactatgttggctaggctggtcttgaactcctggcctcaagtgatccacccacttcagcctcccaaagtgctggaattacaggtgtgaaccaccacacctggccgagtatgcccatttttaagaattttttatattgccaaattggtttaccaaatggttttacactgatttctggtcttctatcagcaatgtaagagagtcatattcatttcaaggaaacttcatcactattgagtatacttatttttttaatgtgtgaatttagaagtgatacatagtatctcactaatctaaattgtatttctctgattactaccaaaggcaatattctcccatatgtttcacaaattgtttttcctttttttgttgccaatatatgtttctgtttcctaaacttagagtttctcttatctgtataaatttcttatatattgaaatattaatctaagagagttgaaaacatatctccacagaaaaacttgagcatgaatgtttgttgcagtattattcataagagccaaaacgtaaaaacccaaatgtccatcagttgatgaatagataaacaacatctggtatatccatacagtagaatatcttttagccataaaaaggaatgaagtactaatacatgttacatgaatgaacctggagaacattataccaagcaaaggaagccaatcacaaaagaccacatatgatgtgactctgttgatatgaaatgtcaagaataggcaaatccatagagacagaaattagattcgtggttgccaggggctggggagagaagggagtgggtagcgattgcttaatgggcatgggtttctttctggagcaatgaaaatgttctggaattagataatggaaatggtctcctttgtaaatgtactaaaaaccattggactgtgtgcttcaagagggtgaattttatggtatatgaattatatctcactttaaatgaaattttaaaaatattaactacaaggggcttttctatggtccaaaaaggcttgcgggcagggggtggagcctgaaaaaactttacaacctgtgctctaattctttctgaaacctttggcatagatggggttaaaacatatcatccttgttttcatcaccatttcactcttgtcttaaccctgagatccagagcaaaatgaatttaagaagaaaatgttcttactcttttcttggagcctttccatggtttggtgttaaagcctcatttggccatttaggtttgggactggttccagcattcagttgactgcagtcttaaatctcaccactggggtctgatgcttccatttctcttttattgagcgcttttgagtcttcgggctcgagaaatggaaggctatgcagaaaggaaagaacatgtttgttgcagggatgtgagcagctgcctcttagcctgggggccatttgaacaagaaaagccagagatggggacccacaaaaatattctaggtgccagcagtatggcttattcttaaagtaacatgacatttttaagagtgatttatattactttggttcccttgctgtgcggtatgagagaaggttgatcctcttccccctccagagaacctttgcaaagtcatgcgtaaatgatcgaatgggttcaactccacttatttctgaagcaaagcttgggtttgatttttaagtaggctctgttctcccatgattgcatgtggctagtgtctgcattgtgtatattcccacttttacatctatcttctcacctcagagactgtaatattttaatacttgcatttggcgaggggctctccctcacaggcttcaccaagagtagaaagctgttattttgtgcttggtggaggcattatatgtgtatctcagtttatgcagtaaatatgttccagaaagttttgcctgtaaagcaaatcatattttaagtgcaataggaaagctgatttttataccaaggaaaccagtgccaactccttcatggtacttatgaatacccttgccatgactaggaaagatgaggaaattaagggctgcttcagtgtcatcggcccaaatagtcattaatatgccaaaccgcacgaaggaagatggtgactcactgcacctagtatggtccagcatctctacagaatccactgtcttgggggaatggaatgtgcattggggatggaggtgagacctagtccctgaaatcagtgcctccgttagtaatgtgtactagtccattctcacactgctgtgaagaaatacctgagaccgggtaatttataaaggaaagaggtttaattgacttgcagttccgcattgctgggaaggcctcaggaagcttacaattatggcagaaggcaaaggagaagcaggcaccttcttcacagggcggcaggacggagtaagtgcaagcagtggaaatgccagatgcttataaaaccaaccatcagatctcatgagaactcactcactatcacgagaacagcatgagggaactgcccccataattcgattacctccacctggtcctgcccttgacacatggagattatagggattacaatttgaggtgagatttggctggggacacaaccaaaccatatcataatgtgtgagatattgagctctgtggaaccaattcttccctataggatttttccctcaacacctccagccctcacacccacacccttgcatggactggccaggattccatggtcaggaaatagctctagtatagagactctgtgtgttggccatggaatcaggctatctggtttcaaatcccatctctatgactgacatagctgtggacaaattccccaacccctcttttcctcccttgtaaagtgtggggaaatagtaatacctgtgttttagagttgttactagattttaatgggacagcattttgcagagtccagcctgcacctaggctacagggaacactgattggatattggtcatgactgctgaaattggagccatcatccccatggtgcccatcccaccaaaacatgtattagttttctgctgctgcctaacaaagtactacaaacttagtagcttaaaacaacatccatctgttagctcacatttctgtcagtcacaaatccaggcacggaggggattctctgctcagcaaagccgaaatcaaatgttagctgattatgttgttgtttgaaggcttgactagggaggaatccatttccaggttcattcaggttcttgaccgagctgttctcagctctgaccacccatgtgtctggccacatagccccttcatctttaaaggcagctgtggagaatctcccccacaatgaaggcctctctcacttttaatctacttttccaggaactggcataccgttcacgggttcacctgattaggtcaggtccacccaggatgatctctcaaagtcggctgtgccaaataacaacccgatgatggagtgactaccccatcattcataaatcctagggatttgcagggcacatacaccgggagtaggagtcctgggggacagctcagaattctccctaccacaatgtcatttagcaaggcacatattttcactccctccagttggcagcaaagagaggactttcccacattggcagagtcctgcatgctttttttcatagctgggctggggccattggctgaacccagcatcagtgctgaaagtgtttcatccctcaagtattaacatctccagagggccaacccagcagtgactttttctctgcttcagtaccttgggaaatgcttgtgatcccaagagtggccagcatagccctgctttctgtccagcctccccagtcctccctggcccttctgtcccgtctgtccccagaaggcagcactgcctgcactctctcatggggtgtcaggatcatctgatgcagtatgctacagaggagaaaagccccattgtaaaggattgaaaggtgctgggaaattaggaaatttgggtgacagtttctgtggcccaacctcattgctgctgatgtggtactcaactgtctctgaatgtccttctgctcccagtaatgacaggggaaaactaaagaaggctttcctaggctttcaatggattaactctctccactgagaatgtagcaaaagtccccaagtagattcttatgggtgtttctaattttgcgaggatcaagagccctctgccatgaatcttctatcctgaagtcaaataatttcagatgtgtctctgccacatcttatccttttcctaatgctattcctgctgactgaaaaagtgtgtttgcttgataagcttccagtttttgcttttttccgagaaaagtgtgaaaccatgcagttgatctgcagttcagctttaaattcttttttcaactgcccccatctcagttgcttgcatttggtttctaggttcttagttcagttcccttccttgttcttatacttccattatgataccaggaaacatgccacctctaagtacgggccaaatgtggctttacctgtcactctccaaagtctgctggaggctgtcagaagcagggattatgcctaagggctgtcacttcttcacacccacctaggttggcttctgagacaaaagagcatacacccctgaaattaaagttatttgttgtcggtttcacttcctcttcctgccattcctcctctgcctgcaagtgtatgtgtctcaagagaaagtaatttgcttgtgcagaagactgccagtggcctttttcccattttggtacctagctcctgcacacacctgaaatcttatcacacgtcctgcaagcttataacttgggcttactggcattgctttattgattggcacatgacgaaatatgaatgtgtctgtgtttaatgtgcatcttgtagactggactgtggtctgtctacatcaggaggagggagtgtatgttcaaccagactcatcttggatcgaagcaccctgtgcctgtggtagtaaaggattgaatctatcctttaggtcagtttccgtcaatcactacagggctatgtggagaagcatatctcccatagcatggcagcagaaagggctgtgatctgttgataatgtctgccctgcttatgggagcagggtgcggcgttccttgaatcctgtgtccggcaattcttcccaggttgcttaacactattggcacatctgtaaagaaccacaggactagggaaattttaaatagatcaagttttatttgcttagtagaaaaagggcccctccctttgcaaaaggattggagaatagaggcttcacagctgtaatccagacaccttgatcacaggcacaggatccaattggtgaaaatgcccttcaccagtttttctaggcatgataacttgcagaagactatagccatgagttcatggcgtgtggtattttcctgatcagagtaactccagggctccacattcacgatggcatcattcagtgtttcccggtgccccagagatctatagcaagtgaattagtacattctatgtcacgatgcacttacagcattggacattaaagccacagcacataactctgcataataaaggatacttttattttagcatgaatgatcaaaagtttgccttgtagcaaggagcctgggcacactgaatacagctcatgtagcgtcttctgactcttctgtcacgaagcagttagtctgactgccccacgggggagaaagaagaccacaagttcctacataaatattttcattgtgattaacttttaatgacttgaaactgcatttactgatttattttcacttcttcctatgtgtcattgaagagaaaagagtaagcaagatctgtatagaaacattacttaactcagaatgtcaaatgcgtgaagtggtgatggtgctgtctcttctataaaagaggattgttttctccaaaatgattttgattatttttaatttatttatttaactaatatttattgagtgactactgtgtgccaggcactgttctggccacgcaagatgcagcagttaaaaaaaaacaaaaattcctgccttcaaggagctgatgatttttcttctctattacttcataaaattatagataagctgctagttgcttattatagtatatttcttttttaaagtggattttgaaagattattttttcttagtttggttaaatgtaggatcctgttttcttcagggttcttatatggggcttattttgttttgctggagttggaagagtggtttgcaatgagtgttctcattacttccaggttctgtttctctatcacagtgcacaagcttctagagaaaatcagagcacttcatgtcactctttaaaactgcctgcttctacctaacatgcctgttcgcctgaagaaagcatgatgggttgcatgttaatcacatccatgtaagggaaacagctgttaaactgcttcaaagatgtagatataaattctttccttcgtgtaaatcaggatttcttgaccttgacactattaacatttggggccaggtaactcttgtttgtaggaggctgtcctgtgcattgcaggaagttttagcagcattcttggcctctacccagtaggtatcaggagtatccctcccctctgagtgtgacaacccaaaatgtctccagacattgcccaatatgtctcttgcaggggagtggtaaagttacccccagctgagaaccactgctgtaagtgatatgagtctgtgattcaggtctcacattctctaattacagtagatcagtgaaattcatggaaaaaaagaaaaaacatctgggacaagaagtgttttctgtctggtctttgcagaaatgtggagcaactttccaccacgaaagagttaatattatatgagcaagttatcagtctgatgaagcaacatcaacaacaaatgatgaaattcctttagtacatcatgccttggaaatagcttgcatttcctattggaaacttgttaaaatcatatccatttaccataagttacaaagcatgttgggcacggtatactgtaagttaatctcaaatgatttaggagtaaatgtgttccagatttggtgagctcagctcaagcagtaggcgtctcttttccaaacattttcattctcaagaactgacattcaattcaataagtatttattgaaatgtgtaatatgagagagctttagaacagtctgatactgctcccatcacccagtccagcagaaaagcagtgctcagaagagtgcccagggagcactcttctgatatggcacctcctgcattggtttgcaagatagtatagaaaagcatgccttctcctttgctgcctcaagcccttcccatcctgtgccagctgtgccctccccagtgaataaatgttattacacatgatggcatgtgtttcttatgtgattctttggtcccaaatgggctagtttgcggttttggcagggacctccactggcctgttctacctgacccctgttggcttgttggggtattgcaagtccaaagggggaccatttaaccaacttgtatttctgaatcttcttcacttctcacacacataccagtagattttaaaatgcaaggtacactgctgataaaagtcacaggaggggcctgtcacggtggttcacgcctgtaatcccagtactttgggaggccgaggcgggcggatcacctgaggtcaggagttcaagaccagcctgaccaacatggtgaaaccccatctctactaaaaatacaaaaaattagctgggtgtggtggcaggcacctgtaatcccagctacttgtgaggctgaggcagaggttgtagtgagccaagatcgctccactgcactccagcctgggcaacagagtgagactccatctcaaagtcacaggagggatcggctttaatacagagagggtaaaagagaaacataataggctacagaatcttcactcatctggttgctatttattgttccaggcactggcaatgtagctgtgatgaaaacagacagggtcccgctttcctggaacttgcagtccattgggcaatgagacaaataaacaggccctgttttaatatggcgccaagggtgccagaaggagggagatgaggatgccatgggagcacttcagaaagcacaacccagcctggaagggcagggcagtcggagaacgccttgcagaggaagcggtgccttattaactaggacatggatacgtcacatatcaaagaggaaggggaaaaagtgttcaaggttatgttccaaggcccgaagcgggtgggggaatggagtctttgaggatctgagaagttgggcgtgtttgaataggagagccgagacaggaagagtgggaagtaaacaaggaggaggaaatgaggatgcttctcaggatgctgactggagcaactgggacactggtggtcccatttacttagatgaggagcctgggagaagagggtttgaggagggtggggtggcaacaactcgagtttttaatccgccactaactctgtaacatgggaatgatttttttttaatgtttttgaaggatgtcaaaagctaatggaaatttgaaaagttaattagcagctttaagtgatttcattactgtagactatcatgacatcctgcaaatatactctgacctcttaggttctgccgattttatttttcatccagtaactagttcttagttttgatacttagcatcatcttagtgcttaaaattgaccagttttgtgcctgaagatgtggtacccatgagtgaagcagtctagtgacttgattgaaggttgtattctggcttatccaacactcctgtgccctcttccttaaatttcctgtgccctgatggaagtttttattctaatgttgcatagactcattctacagagcatgtattattttttttagatggctaaaggcagaattggtaaatatgattggaccgtctgtaggcaggtgtatgctgttacagaattttacgagatacaggccttattcgaggaaagttgctgcatggtgaacattgtgctccgtgatgatgctgtcatccagaacatatggggaacaaatgcgattgtggggtcaaggaactgaacttcctcctaaccatctccccagccactgcctttcctcatgccccctaataggcctgaaatagccaacagtgagccttgtcaattactcctcgtttactgtagagcaacccagcaactagggagcatcccagcttacgtgcccccttttttgtctttggcaggaatttagataatgggctgtgtgcaatgtaaggataaagaagcaacaaaactgacggaggagagggacggcagcctgaaccagagctctgggtaccgctatggcacagaccccacccctcagcactaccccagcttcggtgtgacctccatccccaactacaacaacttccacgcagccgggggccaaggactcaccgtctttggaggtgtgaactcttcgtctcatacggggaccttgcgtacgagaggaggaacaggtaagcccccaaagtcacagagtgcagagagggggcagccacccttaaatcttttggcaattgaacatctgggttcccatcacttccctttgactaggggtttcacatgtaagtttctaatctgtctcctctactagatgaggggttgtaagaaaagccagagtttgatgtacaaacaaaatgcttggctacagggttgcaaggtgccccaagttgctgctttctgaggattctatatgggttagtgagctacaacattctactgaggcactgtaggtcaatgactctcagcctcacctggctggttggcacagaagaactagggcagccttttcaaaacacggatgcctgagccatgtcccagtcttttgaattagaggctccaggactgggtctgggtgtgtgtattttgagttctctagatattaatgtactccctcttcccactcacttcttcctaatcctcagcctgcctttcttttttttttttttttggaagtttccttgtctttcataccacaaggctatattctgctgccatgtgtatttgctgacttagctaatactttgtaaaatatctggcgtacgttctcagacatatgttttccgaaatatttgtaagttatgtcatgcatccctagtcatccaaattttctctgagtatgtgaaccatggtaactagatatttcacattatttgttccagaattattttgtttattgcaaaagtttgaaagaatgcagcatctctcagttcatctggcagcagatgtcttatataaaagtttgaaagaatccagtatctctcagcccatctggcagcaggtaccttttcacctagggaggaggcactactaaggcattagcaagttttttttccctctgcacccaacacacatcacacatcagtgtagttgtatcaaggagcctgaccctgagcctttggacattatctacttctcttctgctagcatagcacactctgcccagtagaagaagtatttatgttcaccctcatgctgtggtgactctagctttccttttaacccaggccttgcatgggttgaatacgtgctaagtacctttacccatccttcccaccttcccaaaggtgcctgaagagacacagacaggcagtctaaggccatctgtcttctgatgatgcaggagaaaaaaagaggcaaacacaacccccatccttgtgcctaccgtgagaagcataagggctttgccagcccagactgttaattctactgacacagccattgtccttgttcattcattcacgagtgctggatatggacccctgggtctgcaggtatcattcattaaagtcactagagagggccacttgtgttgagcatgtgggtctccaccgtagtcaggaggagtctttgtttaagaggctacctgatcccttataaaatttgaaagttaaaacacagtactcccaaatgttggcagatttttctgccttgagttatttggttttaatatatatgcatgtcctttctcccaatactgccttcagtcctgtaaggccaagaacaacgtctgtgtttctctgtaacctcctttgattctcccctcagctcctggaacatggaacataaaagccctcagtgagaacttgtcagctgatgcaaggagagagtggggtgctggtcttcatgtgccttgccttccacacagtggggctggcttggcttcatttttaaattgtttttaaagaagggaatctggtcatggagtgttaaataagaataggcatgaccttacgggcacccacatttttgttttaagccaatctcttttcttacctttcaaagaaatctaaggaaagaaggaaagttgccaaatgagcctagctttgcatggtcagacctctgaatgctaactctcctgaggaaagtcccacttgggatggggcagaaagacaagccccactcttctctgtggtccttgaatagtgccatgacacatttcttcccttggaactacctacacagcaaattggcagcttggtaaaaaaggtggactctggccgggtgcagtagctcatgcctgtaatcccagcactttggaaggctgaggtgggtggatcacttgagcgcaggagtttgagaccatcctggccaacatggcgaaaccccgtctctactaaaaaatacaaaaaattagccaggcgtggtggtgggcgcctgtaatcccagctactcgggaggctgaggcaggagaagtgcttaaacccgggaggcggaggctgcagtgagccgagatcacgccattgcactccagcttgggcaacaagagtgaatctccatctcaaaagaaaaaaaaaaaagtgggctccctgtcatttctgtaggtcatagcaggcactctgaagtgcagagagaccagaatgaaaaggcagactgcagggaactactattagttatcaactgctgtataacaaattgccacaaaacttagcagcttaaaacaaaacacatttaatttcttttttttttcaatttcagatgttttttattcagaggttcttaaaagaaataaaacagaaaagctaacagtctgatcaaacatacagctcaaaaatgtcttttgacgtttaacaacaagtcctaggaaagaaaactacagagttatcttgaatggggtaaataagttaccactggcaagtctgtggcactagtaaaacaaaaataaaaaattaaatctcggccaggcgcagtggcttacacctgtaatcccagcactttgggaggctgaggcaggcagatcacgatgtcaggagttcaagaccagcctgcccaacatggtgaaaccccgtctctactaaaaatacaaaaaattagctgggcatggtggcaggcacctgtaatctcagctactcgggaggctgaggcaggagaatcacttgaacccgggaggcggaggttgcagtgagctgagattatgccactgcactccagcctgggcgacaagagtgaaactccatctcaaaaaaaaaaaaaaaaaattaactctcttgatcatatagatatctctatatctctttttttcaatcgggtacaaaagatctttcttcataattttttttataatttaatggctatctactatatgatgtttaactaattttttttttaatatacagaggttatgtttcccaaatcttacccagacgagtatggcacttagttagacatttctggcaacagatttcccctcccctctaaccaaactatcaaatttctgccttaactaatgcagaagtatcaactagtgggagacccaggtttataactgtactaggtacacagagggtgctgcgttcagcctgggctttcacaaagcagtaatattccagggagcatagaaccagtgataccgtgacttttaaaaaataaaacaaaaacaaatttatcttatgactatgtaattttcactagaatctacacttctcagagcagccaggactttggaaactatgaaatgtcactgacatttatcatcaaatacaagcataaaatgtaagaactaaaaaatactcaaaagaaataactgcttagccctagcttctgagctaggaggatttgggctgtggaaacagggagggccagcaacctgtcccagcacaaaagaaaatagactctgaggtagataactgatcatacacagctgaccagacaagtacacagttttggaaggcaacttaatttaccattgcttttaagacatatgcaattgccttaataaaagagctttaataacagtgtattatcttatatgtactaaagtagaaataactgtgtatttatgaatcaggaatttcatagtttcaaaactggttttctttacacttgaacacttgtagtgatgacataaagtgtggcaccgcttggatccaaatcttccttcatgcttttttgtttatgtgtgtccatacatcaattaaaattataaaacctaaatttacagtttctgtgggtcaggaatctgcgaatggtcagttcggtccttcagaatctctcacaggctgtaatcaaggtacgttggctgggctatagtcatctcacagtttagctgagaatgatctgcttccaaactcatgtagtgctggcaggattcggtgcctcgctggctgttggccagaggccaccctcagttcttggtcacatgggcctcaccagcatggcgccttgcttcatcaaagtacacaagctgaagtggcaatagagagagtctgctagaaagacggaagtcaccatcttttgaagcctagtcacttaagggactgcacattctgttgagtagaagcaagtcgttagatccagcccacactcaaggggaggggcttgcacgagactgaatactaggaggcaggagtcactggggactatgctagaattatgcctgttgggttgggcacagtaggtcacacctataatcccagcactttgggaggccaagccagggggatcacttgcacccaggaattcgagaccagcctgggcaacatagtgagacccccgtctctatttgaaaaaaaaaaaagaattatgcctaattatatggaggaaatcctaggccaaatgacactggatattctctgctgctgctagcaaacttctgtaaaccaggaagggcctctctagagagccagatgagaggacatagggtgggtgtgaggaagagtgagtgctacaagacagtgtgaggagaggtgagttcaaggtagggggaggacaagggagagggttccattttcagcagtggggcgagcagcacaaaactgcaaaatgaactgcagatgccaagggcagtacatcctctaattggggtgaatattacagaaacggtcttctctaaatttccccaagctgcaggaggcatttcctattacgttctatgttactgttttaccaggagaaagggtggtgcattttacccagaaactaacataggctccaagtggaggagaagatacgaccagcaaaggatgtcagtaactgctgcagagccctgcaaacctgaaccctgacgctgacgctgcccttttgtttgggatgcaattttaatatttccctgctcctcagccctcattaaaagctattacagaaagaagcccttcaggtctaggtttctttcagatacagtaaggcttcccctacaaagaccaaggcataaacacagccctgtgactgtggttttgacacgttaattacaacacttcatcatgttattagtgctggctagatgtagattgtgagaatgagattttagtgaagatttaatttcttggaattaatttccccttgtgtaataatctcccttcttgtgaatttcgtttcggcaggagtgacactctttgtggccctttatgactatgaagcacggacagaagatgacctgagttttcacaaaggagaaaaatttcaaatattgaacagctcgtaagtttggagagggaggagaagcatgtatacctttcaggttgggaaggggtcttgcatttctggtctgcatctcttcagatgtctgaaatgctaaaagaacatttgctaaattcactggtttacaacaatatactttgagaaaaagaagagtcagtgacacagtgcagtattttatggcactgtgtgtccaaggagatttttggagagtaccaaaaatactagcacagtccatgtttattggttttggtttaggtttaaaggttgtaaaatcaccagcatcgctctccacagccctgagtgtttctacaaacctacagtttcaagtgattggcacaagccttggctacccacgtttcgtgctctctgccttgagattttcttcacatttcagatgttacactagctaagccctcacttgaggcttgcaacaagttctttattttataaactgctaaacatttctttggtgaagcctgtggaggcgtttccctataacaaaaatttgggagtgactggaatcttttggagctagaagaagtgatttcacccactcttgaatgaatatgctgcatggttgtttaatgttggccaggaggaacaacagttaaacaagcagtggggagatttcaagagtgaggatcactcacttttcaaatcctacattcagtacctccataagaagagtaaacacgggtcagattttcttagggtttataaatactgcctctattagattgaggcagtgtatgtggatgaggcccttcagaaaaaaatctaggttctgaagaaagtgtgggggggtggggttccacatcagcaagccaggcatctccagcgtccctatgagtgctcccggtggttgggaaagaatgccacccaggggctgaggggcacaccaggaagttcttctatgccaccaagtctggttgcttctcctctgctctctgagcaaatcagattccatgttggcagaaggacttggagccaggctcctcagctttcccagaaggatatgccagagggagtaagaggcagccctggtcacactgcacatcccaggaaagaggagtgctgattgccacagggacctccttcaggcctgaaaactgcctccttggaaagcccacccttttcttgaatgccccctggctcacagaaccatgcagtgagaatatgccgcctttcaacagcaagaactgaatactgccataaagggccaacgactctcttcgagacatcagaaggcacagtctacatagccacagggttttcaaacatatattaggattgtcatcattaacaaaggtgtggggtggtgtttttttaactttttgttggaacacatgcagaaaagtgcacgtatcaaaagtgtacacagtgatgttgcacaacagtgtgaacgtacttactgccgctcaactgtacacttaaaaatgattaaaatgataaattttatgttgcctatattttaccacaattttcaaaaagtatacagtttgctgaattttcacaagctgaacatgcctgtgtggccaccagccaggtcaagaagagtgttacctgccccccaggagtcctcctcctgtagccacaggaagtttttaaaaaataataaacagctaccattcattgaaggctcctgatgtaccagccatgagctaagttacaaacattctcatgcattcttccactactgtctgaggtatgcatcgacgtcatcgtttgatatctgaggagccagaggcccagattaggaaactgccccagagcacagagctggcaggtggcagagcccagggcgaggtgcagggaggcatcctgagaacagtgtcaggtttgatctgggaaaggcccagatactttatcaaaggggatgggaaccttcaagtgacaggaagctttggagagttgactggggctggggaggaggggattgggctttgatctctctgggtatacctccttgctgttattttgctgcttgttggagtccattaactttgaattctgaaatcctccgccccttagcctcccctacatgccaaggttgattagaaatttcaagactatttgtaaactttcaactgcaagaaccaaggaatagtaagagtgcagacccagctctcaggaggctttgtccacactgcacgtgcgtctgtgcattacgctggagggcgttggaaagtcagtccctgccagtgtcagtcccatggcttcttcctttgttaatctggaaacgatctgcagtgtcaccaaattgaaattttagagaaacacttaaggaggatccaatccgtctcaatctctattttgtgacttccatgcacggcctttgatgtttacggagtcctttgagcctccaaccctgttcttgtagaggaaaatattacaaaggttctcttcctcttaatgttcttcctttctgccaatggaattccatatcagtggaattttaaaattccctttctcaaggttatagaaaagaaaaataaggtttgtgtaacaagacaatatcctgaagtcaagggtaataacagggaagagaaaatcgtgaaggaaaaacaaagcaataatacagaagcagatggcacacggctcctcccctcccccatcctctcccgcctctggctctggtcctcagaggagagggaggaatggggctctgttctgccagggcagctgccacacctcctagtgtgtgtcctcccactcccttccctggtggagccctggtggcgctggaggccacagggctggctttgttaaagtacaacatacaccgtgggatgtgcatgtatgtatgtacccagaggcggtgttcctgctacccagcaaggggcaaaggtgcttcattgacccgttgtaagtgctcagtgtcatgtattaggacattattaaatttgaaccccttttgcaaagtatttaagttcatccattttattccttgttttcacatttcaagactagtcgtttaccatctacgaacagtgactctttaaaatgtaatacatgttttacacagagtggagtattggtcacagctgagggtaggtttgttgttttttttttcctattgtgataaaaagaaatcctggtttagagccccacccaagcatttgataaaattgttaccgacataaaatgctacactactgagcagatcaaggctgacttctgttggcaaataactactccctggctccaaggctctagggctcccagctccggggcccacaagcctacgagcaactttggggtttgggggtagacacttttcttggtgtggggtgtggtgggggcacagaatcttttagcaagtctttaaatcagaggaacagagacagctgttataaaaccttaaaagccattctaaaccagcgccaggctttaaatcatatatttgaattagagcaagataacaaagaatatctcaccaagtgcaaactgaaaaatctgaactataagaaccgtttaaagaaatacagctttaacaatgctaattacccacagtaactcaagaaataaaagataacatagtagagatcctattttcctaaatcaacatgaatatagagtatatctatttataggtgaattggtgcttctagtgtatcaaaaagatgacttaattcactcgctcaacggctctcaatgaatattttgagtctgtaccagcctctctaggctcaacatgtgaggtttactacataataaacattgaatctttgtcactttatgtctcctttgatgaagaagatgaccctagaaagcctagaaaaagagaaatcaaggattttatctttctcatgagtagctgaaaacccttgtgagattaatagggtcaagtgagaaaatcatgaattcctgattcatgacttcagaatgagctgataattgcattctgatctgtgctacactatttaggtacctagaccaaaatgagatagttaatgctagatttgaattggaaatgacttcattaatgccagatcacctgaataaggctgggcttgtcccaacctgcagcaaaatgtattggcttcccgcccctattgacagtctcagataccctaaaattgatgctagccatttttttcttaatttaattcaattagaactaacttgatgaaggttatcttgcattaaaaaacaataagcctctgctacaagcacttaattttttcctcgccattttggagcatttcccaggctgggcgggagagggtggagggggaggagctgggtattgttatttttaatgatgaaatgtctccatctagtggaacttcagagcagtaaaccttgtcactatattaaagtgaagattatgtctccaaagccattttccttaaacacatacagtgtttaaagaaaaaaataaacttccacatatgttcttagatgatatccttacaactgtatgtattccttttggaaggcatagaaatgagaccagtacaaactgttaacatttttaatgtcatgatttgaacctcaaagagaggggtgcttacaataggggagcagcacagtgcagatcccacccagttggtaacgatctagctcttaagttgggcagtgggttcacggggttcatatatactgtacctatattcttcagtatgtataaatatttcctaacaaagatctagacatgaactaaatttaagattatgaataaatctagacatgaactaaattttatgaataaagaactttctgaatatgagtactgtacttttgctggatttgtaatagggtaaaaaggagagattaggaaactaaattaaagcataaggttttaaaaacctttgctggcaccttggttttttttgtgggctattctgttacttatgccaccaaacattttcccacagcagcacccccagcacatgctggctggtcacctttgttctgttgctctattaaatcctatctggaggcgttgctcactgctcaccttgctcagagagtccagctttagagagcggcctctggagtaatgcttgagtttaatgtggaggctgattattctctacctgattaaatctgtctggggagcatctttaccatggccagaagctaacacattttttttttcccctggctgaaagctttgacacagaactcagccaaaagaacgatttttttttaaaatgcctgaagttttgcttgctgcctccaaggaccaaaaaaggaggaaaagaaggtcctgagccccaggagatcagatttgctgggaggtctgatttgcttgagggcaatcatgtcgttgactgcaggctggtggaaggttctgcagatactcagtggatgtcagagccgcagcgccacatccatggcctccccgatgttaatgggaagaggtacacactccattcctgctcttcatcacaggtagccctgtttgaatctaagcagatgaatttgaactgcttaatgtactcactggctttaagatgagagtagctacaagatcccctttcacctcctctgagagctccccagattgataccacactgctgtgctgtggcatggagcctaaggcagtacaaagtggcgtgactaaaaatctcactcccttgccgagtttctgtgcttcacctgtgcgagcacacgcagccattcccatcctcaccccttgcccatgagcctcaggccagtgctctggacatttgatggaatcacttcagactgaaaatgcctggggaaggtgatcctactgtagcatcattctacctgcagagaggtgtctccccatctttttgagagcaagccaggcacgtgtttagagcatgccttcatccctcatcagacctcctaacctcccaatgttaagatgttaacatttctaatgtcatgatttgaacttgaaagagaggggtgcttacaatagggaagcagtactgtgcagctcatattgacctcagacctcctaaaaagcttcccttcccagatgatctgcagctaacatgttctgcttaattaggctgaggctggattccttttccatccatccaagttaaggacactaaccaagcaaaatgccccctaccaagagagacttctcatggccaggattccacattcttaattcacaaataaggcaagagacaactgtgggttcatctcatggctgactcgaactggaaccttctgaccttcacagggggactatgttggagttcagagtaaaggaataggttggagaaatcgggtggcaggatgattaggtgacagttatacacttcagaccacagtgagtctctaactgcaagctgttgaaatggtcaacatatttacttttcttttttatttacagggaaggagattggtgggaagcccgctccttgacaactggagagacaggttacattcccagcaattatgtggctccagttgactctatccaggcagaagagtatgtttcattttgttttcacttaactacttgattttaaaagttgattgccgcaataaaatgccatcagcattgggcaggagggagaagaaattcacagcagtgattaaggctgagtttttcaggctttctgccccggtttttaccctgtgtaatacttgcactattattaacttaatgtttctcttgaagcctgctcacttattttgaaagaaaactttctatcaataccctaaatgaaaagccagtaaaacttgtcatagattaaaagtagccataaaaatatgaaatgctagctagagcatatattattgccaacccaagtttctaagcccgcagtccactccctctgttgggaagagaggggagagtagcaagtaattgccacagattaaactaagatttttctcctaagtgtgatcagaaatattaaaagagtgctgaaaagacaccttctatgcccggtaaaagtgactcacatacagtgtgtccccccaacttgggaaatactacagtgatttggaacctcagttggcttctttggtagtaaacagtgacgagcagttatttggcccaactattcaactggtagcagtttaggaaggtgttcagtaggctgaagggatctaaaagggataacctttctcccttcttctgacccatgaggattaacaggcactcccaaggggaagaactgccagtggctgtttgccagccctgagggaaggagagatggagccatgatttcccaaatgcaggaacttggcctcctcctgacaccttgggtcttgcctctctaaaaaggaagttgagaaaagtcagtcaccaagcccaacctttggctctgctatttaatttcaccatggatttgtttaagtagtgcaagagggattagactccacaccctagccaaatccccagttggattgttctattctttaattcctttgtatttcctctaagaggatctgttttgtttcccactctcaaatactcagtggttcttagttgtttctttctcctagtgactgtgtttcgtcatcagtgaatcaaggtatttgtatttaatttgtattttagggcagatttgcaaacatctttgtgttctttcagaataaaaagtaccaccaaaatgtagcattaccctgatttaactgggaatttgtcagctatatatttaagttatttttataatggtcaactttttaaatattttgtttttaaagaatattattttttaaaataatgccttcggttttacatatgcaattaactatcattatcttaaaatactattgttttggtgcaatccattgttctaacaattcctttttcaccactgttttacacggcattctaattgggttattggtacaaacccagaaagccatttctcacaaataattgacgtactagtctttacgccacctaatgctagattaagaattgttgcacattttggtgtttctaaaagtcactgaggagctaatacgcaatgtctcttttcttcagtgaaacttaattcacaaaagaatttgacagtgaactcatgatacctatattcaagcataatgaattgaaatttcattttagaatctggattctttcacagttaaatattctaaaaatggttcccacacacagattccaattgaatgctccagcattctcccttgggttttgggggcacctgctgctcattcagcacctagtgctgaaatagtaactaattgccaggcttggttaaggcttgaaagtgcagggggaggatataaggcaaataacaaaagtcttgaggtgacttaatgtgatgcctcctaaagtggcacagagtatcattagtttcttcagggataatatattgaaatatctgcaacaccaagtcattttaagggcatgctttttgactgggcacagatctcaaaggtgtacagtaaccagttcttacagttgtgccaaagaaaagatgtacagggtccaccgtgatggctccctcctgtaatcccagcacttgggaggccagggcgagaggatcacttgagcccaggagtttgagaccatgctgggcaacatagggagacagtctcactctgtccccaggctagagtgcagtggccctgtctcggctcactgcaacctccacatccctggttcaagcaattctcgtgccccagcctcccgaatagctgagattacaggcacatgccaccatgcccagctaatttttgtattttcagtagagttgggatttcaccatgttggccagggtggcctcgaactccagacctcaggtgatctgcctgcctcagcctcccaaagtgctggaattacaatcatgagccaccactcttagcctctacaaaaaaaatttttttagttagcaggtgtggtgatgtgcacctttagtcccaggaggctgaggtaggaagattgcttgagcctggagaggtcaaggctgcagtgagctatgattatgccactgcactccagcctgggtgacagagtgagaccctgtctcaagaaaaaaaaaaaaaaaagaagaagaagatgatgaacacagatcacaatccaggtgcttggtaaataaatgcctttacttatccaagtcctcacacacctaggggaggaaaacaaaatacaagtaagtactcatgggcgtttttctcagaattcttatagggaggaagttattgaaaatactattcctttattcatatcatatctatctaatctgactttttttaatgcttgattatcttcatatacattaagactgtgttttgttatttcccagcagttacaataatgcttagatatcaagagattcaagagttttgtttttttgtttattttttgttatgagacagagtctcgctctgttgcccaggctggagtgcagtggcgcaatcctggctcactgcaacctccaccttccagattcaagcaattctcctgcctcagcctcctgagtagctgggattacaggtgcatgccaccacacccagctaattttttgtatttttagtggagatggggtttcaccatgatagccagcattgtctccatctcctgacttcatgatccacccaccttggcctcccaaagtgctaggattacaggcatgagccaccatgcctggcgtttgttttttttgttttgttttgttttgagacacggctttgctctgtcacccaggctggaatactatggcacaatctcagctcactgcagcctgggcctcccaggttcaagtgattctcctgcctcagcctcccgagtacctgggattacaggtgcccaccaccacaccaagctaatttttgtatttttagtagagctggggtttcaccatgttggccaggctgatctcaaactcctgacctcaggtgatctgcccacctcggcctcccaaagtgctgggattacaggtatgagccaccatgcccagactagagtcttttagataagtgtggaaagggtctcctgcagtaaccatttcaaatcaaggtcttagatttctggttttttgcatacaggtggcagttttaacacaaaccagttctggtcatgtctagaggggaggaaaacaacccacaactcaaatctgattttttttaaagagtgaaagagatgaattagggatagaatccaggatagattgaaaaggaactgaattaagctagaaaaaaaatacatccagggaaaggttaaggactaaattggaggagaggggaattcatgggcaaaaaaaaagcctatgctgttgcattttgtaaatgactatttcaaaatattttctttccttgatctaatttaaaggtggtactttggaaaacttggccgaaaagatgctgagcgacagctattgtcctttggaaacccaagaggtacctttcttatccgcgagagtgaaaccaccaaaggtaagataacgagttgaagaagttggcttgtcattcaaatctgtggattagtcagaggggatgaaaggcttatctctaatgtacaaggattttaaaatggcacataccctccctgccttgtgagtggagtcctgttttcagtcttccctccaggctctaaaactgcagacagcaccaaaagaactacagaggccccaaatcaagaccttcctcctgaaacgggctggatgcagctacactgctccaggcacacaagatcgtagaattttcagaagtcctttagaattttgattttctgaaatcttagttcctcaggtgccagtcatacaggttgtttttgctttccttttgttttttaaataactgaggacttcacttctcttcctccaactgttggacttttcattatttaacaactccttacaacccacaagaggagacaggtcaaggaagaaaagagtagtggcctctagcttaatttgccagattatccattcctgtaaaaagtgttgtaaagcagaagcttgaagctcacttctagagaaacaagccttagatttcttttgcacatgctgctgctacctcccagtatgcccctgggtagagaagacaagggaagcaagctcagccattcatcgtggtccttctttacccttgggggaaaggagtgttggaattgagtctacgctgtattatgcaacaaggggtaccgaacagtgtgtttaagaaaaatgtccaggaagctttcagtctcaagggcagaatcattttattgctaatatattctgacatttgcagaacatcaagaagcatcttcttcctgttactgagtggagatgctgtgtgtgtgtacatgtgtgtgtgcatccttggtaattattaatcagagtcaagaaaatgaggcctaaaaagcaagctgatactctaaatgattggagctgctaatgctttccacgtttaccaggtgcctattcactttctatccgtgattgggatgatatgaaaggagaccatgtcaaacattataaaattcgcaaacttgacaatggtggatactacattaccacccgggcccagtttgaaacacttcagcagcttgtacaacattactcaggtaaccttaattctaactacctactaaccatttggatgctggagggagtggataggcccagagcaggaaagtggaaaggggtaaaactaatatgtacaaaatcacttatagagtatgttttctttgccagcccttaatggtagggcttggctgtataggttctattgctattgttctactgttgttattattagttccacatgtttgtccgaagattctataatatttttgtttcccaagtagaaagcaataggttaaattttaaaagttgtttgttttttcatcttcaagttgtcttttcccattccccgcgttgcatgtgagaaagcagtctctcggagggcgcttacatggggactcctacaaggaatattgtgtttccactatcactttaccctcagcactgttgcaggaatagctgcacgtacatttcattctcatgcaagccatttatcatgttccccaccaatactgctgtttcctaactaggcttagacttacacaacccacagctcttagatctattatgtctattgtgttaaattaaacttttataatgtacatcagtttctgtcctaacacccagatatcaccattattttgttctttctgaaaacatataattattagatatgcagtttatacattttatcaaagactggttttatgtgcaattgttaaaatgattgctttctttcctagattagcaagtattatatgccactatataatacatgttcacatgtgcctatagatataggtgcacatgtatagacacatgtctatatcctattaagcctagagatatttttttgtgtgacccatttctccattttctattgttctccaggacaaaggcaagactcaaaaatagtatatgatttacctctactattgctctgtgcacaatcattgaaatatgtatgtataatttttggcatgaaaaagcaatctttcgaaaatgacaataagaaatgtctgttgatcccttgcactaatgaacaatagaaaatattaacagcacttgcagtactagttgattatggcattggctaactcggtttatgtggattctaatgaaacatttgggagaaatggaacaaaatatctccctgagcttaagtgatatactcaaaatgcctgcatgttgtaaggatttttcaaatgctgaaatatatttcattacagccaaacatcagcaggatccccagggtttggatcatttgaaaatactgtgttcgaaagggcaccttaataacattgtaaagctggaaggaaagaggggatatgaacaatagacactttttttaatctcggggaaaaaaaatccatctcacgttagacttgtttttatattggctttccctcttccctctttctctctcacacaataaaatgcctttgaaatgctgacacataaataatttcctacctaaacatctcagagcctgattccatcaaaaagaaaggagtaaaaagcaagttacagcccagcagcacatctgctttccctgggtccgggggctgccaggagggagcgggaggtctgtccacctcacaaggcaggctctgtcagcttttgtcactccctgatttcttattctttgttaccttttttcgcctgactgatttttacttggcatttaagttccccttagcactgccagattctaaaaggttatattctttttaaaaaagaagagaaagaaagaaggaaagaagacaaagaaagaataaaaacctccgagtgttaactactttttcctttcttcttttttttataaagaatacattctttcacatcttgaatttctgtgaattttagtttccattctttctcctttcaaaccagacacctaaattatacgtcgaagactgttaaaaagttgtttttttttttttaatggaaaatatccaagaagcagcccaggagtatctgacatggtggaatggaatcagttagaaagcgaagaaatcactaaaaaaagttacttctttttttccccaccagttataatcttcaaccttactagtttataacagtttaatgtcctatagaaggatcctccactaaagttataattttaagtatagtcatatagagagatccctaatcccctgggtaatctagatactaaaggtggggaagaacagtcatattgacattctttaatccaaaaccactgtttgaaattagtaaggatattttcagcattcccaaaaacatgttattagcacgttgagctgaaaacgtttttcttcctcagtgagtacagaaaccaaagcagtctgcgtgtatgtctatgtatagactgtatcgtacctgggctcatggagtagtctaaatttaaaacgtcctctcttctacctccaatgaaaatgtttccgtgtgtggcgtctgatcttccaccgtgtgtgtggtcgtctgctggtgtagcgctgtttaaggagcgctgtgtgctgctagtgttccacgatgtgtgtggtcgtctgctggtgtagtagcactgtttgaggagcactgtgcgccgctagtgtgggtttacacttatgagtgttgtcattacatgtgttctgctcttctctccctctcctgcccctgccctgctccatcagagagagctgcaggtctctgctgccgcctagtagttccctgtcacaaagggatgccaaggcttaccgatctgtctgtcaaaaccaaagatgtctgggaaatccctcgagaatccctgcagttgatcaagagactgggaaatgggcagtttggggaagtatggatgggtatgctgagactcaattactctcttattagcttccccgtttggaagatcccaaacaccaaagatggaaggtgaaaataaagactgcgtgaccgggaagaaagtttgaattactaatagtggggaataataatttcagttttggttttaacattctggaattcctaaaaaaaaaaaaaaaaaaaaaaaaagatagtaagtgggcaaaattggcaaatggctcaagttgtactattacatgactctcaattcataaaccagcaaatggtccaaggaatgttccagctgccataaaatatcttgctcttcatttccaaaagcaaatatttgttgagtgtcatcctaacgggcaagtcaccttccatctttcctagtgcatgcataattatggattataaggactgtgttttctttattaattccctttcctgtagagaaagctgatggtttgtgttttaacttaactgtgattgcatcgagttgtaccccacaaacttctggattggctaaagatgcttgggaagttgcacgtcgttcgttgtgtctggagaagaagctgggtcaggggtgtttcgctgaagtgtggcttggtaaggcagagggcacattttgttttggctgcatctcaaagccgattaaaaggatggttttgaacaaaaatgcacacacagccgttgggacaaagacacttaacctggataactagacgggcacaggccatccagattttcagaatatgctgataccttgctgtgctcatctgtcctacttcatgtggttaattaaggcacccgcagaacaggaaaccagtacactatgaatctggtgtttcctcttcctaagaaatgggaaggtaagatactgtatatgggcagccataagaaagaccatgggcgttttgctcaatgggcctgggtttgaatccttactagctaattaaccacgaacaaggggcatatttaactcctttaagcctcagttttttcatctgtaaaattggaatgatacctttttgttgttgttgagacggagtcttgctctatcactaggctggagtgcaatggcgcgatattggctcactgcaacctccacctcccaggttcgagtgattctcctgcctcagcctcccgagtagctgggattacaggtgcctgccaccacgcccagctaatttttgtatttttagtagagacggagtttcaccatgttggccagaatggtctcgatctcctgacctggtggtctgccagcttcatcctcccaaagtgctgggattacaggcgtgagccaccacgcccggctggaatgatacttatttaaaggattatttttaggattacatgggttaatatgtttaaagtcccttgcagatagtagatattcagtagagatacatacttctctttatttgattgtcattgataaggctggctgcactgggcctttgtaatttcttttatagcccttttgggtcagttacagctttgcttagaaacaattcatgggtttaggccccactcaaaaacatgtttcagtaaaacaatattaatacttatggaatcctctatcttccttcctcagaactcattaaaaacaatatcgatcagtaccctttgctacgtgtgggtatagatctttaggtgtggtctgcattaaaagagttaatacaggtggccgggcacagtggctcacacctgtaatcccagcactttgggaggccaaggcaggcagatcacctgaggtcaggagtttgagaccagcctgaccagcatggagaaaccctgcctctactaaaaatacaaaattagccgggcatggtggtgcatgcctgtaatcccagctactcaggaggctgaggcaggagaatcacttgaacctgggaggtggaggttgcggtgagcggagatcgcaccattgcactccagcctgggcaacaaaagcgaaactccgtctcaagaaaaggaaaaaaaaggagttaatacagttaaagcacttaaaacatagcccagcaaatgataagtactacaaagatgtatgtaggtatgttaggtggataaataggtagtagacagacatacacatatatatgtatgagttagctagtttaataaatccacattattgtgtccatctctctctggacttaatctcaagtatcgtaaaatatatgacctccttcttcctcattcaccctctaataatagaggattttagtcaaattactcacacaatcacagagaattggaccctattagaaaatttattttcaaattttacaaatatcaactttaaatcattacatatactgttcacattttgttttccaataaacacaagacaacatgcccatcagaattgggatggatgtctgtgtaattgacgaagtttgtattacagaggaagatcttaatgtatttagaattttgggtgctgactcttaaatagcaaagatcacttataaattgtcaaatttcccatgaatgcttagtgggcagatattttatgaagtttaaatgaacttttctttaagccacttgttttttcataatttatattttgtaggttgcatgttgtaattgtatgaaccatgtctttaacaggataataagaactccaatttacagaatccttaaattccaaagtcagttatattaaatataaaaatcttaatttaaaccagtcttctttttcaaatagaaaataatctaaattagcagatttcttcccctttataaagttattcttaagcatcataggtctaataatggaatacacaaagaacctaggtatggttttgttttttgaatgctggggctgaaagagacccaaaagataatccagttccattcctatattttacagatgaggtaactgaggacaatcataatccaggccttgccttcagatttgctagatttttttttaacatgctaaatttaaatatttctgttccctctcagctgctgtttaatttcccctgtctacctacctgacagaagccattgttcttgtggctagccatcagtaaagctgaggaaatttgccttaccttgttgaagtattggcaagcagactgtgagctccttgccagtgcttatcagcatgcttggcacacctgtgcaaggactcagtcaagtaacttgtccattgcagacattgaaagtctagaggtaatttccagacatcctcatgtggtgccatatttttaaatggcacaccccataaacttaaataatctaatttcttccatgcacactgtactccctaagggacagctattagatggccaggcctgttccaacccctggactttcatcactgtatggtgcagagcttttggtataaatgtgtaatcatatgactgagccaaaaaaagagagagtggtaatatatcaaaatttaaaaaaattttaatgagttataaatcttaatatagccatcttagccataaccacaaataaactcattttttctgttaaaatacttgacagagtccttgcaattgaatgtctttgttcaacaaaaactgtattaagtgttttaaatttaaaatctaatcttatgcaaatagctggtggtcaaaacctttttccatcaaaagaagatctttggtttgacttcatattctgggatgtttgtaggtacctggaatggaaacacaaaagtagccataaagactcttaaaccaggcacaatgtcccccgaatcattccttgaggaagcgcagatcatgaagaagctgaagcacgacaagctggtccagctctatgcagtggtgtctgaggagcccatctacatcgtcaccgagtatatgaacaaaggttgggcaacacctctcctgtctccagctcacagtgccttaaggggttgtttaggggagagaaatggaagtttcctacttgctacttttctagtttctgcctgggtcaagtattcccattaggaaccaccagttatgtgctcgttaatgaaaacattttttaaaacagactaaccttgcgtttaccccaccccaaatccttatgaaatgccaaatactttttacatgttatgtgtgtcagaaattcaagctcctctccataattaaaacattcatttttaatatcagggtggtacggagggttatgatagtttgctgttattttgaatgtagtagcttttgttacatttcctttttgcagggctaaacaattaatatcagacactggtctctaagctaagtttagtctccatcatttcaacatcttttttatttccagctctcttcttaaacgtcaggcgatgaaattacatgctttcagagaccacatttattctcacattctctcccctacaacccctctgtcttcctaatcaaaccagcattgttagggataaggccagagatcattttgttttggaaaaatagatgaaccaaacaagaaacagccttaaaaggcaatacattgtttatcagaggataccagtgtaatttttcttttccatgtactttcttttaaaatttaatgggaatttttttttctggcaaacggtttgtcctttgtatccagggttattttgtaaataactttgtgattaaagcataaaatatcactgatgaccatcataagcctccagcttctgcaaatgattatccctgctttggtgttagttctaagccttcttaggctgtgttataatagtggctctgaagcttccaatgtttcatttcagatgtctgatttaaggcttggctggctgtgatctaattaaggggaaccatctgccccacccatattcttcagattgtcttttcttgattcaaaatctgtaaataagctaagctagtgagtctcaaactttaccttgtattattagaatcacctgtaggccttcttaaaacccaagtttctggacccaaccttcaaagtttctgatttactcgatctgggatgggacctgagaatttgcatatctaacaagttcccttgtgttattgtagctgctggtcccaggaccacagttttggaccactcagctgggctgtattttccccacatcaattctttgtgcaggggtgattggggaatgggattgaagaggtgcagttcttcataggttcctctttatgacatacagggagattgagtcccatttcttctagttttatcaaatatatgttgttattcctagaaatggaattaatgctgtttgtttttaaaaggtaactgttacttctccatgcctatacttttttctaccctgcttttttatataaacctttttgtccccccatgtggatggcattattccatttgactaccttattacttttaataagaaaaccaaatacagctctctgttgggaattatctttcaaagtaaattgaaatgattttatgttttgttcataggaagtttactggatttcttaaaagatggagaaggaagagctctgaaattaccaaatcttgtggacatggcagcacaggtaggccctgcagggtaacttgatgtgccatagatttaatgacgtgtctaagtacattgggtcgtggtgtaacatgtcctgttccctgggtttccacaggtggctgcaggaatggcttacatcgagcgcatgaattatatccatagagatctgcgatcagcaaacattctagtggggaatggactcatatgcaagattgctgacttcggattggcccgattgatagaagacaatgagtacacagcaagacaaggtgggcacttgaatgacaatggctcgtgatcacagctgtgagaacagtcacttactgcacagcccttccttcctccttcccttcccttccttcagaaaatacttgaaatgtcattcttcagcttggtttggacaccttgatctggcaggaatttgacagctctgcaggtgggagactgttgtgggcccagtggagggatgagatattggtttttggtgggtgggtgggtattggtatttgctgctgtggtcctcttggctcatgctggtctcctcacagcgtccaggcctagaatactctgtttttggagaaagagaccacatttattctcacattctcacatgcctgtgttttttacaaaggcacaggcagggtttcagaaagccaacagggcatggtgcagtgtctcagagcttgtaacagcaacagaactaaggcctcaaaggtaagggggcagagaagtgggcacaagaagtcagaatgggccactgcacagagagggcctcctcagtaaagagagacgtcagggatggatctggggattcacacccaaccccactctagcccacttctgggtcttctgccagacccaaccagaagtagaggtcacaggagctcagcgatgaatccttatgggtccagagcagggagagggagagtggagagtggacttacactacagatggtaacagcatagttactcgaaaatctctacctcctttcatcatccccgccatcccaccctctgcaaaaatttatagaaattagcctttaagtaaaatatatcccaactcagcagccattccagtggggcagcttttcaggtgctattagagcaccagatactagaaaggagtttttaggaatattttccttcttcccagatactgacaaagtggtcaccaggtaaaagtgtgtgattaagtatgtggtttgcaatcgagtataggctcctcatgtagaatataatgtttatagctggggcaagggggaactttcattgttggtgtttctaaccaaagcctagtcatcccaagcaaagcggagcagtgactggaatgtattacagggtgatgctttctactgcatttcataatggccagctctggagtccttttctttctctttttccttctccttctcttgcccctgttcctcctcctcttgattctttcatttcatgccaattatcctctcccttcatttgatctgagaatggaagcattcttagcagcctcaagtgatgaggaaaaatgttaaactaagaccctggctgctaccgatactgtccaaatgctgaattacatgtcggtcagacagctcagctatttgaatttccccaacacgtggcagttcttgtcctggagccaaatgcccacacagcaagcatacccgtgcgttacacacacacatacacccccggtgctgggccagatggcatgctgtatctctaatcaaaggcgcactgcagctttgattggcactggccgtccagagaggaatgtgcatgtgaatttgaggcaaggtgagccgagaggacctgagtgccagtggatctgagacttgccctgaatgagggactttatcctgaggcaagtctgtcagatcccagctcctcagactcagaaggagagtgggcaaaggttgtgagacatgaatatttgattaaggaaagggctagaatagagccgtgtgctcacccttctgtgtgtgagtcgagtttttccccttttcctggactttgaactctacagggtttgtggttaacgctcatgaaccatgggtaaatgaaaaggttgccaggccaggagccagaggatgctggcaggggtgctgttaatagggcctgggggtttagtccacgccttattcactggagtgaggctcctcaggctgtggccctaggtgattggcaccctcgctggttcccctcccatcaggctgctgccctgagcgggtcccaggctgctgccctcagcctggcccccagccgttcctctgcattagctgtcctgattgcccttctgccggctgcccagctgcaccatcatgtccccaggtgccgtcagagcccctttcaaaaggccaaccttgttcttttagcctttgtactgcgtttccttacttaatttccaaatcgagggtcccgtccttccttcttcaaacatttttcttctttcctccctttcccaaacaccttcaaatccatgccaaacactagaaagagagaagtaagaagtaagtgaactggagagctgaactgggggggggggaaatgaagcttggcaaggcaggtcccaggatgtcccaggagaataaaagacatgctgtcctgcagcagaggggtagggagtggcagagccatttataaaacaccttccaagtgccaggcctgagaggaaacgtgaggaccaagcagggaaacaataggaatagactcagaggggttaagtaacttgtacaaagtcacacagctaggaaaatagcagagccaggatttgaatccagaaatggctgaccctgttgcatctaccattctaagctatgctgaccacatctcatcaagtcagtgatcaaaagaacagaaaataaagatagagaggattagtcatacatcccttttcccctttattttatgggactgtttttaaggagcaccttctagtgtgtctgtatgagggagttggagagaccttccttttccagcactgggacaacccagctgtttataaaattcctcccgagggcctgccctgccctggctgctttacgaggcagaaagggcctggtgtgtgtctgctggtgtactctgcagatggcatgtgtgctgtgtgctgaagtttctgctgggaattaatcagctcctccagacagctggtccgcatgcctaataatatttgcaagtcgggttttatgttacccacaggccacagccatgctgcatcttgattatgggaatgcaggcggcattcggaaacatgcaccaaacacagatattttaggaccatgaatgacaattgttttcaaaacagttgtgagtttcccatctcagcgtgcacggaaatatctgtcaccccttgggcagatgaggtggcattgcatagggcacaagcagaattggagtgtggagctgggttccacagtccttcctgtgctccttacttcgcaccatcccagctacccaggactgagcagcagcccatgtcagggaggtggtcaaggccaggccctgagcctgtgaggtggtcttccactgacagcactctagaagcaactagaaatttggggcgattgcttattctctattccctggacatctcactcaattacagcagatagttcgtctttagttacaaacactttgctaaattctgcccaatcagagtctctaaataatgccaacatcagttatttgagtgccttatctatgaaaggactttactaggagctactgatatcaagaagcctaagactgcacgacagtcagcaagcatgaggaggaagacgtgggggattgttgaagtcagatggaactggttttgaaatccagcgctaccacctgatgttctggggtcttaggcaagttatttaacttttgcctacctcagtttacttatctgtaaaatggaaagacattttgtctgctgtatgcatttttgcaaagattaagtgaaacaatgcatgtaaagtgtttaacagggtacccagcacatagtgataaatgttgcttgttactgttggtatatctggtacaatactaagttcttggggaataaacaaatgagtgaatggattgtagatacatggaaagtctcaaacactattcaggaaagggagagaagaatcaaagataattcccaagtagtcagatgcaggtgattgtgagaatggcattaccaataacagaaatgagtacttgggaagatcttactttcagagaaagaggatgcatttgggtttggatctgttgagcttgaggtggtggtcttggtcctccaagcccagaaagatgagtcggggtgccctcactgggtctcactgccacagctgggccctcagccttccagccctcccctgagttctggtcacagccacctccctaccccaccactgcaccttcttcccagaatcattccagaactcaccacaggcaccacaaggatctgctgtccatcttcttgtccataccacacctgtctcctgtgacccccgacataggcaatgtcacaagccttgcttctggaaattcacagcccctccagccctcacttccttcagagattgcacaagcaggagagaagcagtgggaaaatcctctgcagactctagttttttcttcatgagctttcagtgccgactaatgttgatttaaacctaacaagttcagacagacatggctgtgtgtaagcataacttccttttgtggatacctttttgttctttatgagctataacacacatacagtaaaacgaacaaatctgaagtgtgcagcccgatgaatttttatgtacatatatgcccctgaatccaccccgaagataaagatacagaatacctccagcactccagaagaccccttattcccactcccagtcagtaaccacccccacaaatagccttttttccccttttcaccatagattggtaagttttgcctgtaaatgaacatcacagacatgaatcctatagtattactcttgtgtctggcttctttcccattatgtctgtgagattcttccatattgctgcatggaacagtagttcttttcatggctgagtagtattccactgtacaaatatatcacagagcctccattctactgttcctgaacatttggggttatttccaaattggggccattataaatacggctgctgtggtgatacacacatgccctcatctctctgggctgtgttctccagtggaattggtaattacagggcaaacctaggttagcaattgcagttactgcctaacagattttgtggacatatttttaaaaaggtgaatacacacttagtgtgtcatttgccagtactgtacttgcctctaagctgctagtgaggcagcctagtgagactgaggaaccaggggttggacattaggatccctggctttgaatcagctctgtcacttacaagcttggtgtccgcaggccagttacttaagctctttgagcctcatttttatcatctgtaaaatggtgataataaaaatgatcacctcacatcattagtgtgaaacttacatgggctatctataaaagttctttgagagttgtgaaatgtaaaaatcatccttatcacctcaactttttgtatttgacatacattttccttgaaaacagtctaaaaagtttttaaagagaatcactattagtaataaatagggaaaaaatcaatctttcaagaaaaaaaatactgtctccctattttatagcctaggccagtcagtggatctgggcagtcaccactttgatatacctgcatgctccaagggccccctcaccccggacacagcggggagtcacacatccactgtcctcatctccggccagcttgcctattttctcatatttgcattctctgttgagaactatccctgcctctgcgctgcctctcttgtttttaatcttgtgaagtctgaatatcagatgggccttctcagcattttcactgaggcatgtgcatacacacatcaacatgagcacacatgagcacacacacgctgcatgagcacacacacgctgcgtgggcacggctggagcagttctcccgagtatctgtggagtcggtcttactgcttctctatagaagtgatttagtttaaagactagcagcgggcccttgtagacacagagcacatagtagtatttaataaatatttgtttacagcaatggaaataaccaaggtcaccaacccccccacactcttgtgagacatgctctcctgctgtctctcatcaatgtgcatggctctctctgggaatcaaatgctgttgtggctgcaggaacctccagaaagggttgtttattgcattgatattccttgcacactccaagattgtctttggagtgatgggaagcacaagagctttggagctagataagcctgtgttcacatcctgacgccgtattcctagagcataagttctggcccctctgagcctcacctttctcatcataaaataggattggtgttggttacctttaaggtggttgtaagaattcaagaagacaattagtagaagttgttggtattattcacttcttccagctcctccccacaacactttggagtttttttgttctgttttattttggtttgttttttgttttttgggttttttttggatagcttgacctcttttcttcttcccacatacacctcagtcccctcccaaagagggcagggcctggactggttaagagcatgacccatgagatcaaagtgtcttggtataaatcctagcattgctgccaattcactgtgagaccttgaacaagttgcttaacctgtctgagcttttatttcttcctcttaaaatagggataataatagttatctatatcatagaattgtatggcttccctgtgaataaccataaagcagttggcacaaagccaacactgagctgatagtggtagttggcagtagtagtaatagtaatattattataatattgatccaatggatgccaatagctgtgtttctctctctctctctctctgacacacacatacacacacacacacacacacacacccacccacccaccccactttgggttttcctgatcgctcccatcagggctccttccacatggaggctctgcctctatcatcctttctcctgatttgaatcctcatgaaggacaggaactggggttgctctatggttttggttggtttgttttttaagttcaaaattaatgaaacaaatgtcaaggaaacataatctttggatctttggactgtaaataaaaataggaacattcgggtctttgtataagactgctgtaagtttaggcttatgtattaaatagaagaagaaaaatgtgtctgttcaaatgctcccagtattgagggtttaaattgaatagattattgtctggaggaaaattcaagtataaattagactacgaagaattactaactgttgcagttttcatgttaattatttcatgttaaaaaattgttaccgcataaattaacacattctttcatagaaaacatattttagaaagatttgttactttaataactctttgtgtattagaaatcccagatgcctgtactaattaaatataatcagattttagattcaaaaagcacagtagccatttaacacaaacaagcaggcagctaggttgacaaacacactcaggaagaagtggatccctgtttctttcgaattttgaatttcacaatccagaactgtgaattcaattcctgtccttcctttgtattacaacgactggggattattagactcagagcgccagctttccagctcaagggctcctgcagaattattaatcagccgcttctgaggcccctgtaatccggtggcagatcaaggctgatctcgccatgagatgccctccctctgcccccgtcagcacatgaatttcttgttctctgtcaacaacagcattgccattcccgcacagtgtgctgtgacctgaacagcaaatatcaggagagagaaaaggaagaaaaaaaaaacctttttaattactgaatttaatctaattcttcccatgctagagaagcaaaccatcctttcatgaaaagcaaaccctttaaaatgcaagccattgtcttaagcaccgactagtgtgttcccaactcagtggtgccgccataaaatgaccatgccaacccccacctccccagcccacattgagagtctatcatcctgagggctgtctagggagagaccccaggggacttgcccgacagaatgccctgccctccgaggtcagacacggctttcccgctgagctgagtcgcatgcctgaaccgtgctgcttgtaatcaagcttcccggatccgagtttggtacacttcagtcactaagcagaaaagctccttcatttgtattctgtcgcttcaagctctgagcttccacctcgtttctgggagggacggctttgtttatctgctgagccaccgtggagcttcggggcccagattaatagttagggggagcaggtcaaattggcagggaaatggagatgaattgtagagcgcatccattttcctcccggaaagggtgtgttgaaagccaaagattaaaattaaaagaaaagggactctaaatcaccctttcctactacagtctctctttaaagattaaaactgtttcaggtcggagatgggaccaatttctttcattcccaccctcgggcagctctgactctgcccagaggatacaaatggattggaggtaagcagtggtcacctcaagcccagcttctttgcacacctttcccctttatctgtgctggtcagtcccattttgtattctgtgtgagcatctctttctcctttgtgctgttttgggcagagccttttgatggttgtttatgaatggtcaagagcaagtcctcagtctgtgcagcccacgtttcttggtaatcatcaagaaggaagcagatggtcaccctctgtgattttaaagtgtgtaaataggaactgtagactgccatcaaacatcaaaaatgtcagttggcttccttgtcttgccttgctggcaaaaggaactcctgcatttgcatcatctgggtaatcatggacacgcagtacatttgtaaactgccccaagttctgaagcctcatttcttacagccaaaggagggggctcagtggcattgctctgccatccccagggtggctcccccattggcacagacactgtaccagattgaaaaggggagcggtttgaaaaagccaccccaaagtggtgtttgtcttctgtatatcctattatcctttgatatgttctgagctcccagtcaaaccccatgacctccaactgttcccacacagtatccccaaacccagtgctgcccatgcagcccagctcgtcatgtggcatgaagtcagactgacacgggccctctgccccttctgggggtggctggattcttggcatcatttctgtgttgagctacatcccacacatccgttgatcactcaggtgagttcctctcaccaccctgggcagcagtgtgcagttggttacaaagctcttgtcttttgttctggattgaaagtccgcaaacatagcgtttatgctgttgaagctgtgaatcagaatttttattctgtttgttttgttttgttttgttttctctttacagaggtaatcaagttacagaatttttattctgatattacttcctttctggctcttcggaaactggaaggataattggaattattcagagcctcagtattctagaacagcaagcagggctccttttttcttcagtcccacccaagataaccacttaaataagcctccataacacagtctgtactccaaggaaagtcccttcgatggttctcagatttccttcttaaaaggactaaatacccacagtttcaggagatgcccattaatgttatcctctacttttgtgttgcccccataagttaccctgggtttgtcattggtcaccgttgcaaggagggtgatggagaaaggcaagcagcccagagtttcctcccttcacttcctggctcctctagggatatttggaaggaatgtcacagtttaccttctggtagcctccatgtctggatcgaatgcccttccacaatttatcctgcctatccttccccgactgcaaaaccccaggattaatacctagagtccagccttgcccctgcattctccctggtagctgagcctactcccctgtgtcctctagttgtcctgggttcaatttttaatacccactgatggaccttctgtctcttctctgtccagtcttgaactctgggctctcttggaactttcctcacccctctcagcctgaatattccttccatggattccactcaaccagactttggatctgtgcctacttaatcaaccttatctttgcaatatgttcgggcccaccttccactccttggttcttgtcctccttggcctaacttgtcccttctccactcacatccccggtgggacagcattcctccttcctcccaacctccctccttctcaaacttcttgctcaacattatgaaatttcagatggaatataatcttaacccattgtaacatatacttttcaaaaaaacatgatgctaaaactttatgaacttgaagtagaagtttcaacagagtgcgtcaccggggataactggaaaacacccagttgtattacttcagaagcatttgggaaatctgaaagtcattcctttggcctagtgtgaaaattctgagttttgctttgccaagtttcattgggtttgaaatcattgttttgtttaaataaccacaaagttccaggtcaggtcagctttgattttgcttctttcacaggatatcctgtcctggtaccgccttgtcacctccccctcctgtaaaccaaatttctgttattggcattgtttgtgattttttttttttgttttattacccagagtaactttcaagttgaattattgcatactattaaatattggatataataatttgcagagttagtggctttataattaaaaagggctctgggtggctctttggttcagaaaaacagtgtctattgttgaagttaatgggtttcctccttgaaaatgctattagggcacagctcagattctctgtaggaaggatttggcttcttttattcaatactgacttcaccttctccaccttggcctagttttttagccagaggggatattctctgagactatggaattggcctggtcaccaagaaaaataaaaaagagagagacttggcagttcagctctccggagatgtgagctgggcccacccaggcctgtcctggcccctgccgtgaccctccccaccgcaaggagagccatgggtcatgctgcatcattccaatgcggctgcctctccctgaagccctcatctcctgcttatgttctcttttcctgtctctgctgagccctcttcttcctaaaggcagtgccaccatttagttctctgttgggtttgcccgtgaagtctgtctccctggctgcctagaaaccccaagggcggaggcaacctgtgcttggttttcccaggagcgcctcacagggtgctggggacatcatggaccctcagaagattctcagtgattggttgatgagtgttttgattaggagggttttttcatcttcttttcctcttctgatgtttggagagctttggcattgctgatggcatttgccagtgcaactcagggactttaggcctttactatctgaataaaataacagctggtatttattcagctattaccaggtaccagacgctgtgctgagccttttacatcaactgttcttcccaccacaaccttaggaggttatcatccccagtttacagacaaggaaactgagacttagggatgttttaaatgatcaaccagcaaatccagtgtgcaagcacagggatacctgactcggaagctcctttcctaaatgatcatagtggtccttccacaagtgaccactcaatcccagctcagcccacaatcggaccactttgcattgtcactgaagagcatccactcctcgtttcctggccggcttatgtactcttactgcaggaggtgatttggcagcaaaagtatctgcggtcttcattggagcatttgaaatgcccatgccatcatcttaatgtatgaaaacacataaagaacaggaagtaactgagtcaagtaagctatttctatttgaggcagaagtgaaaaacagattacctggccactagggatagagggacttcattaactggaatgtggcctggggcttgggatgggccatcctgacatgatgactttgggcagtcatcctgttggcactgaaaaaccgagagcatcagtcaggctgtgctgtcgtatgaaaggaagattttattcctataacttttaagagtgaagaaaattattagtttattacaccactgtattgacactctttgcgtttagtttgattaagtctgtgtaaaggaagagaattactttgaccgtcagggtgtcagataacttactgcctggctggaccctttagctagttagagcatttattgctgtttaaccagccttaggcaagttgctatgaagaaatatgtgtctccaacctcaaaggatttgcattctatttaaggagattttttaaataacttatgaaagaactagtaaaaggacacagaggagacatggacacagtggaacagtgtatagtgtttatgcagtcaggctctggcaccttcggttcaaatcccagttctgtcatctacacttgtcctttgtttggcacattgctttcctctcggtgttccgttttctcatctgtagaacaagactattgctggcatccacctcatgtgcccagtgctttgcatgcctgactcttagcaagcgctcagtgtatgtttagctattgtggtagctgctattatcaagcattaaactgttgtttctagcactggcgctaggtgcattggagagattagtgaaggctggagtaatcacagatggcttcatgaaggaggtgggactggagctgaggaggctgtagctaagcaggtgaagagaaagagagcatttccaaagccaatgtaaaagaaacaagtgtgagcatgctaagtgcaggacacaggttatagtaaagcaaactgaactagattaactgtgtttggggtagcaagaaccaagttaggtcaggcacggtggctcacatctgtagtcccagcactttgggagaccaaggcaggaggaccacttgagcccaggaattcgagactagcctgggcaacatagcaagatcccatctctacaaaacataaaattaaactaggtgcagtggctcatgcctgtaattgcagcactttgggaggccgaggtgggtggatcacctgaggtcaggagttcaagagcagcctgaccaatatggtgaaacaccgcctctactaaaaatacaaaaattagccaggcatggtggcgtgcaccaatagtcccagctactcaggaggctgagacaggagaattgcttgtacccatgaggtggaggttgcagtaagtcaagattgcaccactgcactccagcctgggcaacagagtgagactgtctcaaaaaaaaaaaaaaattaaattaaattaaacattagccaggcatggtggtgcacatctagcatcctagctactcaggagaggcaggaaacttgcttgagtaagcccaagcaagaagaagagcccacaggggagacacacaaaatgcttggaaagaaaggaaggacatggggaagaataaactcagaaaaataattcatgcatttctcatagaaatgtttgagctttgcgggttggaatatgctaagttttactgctttgttaccgaaattattggtattattcacatgtgagaagtgtgctaaaatagtacaaatgtacccagagccactcgttaagtaaacatgacagaagtgacaatggaagcatcatctacccaattgctaattgctgatagacacccatgggccttgaaatgtcacgatgcttttgaagagttttgaaaagtcaaaacacttttcccattctgtctcatcataagtcattctcaaggtaatgatgtgttatcttccatgttttaaaagacaaggggaaagaacgacgtgggaagtcatcgcacttctgctcacagcccagtgactttctgttgcgcttaggatggaatccaaaatcctagtacaggttacagagtcccacaaaatctgtccttgtaccccatcttattattcttcatagcactttattgtagttgacatatataatagccattcatttattttatctccctcaaactaagcttccagctccatgactgccagagactgtgttccctttcgtcctcctggcaccgagtgcagtgccaggcactggggaatactccagaaatacttgtggtaggaagaaagaacaagccagcccagcagtggtgggtgtttgtgttgttatttctgtggacaaactttgataactgaataaatccacagccctctcctttctcttgcttgaagcatggatgattattaactttattttaaatgaggaagaccagggcttggtgaggtcaaaatggttgatgtctagtcacttgcattcatcccagtctattaagaatttattcttaatccagtctattaaggattttccactttgtttcactgtgaactctcccaaggccccttgccacctcgtctttctgctgttgtaactaaccacccccatccccagctgcagccccagtgaactgggcccccttgtcctcagagaacaaagtatggggctcccccactcagatacattcactccgacccaaaggggatctgaacacacttcctttggcagtgaaaatgcagggttctccaggtgttttaagtttcattagtgtgtggctgttgcttttctatttcaattggcaattcttagactcttaaaaggacatccagacagtgacactggtgctgtcaccaaggacaagtagaagactcaccagagggcagggaactgataatacgctctgtaaggaactgtggttattcagccaaaaagggaagggctgggagggctgaccagctactcattcattcattcagcacctgtttatcaagtgctttctctgcagcagacactgtactcagtactggagatgtggccatctgggaagacatgctccagcactcaagcacagtatttatctggggcagagacagccttcagacaattcatgcattcattgccctttaataataacagcttcgttaggcaatatttactgaaaaaaagtagtgacaactacaaagagggaggtgctctggcagcatagaagtaggaaacctaccgcagtctttagtgatcaggcaaaggttccctgtgcaagtaacactttggctaggagcaaaagagaagtaagaattagccatgggttaagggcttttgataaaggaaatagcctgtccgtgaagcaggtaggagcttggcatttgcaaagcagtcaaagaagggcaatggagaggttgcagaggagagaggagggaagcagaggagaacaagtctgggatgataagaagcagctggggaagtaggtagggaccagattatgcatgtagattctattagaaggctactatagaaacccagggggggacatgctgagcaagtgaggactagaggaagggtagtgaattcaagatcatgaaatggtcaggatgtaatggacctgacacgggcagggacaaagcaggagagcacagagatcattcagtaaagatgtattgacctccttcaataggcaggccctgtgctgggatctgagtgcacagtgatgaaaaatagagtgtccaggtgaggatgattctcaggattctgttgtcaccaactgggtggtttacaaagtcaccaaggattgagaagccaaattgtggggaagataaattttggatgttgcatttgaggggcactgacttgtataaccaatttcatggagagacaattgagagggaaattggttatgcaagtcagggactcgagagagaggtcccatctggtgatataaatgcaggcatcattggggtcaagatagtcattggagccatgggattgaataagatccctgatattacacagagtttgtgaccacttatttcatatctcaacagaattcagagaaacaggattgagctgtatatcagaaattatttaaaacatcgacacatttattcattacaggaataattcagcctaaggctaactggtcttatatatgttcctgggagttaaatgactaaggcacaaagatcctcttacatggaagttctaggacatgggtaccagtgacaacaccaggttgtcaagttttcacaatgacaagtcgaggtttcggcaatgagtttaccttgggagtttggtaaaatttgcaaatagtacctggaaaacattcagtggaaaagatgcttccaagtacacacaccacacacacacacacacacacacacacacacacacacacacatattatggccttcgtgtattggcttatcctaaagaatcctaaactgttaagctaattcagtaagaaatgacagagtggtcacttctttttttgaattcatgtaaacatggaacaagtacagtaagtgttacagtgaagctcaagatatcagtgacatagatgatcattacctgcatagtttgctctgtttcctctaaataaaatgcaaggaggagaaaactgttttcatatctaaatcctgctcccaagcagaagaatttcaaagtgtgaatcagctagttacataacaataccaagttaactgcattgcggttctcctgatgttttctccgttgttctgtaagtccatactacttagaagaccactttgattctgactttttgcctgtcagaactttactttcaagggaaaggcaacgtttacacccaggagatccttccttcaaggtgtctgaagtctcctaacttacagagctcactgcagcagccctgcagcagggacatctgtgggattgtataggttatgtactacacaaccttagggatgctgttttcatagactgggattttacactgtgcaacctgcaaggctagttttaaagacacctgccaaaaatccccagttaactccaccacatttagagctgcattttagggccaatagctttgtaccctcaggaggtgggaagccaagataaggggaaacagaagtaatgagatgtgtccaagaggaagcagggattagctcttttcagtagaaacctcagttaatcattaataccttattgctgctttgatttaaccttttgtcttccttgaaaaggaaaatgagttatctataaagaagcttcttttgttgaaagcagctgctgttttaagacagagaagaagcaggagaagttggacaaagacattatgttttattcctccaaatacattataaatacattgtttggtgtaaatatattgcttgccttagaaagaaaattaatacaaaacaaatttaagtaagttccgactagtagtaactcagaccacatatctacaaatgacttcctttcaaagattccttacattaatgcagcctttgttttaacattttttgaaggtttatatattataatccttattgtagattataaaatgagaaaataataaagctgactaatgcaactggctgatattgccgttggttttttttaatctgaaattatgaaatcccttggaaaatctaacatgacagtatccaaattttaaatagtcactttcagcaacacacacaccttcaccaatgttgagtgattcaaagaaggggaaaaacaactcctttggttgtcattttatttacaggatttgtctgcacagcagagaaaaatgttccatttacttcagagatggtcagagatttccaagccatttggctcaagagatggtttaaataggaatgaatgtagtatacctttaattctctgaagtaagagaactccagctgaggtttggtccagagcaaagtctgctctcaacattgaagaaaatctatcacattaatcccagtggctcagagtccaaagctgcgtgaacagaatgctaaaggataggaagtgtgagaagaatgctttgaaagaaaccttaaaaacaaaacaactgactattcagagaataccaggtcttatgtggaatcatctagcacgtaaggaaagatataaataattatgcctgagaaacataactaattaaaaataactccatgcataaaaggaaaactatagaataacttttctgctccagtgttaatgtgagatgcctcataatgaaatagtaggatttttttctttcatttcatttcacacagacacatgagagatggagaggaaaattatattgcctgaaaatgccagggtagatttactaaagatgttatcatatgctgtatttaagacaaaaatctaattgctgtaatttatcatacctctggctattaaaactgtgccaatttaaatattttaatcattcgccacttttgtacatagtgactttttatagaagattctatgaaatgttctgattttgtcagcctttgtatgattttcaggagctccttaagcagaatgaacatgctttaagcatgtaactgtgtttccataagtaataaaaattccttgtgtttttcttttagtttgttcagtaaaatacctggaactgctttataattgctgagctgaatgtttgagagcacaagctgctgaatcccttttattttattttattttatttatttatttatttatttatttttattttatttcatttttttctgagacggactcttgctctgtcacctaggctggagtataatggcacgatctcggctcactgcaacctctgcctcctgggttcaagtgattctcccgcctcagcctcccaagtagctgggactacaggctcgtgccaccatgcctggctaatttttgtatttttagtagagacgaggtttcaccctgttggccaggctggtcttgaactcctgacctcaaatgaccgcccgcctctgccttgtaaggtgctgggattacaggtgtgagccaccacacccggcctgaatcccttttaattccctgcacacacatcaagcttgtagaaagcaaggtggaccacacccttccttttggtttagagacaggattctttcaatgatcaaataaatttttgaaaaaaaggactccactgactttgacatgaatttgcaccttggtcttgaaaagtcagagactcataagacagtcatggaggcagaactgctctttaaaaaacaaacattaaatagtactcttgctgggtggtagaagaaaaagtggtaagaaagtgatcttacagtatggaagaaaaaactatcccaggagtaaagatggctactacagggagaaagaatggaggaaaaacagcaaatgtggagagagaaggagctggaggcagattcctttccctgctgtgggtgtgggaggcctttgggaaatctaacacatttcagcagaacacatgggcagtatccagttgtccccaccctgggagcagctcagtggtttaatcaggttttgtgtacccagtgagaccacactatcttatatacccgaggactcatgagagcagcattatgactaaatcctatgtatgtttattaaaacatagcattatttcaaagttaaatatatatataattttcctaaatcataagaaaccagggcttcttcccccctttattgaggtactaaggtgctttgagctggattacttacggtcacacagtcaagaccagaccctacatcttcccaatcccagcccattcctgcttcacctcctttctgtcttcccctctaaacctgctctcaggaaagtagcttgccaagtgcctttccctcccacaccccatgcccattgcagtgccctctgcctgatgaataaccaagtgttcattctgcaggtgcaaagttccccatcaagtggacggcccccgaggcagccctgtacgggaggttcacaatcaagtctgacgtgtggtcttttggaatcttactcacagagctggtcaccaaaggaagagtgccatacccaggtaagagcagggcctcacagacatgggcctgagattggaggcttttttgacaccatttgggaaaacttcatccactttgctttctaagccccatcctcagctttctgctgagcttgagtttgaagaacatggccaggtattcagcgagagaaaagcagaactgggagccaccatgtatgtagacaagcagccaccatgaactgtgtgccaggattaatgtaagtagcagctggtctaaatgcttcagtccccctccagttcatagaatctctcctctctcagtaggagtatgtgtctgtggttcccagagcagaaatgtcactggcagtgcctctgcccaaatggagtttgcagacatgtctgggaaagagaaggagaaaagccccactgctttttgattacactgtagcactgacccatggagtgagcctggcaggaaggtgccaggacctgttctctccacaggacccagctccagatggccaaagagagcagaggcacatgtgaaatgcaatttagagcccactcactgcctgttgctgaacagtcaaaacatgctataccaaagcaagtataatgtaaagaaattggaaattcttagactctggaatgtttctgtattatcagatttatgctctccaaagaaaccacgagtttggcttatccatgcttaaattgattaacgtcgacagatggtgacataaaggacacccatgccatttcacctccacgctttagtggttatagcacagggacgatctgcttttttgaaatgttaaggacatatttttcagttactgctgagtgaagaaagaacatagctccccctcattccctgcgtaagaaaggagcttaaagaaaaaaaaaaaaaaaaaaacaatgatagaaacgatagtgacgattaatgaggaatttaggtctcttgcaaatcctgggtttgtaatcatagctttgcagtcagaggagctagcgaaggcagattaatttgtaatccctttgttccttttttatgattgtttctggtcatcttcagagaacacagagaggggcacatcaagataatctcgttctgggttggtgtagccttgagactcctaggagagccaagttgacatggaggcaaaattgacaaattcccagtctctgaagtgccggcactgggcgtttagagatgcgggtgtaagtcagttttattgatgctgcggtgactgctgctcccggcatgcacacacgggcagacactccgggaatcgccaaccagcacagaagaaagggccgccctgggggatggagcacagcgtgggtgtttctgaattgcttctcaaggggggaaatgtgcgggtctcaggagggcgaggatgtgaaggcatctcttctttatttattgtctgaattttgaactgatttcttcctgatccctcccaggtttatagtcaccctgtgtgttaaatgcaactggggagaaaaggttaatgttgttttgcgtttctgtgaagccttcccttccagtaatacaaagcagctttttgtttctcagggtctcacacagaaaccaagacaaaggggtggaggtgggggccttggagaaggaaggcaggtgcgtgtttctgagggagtcttttgtcaggtttggttttagcataaagaaaatgccctcattttaccacttagaccaggattcattcattcagcgtagcttcagtcactgtgaactgtgccaggcattttcctctatcggggagatagtgcaaataagaccctcatactctaaacaagccttgattagtacctgcctcaggctaggcattgttagcacagtgggcaagtaaataaatttagtccctatgttcatggatattacagtcagatagataaaatatgcatcaaatccaggaagaaaccagccttctttattccttgtttattatcagagggagtcatcctgaaaggatggactacttggctttacctactatggggcctagatcttcattctgataatggggtcagggacacctgatccaggtatccacacacagcaggtcctgagagggactcttcaagctgagtcctgtgaggatggcagaggagtttgaagtgagaactaactccagcggctcctgcagagagagctgtgagcaagtgctggtctgcagtgggctgtgataactgcctctagctgtggaggagtgctggagagggggctgtgtagggaaggcaagtaagccagaccttggaagccaagtaggtttcctcaagcccagaaggcgggaagagcatcccaaggtctggcacgtgggaaggcacataggcctgggaggacagttccagggaccacaggatgaatctgagaagatgccatgtgcaggggcacacctggagatgtgactggaagggtggccgagagcctgcgttggggccttgctggttggcagtggcaaccagggaaccgtgtcctcattgggggtgtcgtgagctggtcctcattcaaagaaagccacaaaaaattgttcccaggcctgttcctagccatgggttcttcctgggttttgctttttaacatagctataatcctatttaattgggtttgtgaatccaacagaaaactcttcttgagggagaagcttttacagagggattccaattataggattattaccctaacgaaggataataattcctaaggaacaagaggtttcacgaagcttccttcagatgtcactgtgaaggcaaagaaggaccttcctctctgcattcttgctatttgttggtgtggcaagtcagtcagtgtgcgctgaggggtccttctcagcttcccacgttgcgtctttgtgcctgttgctggtacctcaggacagactcccagtcccggtccatcatgatttccattctgcattttgatgtagtcatgtctcatgtctcagttggctagagtatattttgaagtaattcttttttggagaacagtagatggtggtacatttttctgagtcttccatacctgagaatagcctgctgtttccttgacacataagaaagctcctttgcctggtaggtgaagatggaggtgcgggaggagggggtgacatataaattggttttataaaagctttccaggcatctttgcccagcgtgaaagaaggtccagaagtgacaatcccagaaggaacttagagtggagtatgtgaggtgtgaccaaataaagggcaaagggaggcggagatgttagaacattggcaagttgtgtgagaggagtggacaaaagaagggaagacgacaatctcaaactgaatgataacctggaagccgaaggaaaaaatactgaaatatgatgctgagattaacgggggtggtagagaaaagttacatcaccttaccagatgaggaaggttgctttcgagatgtgtaacaagtatggatgcagttccaaagaagagctccatcagttccccgctagcagcctgagctgaacgcattctctgcattgcagtctagcttgcttttctgcaagcaagagttcagaagctttctttacttcaagattagaactgatttcatactgatggattgttgtatgtgagaaataaaaacacttaagtaaaagcagttttctggggttgatgcataaaatcagttatgcatttttacctgtcatttcaccttaatacctttctcaaatccttcttttcccctctgcttccagtttctccccgcctccccaccacccacccacccaccattctatcattgttgccaacagagttagtattctagaaaacacagacctggttatctcaccctgctagttaaaaacgtccacggcttccctttgcctttcagataaatcctagaaaacgtaattctacatagttcttcataactctttttctgtagtcattccacaaatatttattgtgcacctactatatgccaggtactgttgcaagcaccaagaatacagcagtgaagcaatagacaaatgctgctgccctcatagacttccattcttctttgaggagacaaacaataaacaaagataaataagcaaaatatattgaatgtttgctgctggtaacagctagggagaaaaataaaacagggaaggggagagaggggagagtggcaaaggagcacctcactggtgagtagaagacctaaaggaagcaagaatccagccaggtgggtatctgggagcacagccttccatcaggggaagggagagtgcagagaccctccagaatcaaaggaggccagcatggctggagcagagggagcaggaggtcccagaggccccaggggcaaatcagataaggcctttctagctcatggttgaaacttttgcttttagtcttagtgaggtgggaagtgaggggatttgagcaggagagtgacatgatttctctcttgctgtcttccatccttcacacgttaccaagacacatcaagagatgtctcttgaacatgcaggtctctctttgtggctcccctgtctgcctcagaacccttcaaagcccaactgaacatcatctgctttggaaagccttccccatgtccagaccaaatggggtgctccttctgcttgcctccatgacacctagcatatttctgttgggccccccgtttgtgtgtatttctcagcagcttcagagaagggagtccctttgatggattcccgaggtccagcacagggtccaccccatagtagactgtcagtaagtataagcaaataaatgagtgaatgaaacagaaaaaaaagaactcacctatgaggtttttgaaacaaggtttttaaatttagcccatagcctgcaaagccttttaactgcattccatcatcttcacacatggatatatattttcctagccacaaggtagcctctgtcctcaaagttcttctggaaaattgaccctgtgatcatttcaaacatcatgttccaacactattctaggcagagtgtcctggctattctgtgccctggctcttaaccgaacacctgttttgtggatttggcaggacctggtagaacaggaacactttcttttttttttttttttttttttttttgagatggatggaatcttgctctgtcagccagacgggaatgcagtggcatgatcttggttcactgcaacctctgcctcctgggttcaagcgattctcctgcctcagcctcccaagaagctgggattacaggcacccgccaccacgcccggctaatttttgcatttttagtagagccagggtttcgccatgttggccaggctggtctcaaactcctgacctcaggtgatccactctccttggcctcccaaagtgctgggattacaggtgtgagccactgcaccaggccaggaacactttcttaagcaaaccacacttattcattcattggaagcactttcaaatcattcaacaggtgactttcttgaatacatctagtcgcttgataatgacctgaagaaataagggaaattaatgaaactggtggctttttccttaaaggattccaaatgccactctggtcctccctctgccttagagccctgaaccgtagatacattttcctttgtgttcaacataacaacaggagcaggtttttcatgggagaagaaagggttaggactctccaaccaggaggagactgggaagccgaatgaaagctctcatcttagccgagggtgcgtgtctctccctggctcgtccacagtccctggggtttttcctgcagctcatgatgtcccctcagagagggaaccctgcctggaatgcccagaggtcatgctgtcacctccttctacaagatttctcttggccagcatgtctagtgagaggaggagggagaccaggggagaatgcgtgtgaagagggtggccaaagagggactttcggcccccagtcctgtgttccagcctcacgtgctccttgttctcaggggtgcagttccggggccttcctcatgggcaccctgcctctctttttcactcctttttttttttttttctgggacaaaggagttctctatgatactgtattatcaacttcaaatacagaaatacctgtgtattcagttacatgagtagctgtctttctgtgtttattaatacaatgggctgaataaaaacagctgtcctgaggttatctggcaagatgaggaaagagaaacaaagcaagtcattattgtaccttctcaagataagttctttattctcatccacactcttccatcagcatctccctgcccagaattttcacaatgatcctatactaaaacctaactcagtgtcacggttattaaccagtacgatagcaaggacacatgagaatctgttaatacaagcacatgcgatggcgcaggctcatgctgagcaagcaccattaacacccctcctccttcccagcgccagcacagcactgctcaacagacatgtaaacaccgggccttttatgcacagaagcaaggggagcctcagacccaaggccctatgcacaacgttgtgtgattccctttgaacggaaagctcagttagcaaaaggaatttgggtatctgataatctaaacatcattcccattgttaaagtgcttaattattcacatggcacaaaaacccaggttttgcaacccatagtcaaatccagatgcaaacatggacgggtaacacttaaaatccctgattgtacagatatggcccatctgagatccatattgggaagctgcacaaatggaaagctataaaacacaaacactcttctttcataaaagacattttttcagatagctgaaagcacaatgaatgttgaggtattttgttaacaaatggagaagccaagttcaagggaagtcaagtcacttgctaaaagatgcaaagttagaagtcaagaagtgacatctatttcggtgctctgccaatgaaagtgatttttattccttccctatagaatctaaaagaagaccaggtatagtggctcacagctgtaattccagtgctttgggaggctgaagcagggaggatcgcttgaggccagaagttcaagatcagcctgggcaacatagcaagatgctatctctacaaaaaaaaaataaataaaaataaaaatcagccaggcatggtggtgcatacctatagtcctagctgcttgggagactgaagtgtgaggaggatcgcttgagcccaggagttcaaggctgcagtgagccatgatcatgccactgcactccaggctgggtgacagagcaagaccttgtcccttaaaaaattttttttcaaagaatctaaaaggaaaaagggaagactactgagttcatgtacagctcaaagaagtggaatagggaagtttaaaagaaaagggaaaagaaaacacacacacaagaatagacactgttggcaaccctacagagtcagagtttgaaagtgagagttggaaacttgacctctgagtttgctggaggaagccagcaacatgatttagaaaggataatataatcataatggcaggaagtgagcacagtcttcttggctggagaatctcagttgcagtgtttggggcagactgactggaaatgatgctatgtcggggaccatgtttgaaagcctaaaatctgagttgacaaggagatgttccatggaggctctgggaaagagggactcgaaggcagacccccacacagcggactagtaaggtctcgctctgtcacccaggctggagtgcagtggcaccatttcagctcactacagcctcaacctcctgggctcaagcaatctttccacctcagcctcctgaacagctgggaccacaggtacatgccaccatgcccaggtaatttttgtactttttgtacagacagggttttaacatgttgcccacgctggtctcgaactcctgagctcaagcggtctgcctgcctcagcttcccgaagtgctggaggtgttttatggattgagtactgttcagttgtaccctatgaaagtgacccaccacaatggcctgttttcctgagcaattctagagagacagcagaaggggctggtggctcccgtgaggctagaagggcagaacagcagaggaggagagggttggaacaaaattgggcagtggcctctgtgcttgctggctccccagccccaagccgcctctctgtgggaaccagggaacattcatactgctcgaacgtggctcttcccacagtcagacaccactggccagccaggatctcccctcctgttgaaaaatgctctcccttgcagctcccactaggaaacctggaaggccaaactgtttatgacattgtttccctaaaatgtgctcagacaccatgttttataaagtttctgtctcttctttctgttaagaaaggagaaaaaggatcccagctactcaggaggctgaggcatgagaattgcttgaaccagggaggtggaggttgcagtgagccgagattgtgccactgcactccagcctgggcaacagagcgagactctgtctcaaaaaaaaaaaaaaaaaaaaaaaaggagaaaaaggaaaaacatttccagcactcttgtccacctcctcagttggaagtgtaataaaaagattcttctggctgggcatggtggctcacacctgtaatcccagcactttgggaggccgaggtgggcagatcacttgaagccaagaattcaagaccagcctggccaacatagtgaaaccctgtctctactaaaaatataaaaaattagccaggtgtagtggcatgcacctgtagtcccagctactcaggaggctgagacaggagaattgcttgaacctgggaggtggaggctgcagtgagccgagatcacaccactgcactccaccccagatgacagagccacgcttcatctcaaaaaaaaataaataaataaaaaataaaaggattcctctctctagtgtacccatgtctctcaagacactctcccaactgccctggtgcccaaactcgtgtttattcccttcctattcactatccttcacctctcaggtattaggtaaagccaatgtcttggggaaaagtggctaaaaagaggaaatgacagttttctttctaacaaaaatatgaaaccatctaagaagaaaaaaatgaagtagacctatctttttgttagtgtgcagagtaaaagccatttaaaaaaaattatttaaaaaaaccatgattttcaaaattcatatagctgagaatactgtattttaaatacaggttaagtatccctaatccaaaaatatgaaattcaaaatgcaccaaaatctggagcttcttgagcactgacataacacgcaaagggaatgctcaacttactggttgagcagccctataatgcaaatatttcaaaatcctaaaaaatctgaaatttaaaacactcctgatcataagcatttcagagaagggatactcaccctgaattaacacaatccattcaatttagctattgtttataaaataaaaactagcccaagccttgctgagtgggcatatcttgattgccaccgttattgttgcagaggtacattgtgaagttgccaggtctgcaggtcagcccgttgcaggtcctggtttatggatggttggaaaagagctagtcccattccaattgtcattgtcagccaagtgcattgtcaaaatatcccactttcctggcaaagccctcattggtatgtttccacttggcccagtgcgtggaattgttttcatatactccccttgctttgagaggtctgggcagaagaaagcaggagaagaagaggagtggggaagagcggaggggtgcagacaggaaaggggagagcgagaaggagcctgaccatgtgggtctgccaggaccctgcatgggccagcttatgccctgtcccctggctccaaatgcccaggaaagactgcctcgggagacgctacatgttgaggttcacatcaccaagtgtgctgtgtctgaggcttggaccgagcactggaaaaatgacccagtggccaattaaactttccattggcagacattggatgaaaactttttttttaagtgaaatctttccatttgagtagtttgttttttaatgaaatgaaacatgtactgacatgcgctctgtggagcaataggagagtgattaattaaactctgtgctgccattttggagggaggcactcagagccagagtcaagcattaggaggcgtttcaggggctgtaaccgcacccagaaggatctgtcaggcccttctgcctgtttcccctcagttcctgtggactcctggaagggacagagacaagggagatttctgctggtccaagctctgtcattgctgaaatatgaaaccaaggacagtactaaaagatgcggcaaggcaaatgctttggagagtgccagttctgctacgtgattacacactcttcctaatctttctgggcaatatgtatgaagaaataaaaacagtaaatagcctcgtaatcagttcaggttttgtggccagatgaggtcagttcagatcagttctgtagtcaagtgagttacaaaaacttgatggtgttcagagctcgttggatggtggaattgtggagaaggaaatgctggcctctgtccgcgtttatctagagccggaggaggctgcctttcattcccgagcatgctccagttcctcccttgcttccagctccccgcccccatcccccattttcagccattggaggaggatgtaggctaattagccacagcgctgcctctcactcctcccatgcaactgaggaagtcgctggtaaaggcatgcatggcacagaggcagggaccctgactccttcaccaaacctctctccctaaaataaggggtcgccctgacacgtgagtgaggttattttacaataattgcattgaaggcctacttcagtacagcagaaacaatatgtgaatttttattacctcaagaaatgataatggcagagaataagaaagcatcctgaaaaggtctggagagacatgtgactgacaggctgtggttgacagccaggaggagccaggatacactcagctccacaagtaacaacacaaccaagaggactggcaacagaccccgaagtccgagtgttccctctgcagggggacaggctgtgctctggcccagcgcctctggctgtgctgacaagtttctagctaacgggtcgccacctcccctagaagtaaaggaagctccatgcatatggtgtgtgctcctgctggctgtagccctgggaaataggggaagaaatcttggtttctatatggcttgacatcgggttcttgctcctgcaaattaaccgggtcagatactggggaggattccagatgacagcctcaccggccaggaagcaaccaaagcacagcacagcttgacggggagctggcagaaggtgatacaatgaaaaagggaagcaaaactagagaatagtggctggcagtagttgggaggaggtcaggacactggccaccccctaagcatggtagttcctgtagtgttaaggcagccagtgtgcaggaggccgcactctctaaggagttagcgatctgtcttctgttagtgctatgcagcccagtgtttcaacagcttcccaagagtcagaaaaacctcaaatgatggatggcctggctgaagtcatcagtagagataggccccggacatggtctatctccccatcaaattcaccaaacctcagggcactgtggggttgcagggccagacagtgcccagccacgctggcatgatggcagatctccaacagtggggaactaagagtttgcccaggcatgaagaaaacgaatttatgaagttcataaatggagtttataaatgctataaacaaggggcagcatgctttcattctgtgtggatttttttgtctgctttattcatacattgttgtcagtttaattgaagtataatctacacacaataaaattcaacaattttaaggatgcagtttattgagttttgacaaacataaacagtcacaccaccccatacataatatagaacaggggttggcaggtctggctcccaacctgtgtttgttttgtacgtttttaaagggttgttaaaaagaagaagacagggatcatatgtgacccgcaaagccaaaaatatttactgtctggccttttacaggaaaagtttgttgacccgttgaccctgacagaacattcccatcccacttggagttccctctggccccttggcagggattcctcccctcccccaggcagccactgatctgctttctatagatgtagttgcgccttttctagaatttcgcatgaatgaaatcataccgtatgttgcctgttgtgtctggcttccttcacttatcatgttttgagagtcattctgaatttttcatgtctcagttctgcactccttctttactcctgagtagcatggcagggtttgactcctggggggatgggagtactccgcatgttttagccacatgcagacgcaaagaagaagaaaggggatctgcaagtgcggcggtcagggcctggatccccggggtgcccactctcactgcgcttgtctttgcaggcatgaacaaccgggaggtgctggagcaggtggagcgaggctacaggatgccctgcccgcaggactgccccatctctctgcatgagctcatgatccactgctggaaaaaggaccctgaagaacgccccacttttgagtacttgcagagcttcctggaagactactttaccgcgacagagccccagtaccaacctggtgaaaacctgtaaggcccgggtctgcggagagaggccttgtcccagaggctgccccacccctccccattagctttcaattccgtagccagctgctccccagcagcggaaccgcccaggatcagattgcatgtgactctgaagctgacgaacttccatggccctcattaatgacacttgtccccaaatccgaacctcctctgtgaagcattcgagacagaaccttgttatttctcagactttggaaaatgcattgtatcgatgttatgtaaaaggccaaacctctgttcagtgtaaatagttactccagtgccaacaatcctagtgctttccttttttaaaaatgcaaatcctatgtgattttaactctgtcttcacctgattcaactaaaaaaaaaaaagtattattttccaaaagtggcctctttgtctaaaacaataaaattttttttcatgttttaacaaaaaccaatcaggacaggtgtttgtttttgttttcttttttataaatatgaatatatataatatatatgtccctgtacatatacaatgtgggtgctaatgtggagactgtggccggcctgagccaccaagctgcgggacccagagggaggattttactgcaagtcagcatcaaagcaccggtgttattctgaaaacaccagtggcctcatttttggcttttgcaaagcatgaattttttcatttggattgcactttcctggttcatgactgtacctgtaggtggttgttactttgactcttttcaggaaccaccccccaagctgaatttacaagttctgttagcactatttgcttcaacttactgcgatttgttctcaaaacttaaaaataagcaagcaaatggctgatactaccaagagaactggaagatggataccacacaaacttcttgtataaaaatatgaatgctgaaatgtttcagacatttttaatttaataaacctgtaaccacatttaagtgatctaaaacccatagcattgtagtcatggcaacccgctaaactttctcatgcaactaaaatttctgggggaaatgagggtgggggttgtacatttcccattgtaaaataagtgttttaaatgtcctgtactgctaacgaatgactttctatatgtccaggagttctccagtggaataactatgcactactttacatttcatggggatgcacaaaaacaaaaaagtattacatttttagttgctgtttgtaccaaccttaaattacatatgtttaacaacaacaaatcaaaaatcctatttctattgagtttttaatactgactagcaactctgaagtcttaattccttttttgttatgatttatttgtgagtttacatttttaaattgtttaactttcttaatttagtaattaaaaagagagcattttacatttgaattttttttttgtttatttgtttaaatcatggaaggtactcgtagttctgtggcacatctgtcccacaccagatggtatggaatcacctggtgaatttagcctttgtgcgatgacttgcaaatgacagaaacattcagaacatctggagagttcttttccctctagaaagggtaggctcttgaccagctatttcagaggatcattaaagcaaaagtaggcataccttaccatctgaatttatcagacattttttctaaccggaatttactgtgtcctgcttgtaggagaaatagacaatcacaagaagaatctttcttgtcctggagtcagtatatttatttccaaatgtccccctacttctgtaatgaaggagctaacggagcgacaacctggtgtggtaggaagggcagtgggtggacgcaggctacctgtccacgcctggctctgtgatcattcagcttcaggaccctgagccacctcctggcatctgtcattttcagggcctgtctgtagaactgaaggggttacatgagattcactccttagatctctacagctctaagatcctgtaattctaagatcactgatgccatgcggggtcatacaaagaggatggttttctttgttgaaataacctttacatttagggagggcttccaacattaaaaaaaaaaagatgaaacaggttctctgattaatcaaaactttatggtattgtttttagcattaatagacttgctaaactgataaaatttatttatttatttatttatttttgagacagagtctctgtcaccgaggctggagtgcagtggtgccatctcggctcactgcaacctctgcctcccgggttcaagggattctcctgcctcggcctcctgagtagctgggattacaggtgtgcgccatcatgcctggctaatatttgtatttttagtagagagagggtttcaccatgttgatcaggctggtctcaaactcctgacctcatgatccgcccgccttggcctcccaaagtgctaggattacaggcataagccacagtgcccagctgataaaattttaaagatcttatacatatattattatcacattattaggtagttgattaacatattctatatctttttcaagataactttgcttttaatcctcacaccccactaagttggataatttgcaaatatttctggaggatttttatgttctgattcattcaaaacaatctggaaaaaaaagaacctgttttaaatagaaattatttttaaaaaaaagtctcttcaaagtatagcctttaatttatcagttgagttcatggtggactgtcttatatgaaagaaagctaaggacttgggtcacctcaagggcactcttaggaaacagcgtgctgtagagtgaggttgcagagtgaaagtaagagaacatctgtaaatacaaagaagtcaaagacttccaggttttttcttccaagaggcaaatgtgctttcaagagatattcctgaggtagaccattccagagagtccccacacctcccaagaagcctctcttcctcataagttgtacaagcttagggtgaggaaacggaatttgctgaccagaaacttctcctgttaagaaagaaaagtatcgccttaatgtcagggtgatggtgagtaattttttgtcttcagtaacctggcagtgaataagtatttgctttgttgccttaggaaagctggcatctagccctcctctgctggaaagggagccttcctaataaactattactttttactttttttttaagacagggtcttgctctgtcacccaggctggagtgtagtagtgcaaacacagttcactgcagcctcaacctcctggcctcaagcgatcctcccagccacactagctaatttttatcatgattattttttgtagagatagggccttgccatgttgccgcaagctggtctcgaactcctgagttcaagcaatcctcctgccttggcctctcagtgttgggattacagacgtgagccactgggccaacctctttttacttctttcaaacaacgggccagatgcggtggctcacgcctataatcccaggactttgggaggccaaggcgggtggatcacgaggtcaagagatcaagaccatcccggccaacatagtgaaaccctgcctctactaaaaatacaaaaattatccgggcgtagtggcatgcgcctgtaatcccagctacttgggaggctgaggcaggagaatcacttgaatccaggaggcagaagttgcaatgagccaagatcgcgccactgcactccagtctggcgacagagcgagactctctctcaaaaaaaaaaaaaaaaaaaaaaaaaaaatcaaataaacctatcggagaagaccatttgcaaagttcagacattgtaaactgcgactaaaggatttctgttcactccattctctgtagctcctgatctcctctgatgatcagttcacgggctgggaggattagaaagcctaggagacagagggtcccatgctttagaacatcagggtagataaagacaaatgatgcatttggctctgccgtagtcgtgacacagaaagatgtatggggaaccaggcatttccgtgagaaaagttaagagtgtatataatccctcaaacacagccacactgttgaagatttccttacaagcaccagaaggtgtttacctgctttgagaaagataggaatcctcctgtggctaagtgttggcaccagaggattttatagtagcattagtgtggcaaaatgttatctgcaatttccccgggagtcttaagaatgtttactatattaattggaatggttctttcatgaatcttgaaagagtatggttttcaacaacaggcagaagagaattgtactaaagcccacagcaaaagggatgtcatctgttcattagtcatgactcaggacaaagaatgtcacatgataggcatttcctaataagttgcattggaataaaatgatctttggtcagtttgttcctgaaaggtattttaataggtttaaatgacttttgttgaccttcttaccactatatattatacaatactgttggaattcaattatgctatcaaaaatatttgttagaagggagggaggagactggttttggtttgggggcaggggaaggaagcttaaacacatttttattctaaaaatgatacagggggatatagattactaaagcaattgccaaattttaaatatattttttatctcaaaaatagtttataactacagagaagaaaataatgaaaaatagtacctttactgtatttgaaatatcaaatagacattcataatttatgtacacctatgttcccagaaaattctcatacataataaactcctaaatcatacctcattctttcccaacatgcaaactattcagaatcctatggagggacaaatatacctttattttaaaagttaattctgagcactgaaaataaaaataaatggttttccagtgttgcagggaccattctaacaaaacgtaaccagtgacaaacgacggcttcctcaacagccagaacactgtgctcctctccatacggcttactactctctaataacctgtttaatgccaccaatgtgtttaatactgctctcctctaatgtgtttgccctgccagactgtgagcccgagaacagaaacttcctgattggttcaccattattctccctgcacctagaacagtgatgagcttctggcagatgctggctggactgatggatggactgttaggtggatgaggcccactgtccagtggggccagtggtttaccttcgaatgacacatctacctaagaacctgctaagcacatgggactgactgcatgctgcccacagtgctagccctgagcattatgaatgtgtggccaccagtgttccagatatgattgaagtcccaatctatagcctgaagtgaacacccttgatacttcccaactctttccccagaactgtcacaatgccagtgaggataaacttgtacctcttggaacctgagagacagcatgaagtaaatggcaccaagtgatacatactcttattttgattccgtttggttttgagatggggtctcactatgttgcccaggctggattcaaattcctgggctcaagcaatcctcccacttcagtctcccaagtagctgggactataaacatgtgccaccacccctggccacagtctttgttttttggggatgcggggaggcgacagggtctcactctgttatccaggctaaagtgcaatggtgtgatcatggcttactgcagcgtcgacattttgggctcaaggcatcctcccaccccaggctcccaagtagctaggactacaggtgcatgctaccacattcggctacattttttttttttttttttttttttggagagacaaggtcttactatgctgcccaggctgtagccttaggtaaagtgccttcaaaggctcgttttagctttgtcattttatgaaaagttgatattctactccctaagatatccatctttgtcttcagataaaaattattttcccaagtcatcaagttgtgccatgttacccagcctgtggcttgtagtgtccctgacacacccttgcataacgcagggagcccctgtgccctgtgtgagaagcacagcgtgaagatgttgtccataatattgtacatggaaaaggtaacgttagcccccattaatgtggattctctcatctaatttcctcttttcacccagcaaagtgcccagtgactgagaatgagacagaagatgagggcgtttgaggatgagaaggaagaggaaagtcatcagagccacctggaagtagaggtctggtcaggttggcctgcttaaccaagatggcagccaggggagtaggaaggatgaagacattgcacacatttggaggaagaaaccaaagctggcatgagaggagtcctttccagggctgttcaaggcaacgggatgcaggtggatatgactgtagatgggtgtaaagacttaccattcactcctccaaactttcgttgtatacttattatgggctaggccctgggcctagccccagaaattcaaagacagacaattaatatctacagtctagtaaggataaagacccataaaaatcgttgcaataagctttcagatggaagcacagttgttagcaaagtagtaacatctagctcagaatgggggggtacagcggaggcttcctggaagaggtgctgcctgaactctcttaaagacaaatggaagtaggttacatagtgtttagcggggcctggtgctccttgcctttggatttgtttccttctgatttctagcccccattagggattacctcatgctttcaatatggaaaacatcaacaaatgggtctcaatgaagaaaaaccaaaagtacacacaagcatctcaatcactgtctctctgtttctctcctctctttctgtctctctctctcctctcccgccaccccattaacagtatataggtacaccatttattctgattagtggccactaaatagagggggtggtagataatagcattcaaggacggaggaaggttttagcaggttgttggctccagtgtctcgattaggatatggtctgaaatatattcacattctcataaagtatgagaataaaagaattgctagaaagaagcttggaataataataactcttcactacttctcttaataacagctggtgggaggctttctcctatttacaaatccattgtcattcttccacttactagccaggctgtttcgcttgaatcatcgtgcgatatgtacattcatcatggaaggtatatactagcagttgcatggtgttctggttgttttgttctgggtagttttcctttagttaattatcaagtgcttactatgtaataatcaatgagtagctaattggaagcaagagagaatgaaatgggtattattcagatagtgtttttaatgaaaagcatagacgtagtactgtggggaaatatcactaaatagcaagagatttcatctgtgtgtgtgtgtgtgtgtgtgtgtgtgtgtgtgtgtgtgtgtttacaaaaggattcatttaagccactcataaactaaatccaggtatgtgaatcttttctttttttttagactcctcccaatgggtaaacattggaagacaccaggagggaagccaagcctctagagattgctcaggaacccaaaccaccccaaatggagccggaaggtctgtcaattcccagagagggaggaaatggtaagcaaatggcagcagttgcttagaaaattagggaatgaataacaatgctttctggtaaattaaccatattacattgtgcaggggaaagcgataggaaaaccctgttaaaaattgaataataatttgcccacatcatttatgcaaaatgcataattttcctacttcagtggactttagtttgatttaaaagatgagcagctctaggactattcactaaagcataatttgtaagataattgggaaggggaagagaaatcagactgtaatcagcacaatctttcgtaagtcacttcaccttcctcctctcacctgcaaattttggaaaatatttgtttaccctttcctgaagttctctaaatggaagtgcaaagcattaatcattgtcattgctaccactaaaccatgacctcaccatgagaggggggaaagccatgtttcattctattcagtatttttctgctctaattcaaataagtacttgttttgaatagtggggaaaaaaatggaaatgtagcaaagctatagttaaaacaacaagccgagaacaaaagcaacatgcatgcaggcaaaggagaccttggaagatacacagataaaacaaaaagctgtgcttggctgggattctgtttcagaatcaaatgcaaaatggagaatattgttccaactgtaaaggttttgcaatctacaatcagtcagaatgaaaagatatcatgtaatccaccttaacagtcagaagctgcactattgctgtgaattatgatatttgttcatgactaatgtagattttcagacccagaatggttgaaggtgggcaggaatttgtaggtataccagatacccttcacttcaacagggcacacccatgtcagctgatgtttatatctcttcctctcctccttttccctcctcctcaccccttgctccccaatctcattagaatcatgaaatttttacttatatattcattaattctcttcatccccatctctccacaaaagatcattatctacttattaaattcagcccttacacagtgtctcatgcctgtaatctcagctattcggaaggatgaggcgggaggattgcttgaggtcaggagttcgagaacagcctgggcaacatagccagatgtcatctctaaaaaaattaaaattaaaaatttaatagggcacggtggcacacacctatagttccagctactcaggaggctgaggtgagaggggatcacttgaaccctggaggtcaaggctacattgagctgtgattgtgccactgcactccagcctgggcaataaaacaagaccctgtctctgaaaaaaaaaaattttttttttttaaataaattcagcccttagagttctacctttcagggcaaacctgtttcctttgttggactaattcctgtctcttctacaaacttgctggtcccaaaacgctgaactttgaaccccacaaatctcaacacttcttatcggttgggtgcccattctggttaagcaaaaggaccttccctaatcctaatactcgtccccactctttccatctctatccccaaccgctgctactggctgaagatttattagatactagttttgtacctatgcgtcctgccacttgctataaatcgcctttatgcaaatcgaaaaagctaccctgcctcaagacactttgctgccatctgccaggaaattgttgtaataaatatgcaaaaggataatgactagaatgtgaatggtgccccttagaattgtgcagtacgcaactggcacaactatatgtgacaaccctgttgtttgaaatcacctgaactctcctggaaccctgtgtaaaaatcacaaccaccataggtcagttttgccttttcatgacagtttgccatttcaaaatctaaatcttccaccatgatcagaaattgctgaggggcagtttctaggagagacagagtccccacgcagcagtaactataagattatagggctcttccagcattcagcccaagctttgacctgctacctgggcagatacaacccaaaccatacttggttgattttcgggaagcatctaagttagaaagctggtaaggctgaatgttggggtgcagggggaggtagacctagcttacattcaggtcagccattacccatctctggctttggcggcttcatttcttgttgattgccccatctgttctcctccctccttcccattcagcacaacctgcacgtactggtgatctctcactacataacaaaccactccaaaacttagtggcagaaatagaaacagt

SEQ ID NO: 125 - DNA, 2452 bp, Homo sapiens
cgcgcttctcccagcgcaccgaggaccgcccgggcgcacacaaagccgccgcccgcgccgcaccgcccggcggccgccgcccgcgccagggagggattcggccgccgggccggggacaccccggcgccgccccctcggtgctctcggaaggcccaccggctcccgggcccgccggggaccccccggagccgcctcggccgcgccggaggagggcggggagaggaccatgtgagtgggctccggagcctcagcgccgcgcagtttttttgaagaagcaggatgctgatctaaacgtggaaaaagaccagtcctgcctctgttgtagaagacatgtggtgtatataaagtttgtgatcgttggcggacattttggaatttagataatgggctgtgtgcaatgtaaggataaagaagcaacaaaactgacggaggagagggacggcagcctgaaccagagctctgggtaccgctatggcacagaccccacccctcagcactaccccagcttcggtgtgacctccatccccaactacaacaacttccacgcagccgggggccaaggactcaccgtctttggaggtgtgaactcttcgtctcatacggggaccttgcgtacgagaggaggaacaggagtgacactctttgtggccctttatgactatgaagcacggacagaagatgacctgagttttcacaaaggagaaaaatttcaaatattgaacagctcggaaggagattggtgggaagcccgctccttgacaactggagagacaggttacattcccagcaattatgtggctccagttgactctatccaggcagaagagtggtactttggaaaacttggccgaaaagatgctgagcgacagctattgtcctttggaaacccaagaggtacctttcttatccgcgagagtgaaaccaccaaaggtgcctattcactttctatccgtgattgggatgatatgaaaggagaccatgtcaaacattataaaattcgcaaacttgacaatggtggatactacattaccacccgggcccagtttgaaacacttcagcagcttgtacaacattactcagagagagctgcaggtctctgctgccgcctagtagttccctgtcacaaagggatgccaaggcttaccgatctgtctgtcaaaaccaaagatgtctgggaaatccctcgagaatccctgcagttgatcaagagactgggaaatgggcagtttggggaagtatggatgggtacctggaatggaaacacaaaagtagccataaagactcttaaaccaggcacaatgtcccccgaatcattccttgaggaagcgcagatcatgaagaagctgaagcacgacaagctggtccagctctatgcagtggtgtctgaggagcccatctacatcgtcaccgagtatatgaacaaaggaagtttactggatttcttaaaagatggagaaggaagagctctgaaattaccaaatcttgtggacatggcagcacaggtggctgcaggaatggcttacatcgagcgcatgaattatatccatagagatctgcgatcagcaaacattctagtggggaatggactcatatgcaagattgctgacttcggattggcccgattgatagaagacaatgagtacacagcaagacaaggtgcaaagttccccatcaagtggacggcccccgaggcagccctgtacgggaggttcacaatcaagtctgacgtgtggtcttttggaatcttactcacagagctggtcaccaaaggaagagtgccatacccaggcatgaacaaccgggaggtgctggagcaggtggagcgaggctacaggatgccctgcccgcaggactgccccatctctctgcatgagctcatgatccactgctggaaaaaggaccctgaagaacgccccacttttgagtacttgcagagcttcctggaagactactttaccgcgacagagccccagtaccaacctggtgaaaacctgtaaggcccgggtctgcggagagaggccttgtcccagaggctgccccacccctccccattagctttcaattccgtagccagctgctccccagcagcggaaccgcccaggatcagattgcatgtgactctgaagctgacgaacttccatggccctcattaatgacacttgtccccaaatccgaacctcctctgtgaagcattcgagacagaaccttgttatttctcagactttggaaaatgcattgtatcgatgttatgtaaaaggccaaacctctgttcagtgtaaatagttactccagtgccaacaatcctagtgctttccttttttaaaaatgcaaatcctatgtgattttaactctgtcttcacctgattcaactaaaaaaaaaaaagtattattttccaaaagtggcctctttgtctaaaacaataaaattttttttcatgttttaacaaaaacc

SEQ ID NO: 126 - DNA, 1614 bp, Homo sapiens
atgggctgtgtgcaatgtaaggataaagaagcaacaaaactgacggaggagagggacggcagcctgaaccagagctctgggtaccgctatggcacagaccccacccctcagcactaccccagcttcggtgtgacctccatccccaactacaacaacttccacgcagccgggggccaaggactcaccgtctttggaggtgtgaactcttcgtctcatacggggaccttgcgtacgagaggaggaacaggagtgacactctttgtggccctttatgactatgaagcacggacagaagatgacctgagttttcacaaaggagaaaaatttcaaatattgaacagctcggaaggagattggtgggaagcccgctccttgacaactggagagacaggttacattcccagcaattatgtggctccagttgactctatccaggcagaagagtggtactttggaaaacttggccgaaaagatgctgagcgacagctattgtcctttggaaacccaagaggtacctttcttatccgcgagagtgaaaccaccaaaggtgcctattcactttctatccgtgattgggatgatatgaaaggagaccatgtcaaacattataaaattcgcaaacttgacaatggtggatactacattaccacccgggcccagtttgaaacacttcagcagcttgtacaacattactcagagagagctgcaggtctctgctgccgcctagtagttccctgtcacaaagggatgccaaggcttaccgatctgtctgtcaaaaccaaagatgtctgggaaatccctcgagaatccctgcagttgatcaagagactgggaaatgggcagtttggggaagtatggatgggtacctggaatggaaacacaaaagtagccataaagactcttaaaccaggcacaatgtcccccgaatcattccttgaggaagcgcagatcatgaagaagctgaagcacgacaagctggtccagctctatgcagtggtgtctgaggagcccatctacatcgtcaccgagtatatgaacaaaggaagtttactggatttcttaaaagatggagaaggaagagctctgaaattaccaaatcttgtggacatggcagcacaggtggctgcaggaatggcttacatcgagcgcatgaattatatccatagagatctgcgatcagcaaacattctagtggggaatggactcatatgcaagattgctgacttcggattggcccgattgatagaagacaatgagtacacagcaagacaaggtgcaaagttccccatcaagtggacggcccccgaggcagccctgtacgggaggttcacaatcaagtctgacgtgtggtcttttggaatcttactcacagagctggtcaccaaaggaagagtgccatacccaggcatgaacaaccgggaggtgctggagcaggtggagcgaggctacaggatgccctgcccgcaggactgccccatctctctgcatgagctcatgatccactgctggaaaaaggaccctgaagaacgccccacttttgagtacttgcagagcttcctggaagactactttaccgcgacagagccccagtaccaacctggtgaaaacctgtaa

SEQ ID NO: 127 - DNA, 36048 bp, Mus musculus
  misc_feature (17933)..(18810): "n" at positions 17933 to 18810  can be any base
  misc_feature (26477)..(28993): "n" at positions 26477 to 28993  can be any base
  misc_feature (31779)..(32471): "n" at positions 31779 to 32471  can be any base
cctcccaggccttgggaatacaggaatgagccactgatccagcttcagttcccaactattaaatccaccacaaggggaagggtcagccaaggaactgaaagtctattagttttttggcaaggtataatgacatacagccagaggcacaggcacacagacatagacaatgcctccagattacaatctattttcaaaatcctaggaaaaagatatataaatacgctaaaatgtttcagaggccagtaagcttgcacacagacaggttaggaaaacaatgtctaatgcttggttatgccgagcaatggaaacctcagagatcacaagatctctggcctcctttagcattttgcacatactgcctttccttttcttcttctagaattcccccttttaaatctgtcatgctgggcggttgtggagatgctcgcctttaatcccagtagaggcagaggaaggtggatttgactcaaaggtcagcccagactgatccaagctgctctttccccaccctaaccagaataggaagtctgcacacatctctctactcacagggccagcttacaaggcctttcaaacccagcaggccactcacccaagcatggaaatatataatctcaaaagttccaaaggatgccaactgtgaggccacaccacgttccttcacagaggacacaggccacttgttatgacccccggaaagctttaaccactctagagttaaagtccacaccagggctgttttaagagcatctagcttcctcttgccacatacaacccaactctcaaacaatctaccaagcaattcaggagaacagaacagaggctctggccaagccaggtggcaaaggcctgccccaactactcaggaacctgtggcaggagcctcaggttcaaggcctactatctctagactaaggtgagttcaaggcctaccaggacaacgtggtggttaagagacagtcgtgaacataaaaacaaaggacccaggggtggctcagtcccacacatagtagctcaaggctctggaatggaatctgcaataccaaaaccaactaaccacaaagtgttgcggtggtatcacctaaagctacgaactctcaggaacacacaggtgtattcacagtatggaacctggaagggcagccacagaagggtgtggcactaactgaagtctctcatgtgaccacaccactgacagcacagggatgcccgaggacagccaacctccctcccagtgcctgtctccccacagcctcctgtcccaggtttctttccccccttaccttgacattcggcatgtacttagagaagcgctcatattccttgctgatctgaaaagccagctccctagtgtgacacatcaccagcacagacacctttgagggagcaaatggagacagacacagtaaagtcagcccctcgtcacaagagcatccagcaacttgtcagtgatgttggtgaacattccccttgaactgcagaggacaccagctgagagcacatggagccagaaatggcctcctggtgattcaatctccacaccctctccagcactgcccccaacatacctgcccagtaacgggctccagctgctgcagtgtggccaggacaaacactgctgtttttcccatgcctgacttggcctggcacaggacatccatccccagaatggcctgcgggatgcactcatgctggactagaaggagaaaggagagacatttttgcaccatgccaaacccctttctccccagccgactcatcatatgtcaccttgtcacctttcagaccccatcctttccctgaccctcatcactcttacactcaagtcaaaccctcctaccccagctccccagttccgctaagaaagaaccctcgagaagctaccaacaggccaccttccacgttcctggctaaacttacttttcttacaccgtaacaatctatgaattcgactgccacaggccatttctcctacataggttgctgtgcttttgggtcatgtaaccctgcaaccttgaacaaaatgaaggacttggtacctgacccagaagccacagaagccagcatcctgatcgttaaggtttccggaaacgacacttggcctggcccaaaagaagggaactaaaggtccaaccaggccctctctgggagttcgaacagtcagaatgacaaaaaccaagcaaaaaagccaggcacagaacaaatggcagccctcggtttaatggagaacaaaagcctcttctacagctgccgtcttgggtacattctcagagcttggcctatcccaaataaattcaaatcctatgaccctagacttgaacctcccttttcttgcaccagaggtgctaaataaggtctctacacacaacaataaaatgtaccctctgatggatgctcaaagccacagtcaacgatggcccggagcagctctggcttgagtagaaaatctcggaagccggagctatggatggagacgtaggagcccttgacgtctttcttggcgggagcctcggtcccatctgccccagcggctgtctccacctcgtcgtcttcgtagtccaagagctcattgtccacatcgttctctgccataattgggccggcagggggagaagggaggtctctgagttaggtgtcccagagcaggtgaggaagcaagggccaaagagaggggttgaagaacagcaaggggaaagacaccagtttccgacagaagagctgggagaggggacaacaaaaaaaccggaaaaactcatcagtcacgaatggactcgtcacttctcgtcgatccctacacccgtcctattcttccctaaactgtgaaacctttgtcccgaaagaagagttaacaaagagtctcatgacataagaaacgggaacaccagacgggagagacagagtgggctccaccgctaaccagactttgtaacacacacttcgacaggcaggagccaactgggagaccgcagtaaaataagcgtgactaacgactcacacgagggttgagacacaaaggacaagggaagacagagactgcgctttctcctgccacctcacggtggtgatccccaacgtcagccatcagtcaagggtgatagataagggtcagcactgcgcagagcgctcacttcccaaatgcaaacatcatgtggctgccgctattctcttgctcagaaacccccgagtggccgtcccagcggcgcacacctggaccggggaacagaagcaggaaggagggtggtgcggggcggagagtgggaagtgtatgaatggctccatttcaagaaaaaaaaattttttttttgttttgaaaaagatgggtgtgtgcagttcaatggcagtgcttgcttagtaacgcgagaggccgcaaggttcggctcagcgctgccaaagttaatttaaaaagtcgcactaaggaattaaggtcacagctgagaacgatgcaggattaagagtgtgagctgggtggccttagaaaggaacgccttgcagtgctctcggaaaagcttccccagaagtgcgcgacaccatcggccacgcacagaggcagccattcacagagagctccaaataaggcagcgaaagcggggtcaaagggctggacgggccccggagcgagatcttcccatccctgggcgagcaagaaaaggcccggaggggagatgcgaggggccccgccctcctcctggcgccgcctccggccgccgcggccccgggtgggcagaggacccactggaacacccaggaagcgcggagacacaatggcggccgaggccaccattttggatcgttccccccttgtctcccagctccccgccaagatctgctctcagaaaggggtgaagacaacagaactggacgcccgcctgcgcgccggcggccacggcgccgacccggcaccgggtatcagggacccgcgcggcggggcgagccgcgggagaagcagatggcggtggatggtgcacagggccaaagcttacctaagcactgcgagcgtgtatggcggcagcaacggggacggaggcgggaagctgccttcacttccggttccaggctcgccccggcctcccgccttcccggccgccagggcgcacgcgcaaggagccggaagcaggctttcgccgcgcgcgctccgcggctggctttgcagaacgcccacttgaaatgaagcttctgacgacgcctcctccggtcgccagtagcaagagcgcgacaggaaactcacgtcttcccccgcagagctctccattttgttcttctacgcttatgcaacaccctccgacggtcggctctactttagttttgtttgccacgccaggcttctccctgggcacctctctgtgggcatggaggactccgcgatcgaatgagaagcgtttctcacggggtccttagcctcgtagtcaaggtgacccgagagcggctaactcaggcctctgctggaggggagggggacacgtgaccacgcccattacagtcgtgcagagaataggcaggatttacccaaaattatatcgaaagatggaggcttacattctgtctaggtgctaaataaatggtggggtttgaggttatgcacctttccataattcttgctaactagagcagcagaataatctcagttccattattcagcctggacatccccctccccccatgtggtattccctttgagatgttacatatagcagaagtgttgtcctgttgccttgctacataaacacaagctcgggctttccctattaaggacacttaatattaatacaaagtaacactaagtatcagtgttgccaaccagctggctgtgtcctgctcatcgcataagctctctgggctggggcttggtagcttttgatccctccgcatttggcagccctaagcagcaggccggcgggttttgtataaatcagagaggagtgggaattcctcggctctggtaacttattacgaactgtagctccagaaagtgcggtacctgggcctttagctttgaagcgtttccaggaactctcctagtgacctagttggcgggctcttagccactgtcttcctgttactggacctaatgtggtgacattgtggagggtagcatagtaaggtttgtcccagctgacccaagtgagccaaactttctgctttacagccagcaaagggtgtttgcaccaaacacagcaaacagcaaactcgtgcaaatgaagacttgtgtttgcaccaatcataatattgtccctttggcatcagtgataacacatcttcctgctactggactatgggaagttccaccctccactgggggaggagagagaggacagaaacaatcctggctgagccattagctgtgtggtttcctcaaagactttatagaagattcaaaatggccatgctgacagtccttgttaaggtagccagggcaggaagggattgtcttaacagctggctgtgattttaacaatgcttaaaacctgggccactggggccacagcaaggtgagtgcccctcatctgtcttgccatttttttcttcctttctctgttactgagtttgagcagttatatagactggcctcaagctctcaattctcctgctggaggatttgaatgcagacccatgccccgctccactcttcctgtaaacatatgaaaatagagaaataaaacaaggtggccaaggcaatacagctagcagggaaacaccagggtgtaagcaccccaatttcctatcacatgtgtccctcctcttcaaaaatctccttgcttttgtatagctatttcccccgaaacatttcctcctgatgagagtggagaaggctcaggaaattcagaaaaaaagttgcaagacacggaacacttctcccagattgtgtcaccaataaacagctcctggtggcaggactctttggtctgcatacaagtcacgctggtgggcgactttctgatgggaagctactccagtctcactcctataagtaacctatcacccaccatactgccaataactccagcgagctctttggtctgccaagtgagacttgggtggtgagatatctttggtgtttcatgactgccttatttggcatagattttttttttttcctgagacagggcttctctgtgtagccctggctgtcctggaattcactctgtagaccaggctggccttgaactcagaaatccacctgcctctgcctcccaagtgctgggattaaaggcatgcgccaccacacctggcttatagatttttttttaatgtctctctacagaaaagtcatataagactatgaattacctcattgattcaagttcagggtgaaatgagcagtgaagagaactgataaaggaatgggggtcagagaccagtagtgtcccaccccctcaccccctaccaccaccaccccaacttcctccttccccaccccagcatctttttattccaaagtattcctcaactgccaagtgtgtgccaagtgctatctaggctctggggatacaacgacctttatcatcagatacataatgagagccaatacccaaacataatgtcaagccaggcgtggtggtgcacgtctttaattccagtactcaagaggcagaggcatgtggatctcttgtgagttcaaagctagcctggcctagcaaattccagggtagtcagagatacttagtaagatagtaagtctctgtctctctgtctctctgtctctctgtctctctgtctctctctctctctctctctctctctcgtgtgtgtgtgtgtgtgtgtctgtctgtctgtctgtctgtctgcctgcctgcctgtctgtctgtctctgtctctggtgctgatgagcagtgtaaaaccaggaaagggacagagtgctgctctgccaacatttcccttacaactatctatgcaactctctgttcaagaggggacacagtactgtgtccttttgtttctccataaagcttccaggacagccctttgcagtgttttggaaactatataaatgcataactctgaggacagcgaaccaaagtgagcaacggcaaggcaaaaaggaggctgctttcaccgacaattgactcatccaccagtattttattgacactccgctgttacacaaggaggcaaggtgctgagggcacacaaaggaatgcatgcatgtgaatgtcatagatatcttcagctcccggaagcagcaagatttgggaaaacagagaaagaggggggccaaccatgagaaagaccagctcaggagaaacagagaggtgctaagagatttgatatatatttgggactcggacagaggggctaaataacattatcatttaactgttcgggggcatgatgtgccaagggagagccagagaaacaaattctttagagggttactagtgtcacagtggctgaacaaagctggaacacgaggaataaaaaagtcaggagagggggttagaattctggcaggcacgcagagtgcggtcatgatacaggcactccgtcatctggaactatgctgaattctcacagataattcacagcagccaccttacaaagtgagcgttgttgctgtcattccagtcacaaagatgaggacactgaggcttccaggttaaatagttgtcccagttgtgtaaccagcaaggaccaggggtgggagaggaacagaggttcccctgctctgaagtcagggtgctttcataactgtcaccaggacatatatttcacagaggggtccggtggggatgacgtgggcattcattagtaaacttccagtgggtgtcatggaacagagagattcgggtttgtcgggtttgaacaggctacttgtaagtctcaggggggaatattggatcctgtcacatagaagcctcccctccagcaacaggttattatgtgaagcgatttggtgggtgggggggatgatattatggattgaacccaaggctctgcgcatgcgacacaagtggttttgagttgggatatttctctgtggacggagctgacagaaggagtcactctagggatgtgtccctgagcgatggttctagacagtaacccgatagttggggtggacctggggcctgacttcacagaccatgccgagaagctgagccaggacgcgctcccgattcctctgctgggaactctgcatgccctgaacctgccgtcttgtggcctgctccacttcagcagacaggttcccctgagagcccatggcctgggggatgggggcggaggagagaaagaaaaaagcagacacagagaaaggagggtcccagcatgtaggaggaagggttcagaggaaggcctgggaagccttttcgaaactattcccaccccacaaaaacatgtagataccaagcaggtgggcacaatccttacttctgagactgaccataaaactgtccccaccatacagactgtgaaggccgccccacaagtctcatgtaccctttaaaaccctcagaccttacagatcccgtcaaagctttaccaatgtgtggtccttgtcagagcctcttcagctctcagacaccctaatttcttagtcacctgtatacacctggcaagaggcacccaccgatttgcacctgggtggggccatccctgtccccctcaactcaccgcctgctgcttgctctgaaactcctgctcccgctccctgcggtattgctccacctccatttgagcctcctccttcgcctgcttcagtcgccgggccttccctagaggcagaaggacagtgagtgtacacacacacacacaaccaggtgcgttaatgggatcagtgccctctagaaagttatccagtttcctgtcaaccaaccaaatgctagactgtaaaacccacccgtttcttctaccctaatagcctcagtcccccatctgccctcattgtccttgggcttttttttcctaaggactcaaatgcccgctatcctctattcctaaattctccttccatattcctaagagaggaaaggggggctcactcttcctggcatcggccaccttctccgctgcccgcttctcagcctggaggagctgctggataccctgggtctgactggccatttttatcactagagaggatgctgttccgaaggcgaccgaggtaccagacggctcccaccctccagcgcctactcctccgggcccttgatgcggtcctccactcccactgggtcttagcgctcccgttttcactcagtctcctgcaccgggagggtgtctgtcatcctcacactgatgactggtcctcctctcgaacctcactgaggtagtacccgaaacggccgcccgagggcagcagagaccagccctgtgctgactactgcagcaggtgcagggcctctccgtgtcaccagggtccacagagatgggtctgggggaagcggagggcagagtgtttgggtgtgagatcttgattggtggtctcgaaggagacacaaaggcgatgagaatggtgtgggaaggtaaggatgcgcttggacacagtacgctgggtttcacttacactcccaactgtgtctccacgcctccctccgcccttcccccctcttttcagcctccatcttctcttcagactttccccccaaatccgaacgtctgcacacatctccctgctctgtcctacgtttgccttgttagtgtctaaccatgtgtttttcttttttgatctacccatatatttggcctcattgtggttgtgtggtgtgtgtgtgattatgtgtgtgtgtgtgagattgtgtgtgtgtgtttcgagacagggattctctctgtagtcctggctgtcgctgcagctcgccctatagaccaggcctgcctctgcctctgcctcccttcgaaagctcgcctctcatcttccgcttgcaggaggaccctatgtcgcaaattgtcttgtttcccctccggagacctaatcacaagtcacccagtccgagcgttcggtacgatttccgggatggaacacacagttcatttccgcccgaaacttgcgcgtgtgcttgcgccatttcctgcatcctggcgcgcctcctccctccccacctcccttctccgagcgtcttaagcccaggcctccggcctccgtctctgagggtccttggggggggcggggagcaggtctgatgagtaacccctccccccaggccccagaggaagaagcctctacgtctgtctgtcgggtacattatattccatttctagatcgctctttgaatttgtgacttttctccagatttgtggctaatgaaaattgcccccatctggccttacttgatttttgttgttgttgttgtttccctccaaagttcagaattaacttttttcttgggctctggaaccttaaaacaactatgtatcattttctcaaaaattacatcaaaaattaactctgtgattcccccctccccaccagcccccaactccaaccccatccccaccctgcgccccaaacttgccatctgctaagggatgagagtttagaataggccttatctcttgctggagatgcaagggggaggaaatgggaggtaaagggagaaacggggaagagcggagctgggacctcaccgctgccatttcccacttcttcctcagccccagagttgttccatggcctccgcttcccgccggcaccgccgagagcgacgcttccggcggtacttgtctgcaggacggctggtgcgagcccaggctctcctccagcgacatcccgggcttgatgtggacgctgggcagcccccgcctctccacagggcctgcgcccgccacgatgcccctgccctgtgcctgctgctgcgtctcggcgctgaccctgcccaccaggaccgccatggcgacacggcgctgcacgctgctgcccgccagggccctgatggtgagtgggtccgtgggaactggtcttgagaagctggccaggtctgaactagaaagaatgcgtgggaaataaaggcctggtgtggtggcgcaggtcttttgactctgggcaagcagaggcaggagaatctctctaagtatgtagcctacacagtgagctccaagactacagagagaccctgtatcacacaacaaaatagttgggaaataagctagttctttggtccttgggaactgttgaagatccctggttgggatgtggccatacctctctagtaacagaaaagcttatcctaacatcgcccaatcaactaaggggtgtgtgctagcgtggtgtgattgtttgtttgaagatttatttattttatgtatatgagtacacactatagcggtacggatagttgtgagtcttcatctggttgttcggaattgaattttagggcaaccgcactctctcctgcccatatttattattataaataagtacactgtagctgacttcaggcgtgccagaagtggacgtcagatctcaagacagatggttgtgagccaccatgtggttgctgggatttgaactcaggaccttcagaagggcagtcagtgctcttacccactgagccatctcaccagcccgattgtttttgtttttgagtcagggtcttaccgagtctctcaggctggcctctgcatcccaagtgctgaggttgtaggcttgtgtctcccacacccagccgcatagctcgcaactctttctttacatttcctagctttcagctcagtgactactttgtttctttgatggttttttaccttgcagttgactgctcaggtcagatcccagctccactcaccccacccccacccccttagttttgcttctctccttgtaataatgccacaaacaccttacaaagtatccatgctttgtcacatgatcagctgggccggccagaggacttgaaacttttacttggtgttatgccggagatctgctgctgtgtgttagggatggactcatgtcccttgacacttaccaggcgccagaccagttttcttcattctcaccaaaattctgtaacaaaaatcctacttaagctggtgggtgcggtctggaggcggaggcagtccgggctctgcaaactcaaggccagtctgctctacatagtgagttccaagctagccggagccacggtagagagacgtcaacaaaacatctccagtcagcatcggtagtggctccacagtgcagacagcctctttctagttcatttgtgttacttactggcagatagccagcccagaaacagcctccccgcctagaaagacaggaagttcacaacacactcctgtaatcccagccctcgggaacacctcaaggccagtctgggcagggcctaagagtctcaaaaagtgaaggaaaaaaaagccatcaagcagatctcacctaacctacatggcggctatggtgtgactagttttatcccgctgaggttaacactcaggggtttcctaccagaaccctgcactctcctgcccctgctcccccagcctcttgacctagccccagatggcatacttctagatcagttttgccaaatcccacagttctggaaacagcgtaggtgttgcctttgcagtgacagcagaagcagttccctggagagcagcttccagactagaactggaggagaggcccgtctgttaagagacggacggccttctgcccacagatcaacaaccctgctcactcactcatctccagcttggcctctccttgatcaaaaccaaaaccaaacccaaaatcctctaacacaaataagatgggcctgcgtagttgattttctttaagcttaaagagaggaaggctgcagctgcctggctgagtttattatgggatacctgaagagaagaagtccccagactcctgaatacatcctgtggaatctttatataccaccagtagggctgttccaagcagagtagcaagccggaagcagcctcacttccagtttgaggttttaagagcaaaaaaaatgcaattgtggcgtatacagaaaggcagctctggacagctgcagcaagcaagctttgcttacagaagcagagaggtagcggttagatgatcaggcagttaaccttcagctcagagtcacactgtacaggaatttatggctggaccagagaccagtttactctaagagcttatagccgttcagttcacccaaggttgttatagcacttaaagtattcttaggtatgctttcaggagatgtgtacctagatagagttcagcagccggctacagtttaagaggcagctcctgggtggtagcagtgtggtgcctagggttgccgcttacggatcctgaggcctgcacccttacctcgggagcttgttcgcctccgaaacggaggttgtgataacacatgagccacggactggctgcagctttgctacgtaatgatcagttcgtgcggttcagttaacttggctgaggatctcctaatggtggaataggcaccgccaccgtcgtattgaattctgagaaacatgtgaaacatttaacacaccgtggcgaaagtgaggcctccctggggagtttcgggaacttgtctgcatgtcacagttgagaggttgcaatggtccaaagaggaaaccatccctccacacttctcccaacccctggtctttcagaccgtttcccggcacctgccagtcctgccacgaggtggcgctctaatcccaacttcatctcattcagcggctgcccgctgctttgaagatagttgaatgagattgatccattgagcagattgagcgattgaacctgcaggagtctcccctccactctcctgttaggtcagagggctgccctaggacactgaaatgactggggagcggggggtaccacacacagtagggggccagaagaggctcacattttaggctttgtgtgtgtgtgtgtgtgtgtgtgtgtgaatgtcatggaagatcagtttcagctgtcagagggacccatcagtaaagcatgcgtcaaacagtggccactctgcaaagagcaagcatgagtggacactggcaggcagtatagttctctccgtttttggggggagggaaaaacaagctatcattctgatgttagggtctggggtttaaggtttgctttggtcttctttagggtttggcttgctggtttgcttggttttttgttttttggggggcaggttgtttgttttgtttttgtttgtttgtttgtttgtttttacatagattctttctgtaggcttgtctcttctggaactcagtatgtagatcaggttatccacaaactcagagactgatccggtccctgagcctaagtccagggttgcaggtgtgagcccgcaccaagcctcatccccagccttcgtttttctctctttagtggagacaccaccatgtagccctggcagctcttgactgatattcctgaccaagacgcaggcctgcacctccaggcttgttttgtggttatgtgacactcactgtgtgctgatccgtcagcacggcatagacagcatccactgcctccctgatctgcgcagtggagccagagacggccttgtttcagaatgactgggcacagttgatgttccacctatccttccagcctcgcattctgcacacccacagacctgtcacctcggccgcagttgtcttcagtgaccctagcacaggtttcacaagccttaccccgtcaggaagtgggttgtgaaagagtttaccagagccagacatggtggcataggcctgcaatcccagcacccaggaggcagtgacgaggattacaagttcaaggccagccttggctacaaggccatcctgagctacaagaaaccctgccggggtttggggtgccagaaataaatagaaggcagacagtagagaggagctgtctgcacttggcatcaggaagtgttttcacaccatggtaccctggtcgtttaggtctcgagggagggacacttgtgtgggctcatgtcagatgctcagctggatattcctctactgtgggatacttgtcacagtgtaagttatttcttagagtccaaagttgtcatgagttaccaggggtcagaccctgatgggctgagcctgcttgttagagagaattctctgtagtgctgttgtgagatcgactgcagcctggctcattgagctttgttcttctaatcttaaaatttagttttgtttttctatctgtgtgtagaggtcagaggatacagttgttggtcctcaactctcattgtacttgagacagaattttttttaagatttatttattttatttatgtaagtacactgttgctgtctttagacacaccagaagagggcatcagatctcattacagatggttgtgagccaccatgtggttgctgggatttgaactcaggacctctggaagagcagtcagtgctcttacccgctgagccatctctccagaccatcttgtttgttttccaaccatgtcctccaggctagctggcccatgagtctctatggactcccaactccaccgcttatcttgcagtgggagtattgggattgcagatgtgggctgctgtggctgggattgcagatgtgtgctggtatgtgggatttcaggtgtgattgctggggatgcgaacctgagtcctcaaatttccgtggcaagcgctttaccaatattgtgttcttccagaccccaaattaactctttctggtcttgctcaaagacagtagcagtcttgcttgatcccagccctgggcaaccagccatcacagaacatcacccgcacacccctacacatgaggctcacagaagatggaggccatcatctggagttgcatcagggctgagtgcggcccttgcccacagtgctgatacgtcagagtcatgagaccacaggacatcaactttgttggaaagaggaggtggagttactgttgaaggggaccagaggtcagaggtcaggctgtgacaccagagcaggggctcctgggcggtgggaggcagcatcagtgtttacgtagtggctgctgttcctgaggcagcaccatctggaactgagagacctgaaatcagggagacattgatttaccataaggttgagtaagcaagggccaaagacacacagcagacttaaaacagaggttcctgagagctgagggagtccagacgcctaaaagagctgctaggagctgccccacggaggctggtgaaacccccgagttagacaaagcaacagctgctttgtttctcactggaataaagagatgagaaacatctgaacaccagggaggcagcacagactacgatcatgcagttctgagacttgcaaatatttgtaagttagaacaggaaagctgtgaacatggaagagctgtccctggacaggaccgtgtgtcaccttgtgtgtcatagccatgtggccttctcgggaggctctgagagtctcagacccaaccttaagacaatagaatacaagcaaaataatggtgagtgtcccctcgtccaaggccagcatcacactgggcctgtggggaaatggagggcattagggtgtgtctgtgtgtgtgtgtgtgtgtgttcatgtgcgcgccgcaccagccattgggatggaaaagaaccctctctctgtctagggagcctgaaatgttggggtaaaggtgggactacccagatagtttaagaggtctccttagggaaagccagaaagaatcccttgaaatgagcccctcggtgcctggagggggtaggaagacagagcttgaattggacagcgggcttcccagtgcagcactgtcgctctggcagaagacccaggttcagttcccagcacccaggggatctggcccctctcctgacctctgtaagcatcaggtacccacgtggtgtgtatacataaacgttaggaaaatgctcagacacataaaatctaaaaacacattttttttttaaaatgagtttcaaaaattctatcattagagctcagaaaggaagagaaattacctcagctgctcactaggatctggatgtgtttaaggatggctttcacctggtgctccccaaaagaagagagggctctccaagcagtgtgcaggagtaggctgctaggctttgactagaacaaccctacctccagacacagaacagaggccttacagcatggctgcagtctgagaagaaaggagctgacaggcctgcccgtccacttaactctgaaggcttttgtcctgagagagggttggtttcaggttgtttgtttatatggctgtttggttggtttttgagacagggtctctctgtgtagccatagctgtcctgaaactcactctgtagaccaggctggccttgaactcaaagatctgcctgcctctgcctcctgagtgctgggattaaaggcaggaggaaggatttttatggtaaatccagttcccaggttgtgtgaatgtgaagtgctcccagtcagactcggagccgtactcaccctggcacccagtggcatagcgcacagggacagcacaaccatgaagggcttggaagggccgagtttggagtgcagcctggtgaggtcccttccttgttagatttgtccccaccccctttctagaagatggagggcacagcagcaaggaggtggcactggatcctgaaggccttgcttgttctgagtgacactgggaatgaggaccgggtccctgacagactgaagggagcagggagtcagatccagggctcatatcccgagacagtggaaccctgggatgttgtttgtttttaccacccaggatctcctagacttggtgagcagggtgcgtgtgcgttaacatctgcttctaagttctccctgccgtggtcctacgctgcagactctagaagggaggggccctgagacccaggaggaaggaattgagggatgtgtatcaaaggcagggcacagagcaggcggtgcaggctgagcgggctgagcccaaggatgagtatggcagcccagctatgctgagacagcgtcttggggacatttttatggcagctttgggaaggttnnnnnnnnnnnnnnnnnnnnnnnnnnnnnnnnnnnnnnnnnnnnnnnnnnnnnnnnnnnnnnnnnnnnnnnnnnnnnnnnnnnnnnnnnnnnnnnnnnnnnnnnnnnnnnnnnnnnnnnnnnnnnnnnnnnnnnnnnnnnnnnnnnnnnnnnnnnnnnnnnnnnnnnnnnnnnnnnnnnnnnnnnnnnnnnnnnnnnnnnnnnnnnnnnnnnnnnnnnnnnnnnnnnnnnnnnnnnnnnnnnnnnnnnnnnnnnnnnnnnnnnnnnnnnnnnnnnnnnnnnnnnnnnnnnnnnnnnnnnnnnnnnnnnnnnnnnnnnnnnnnnnnnnnnnnnnnnnnnnnnnnnnnnnnnnnnnnnnnnnnnnnnnnnnnnnnnnnnnnnnnnnnnnnnnnnnnnnnnnnnnnnnnnnnnnnnnnnnnnnnnnnnnnnnnnnnnnnnnnnnnnnnnnnnnnnnnnnnnnnnnnnnnnnnnnnnnnnnnnnnnnnnnnnnnnnnnnnnnnnnnnnnnnnnnnnnnnnnnnnnnnnnnnnnnnnnnnnnnnnnnnnnnnnnnnnnnnnnnnnnnnnnnnnnnnnnnnnnnnnnnnnnnnnnnnnnnnnnnnnnnnnnnnnnnnnnnnnnnnnnnnnnnnnnnnnnnnnnnnnnnnnnnnnnnnnnnnnnnnnnnnnnnnnnnnnnnnnnnnnnnnnnnnnnnnnnnnnnnnnnnnnnnnnnnnnnnnnnnnnnnnnnnnnnnnnnnnnnnnnnnnnnnnnnnnnnnnnnnnnnnnnnnnnnnnnnnnnnnnnnnnnnnnnnnnnnnnnnnnnnnnnnnnnnnnnnnnnnnnnnnnnnnnnnnnnnnnnnnnnnnnnnnnnnnnnnnnnnnnnnnnnnnnnnnnnnnnnnnagaagaggaagatgggacttcccccgggaggaggtggctgattttgttttatgctaatatttatcatcatcttcttctccttcatcatcatcatctcttatttttgttgctgtcttctgagacaaggtctctacatagtctcggctgttctggaactcattatgcagtccagactatcctggaataaacagatcctctcacctctgcctctccaatgctgggattaaagatttgtgctcccacacatgacttgaaaacaaatgagcaaaatcctagttttgttaaaactcagtttcaaagtaaccaaaagcccgacaaacttggcagaaaacaatcttcatggccaagacaaaatttctgtcacttgaaggagcttttggtcaatgctccaggcagcatctcccagacgctagtgtgaggcagaggttggccttcagcgtgggtgcgcatgctgcactgcaccgggtttcaccgggtttcggtgccccaaccagctcaccctcacctccaagctgcagaccttgtggctgacgctctcacgtgtcagttttactctcgtcttagcttttccgttttggaaaagtccagtcatttcaccttaggagaatcttaatttacacatacagaccttcttcttaactaaaaatacccttttcctttccaccttcctcaccaagagcgcctctccacactccatgcctctgcgtctcctgtacactgtctcattttactctttacttcctgaccagagccttgtctgttcagctgcatccgggacaaaaggtctcctggcatcactgcagacatgatagctgactagggggcgcttgtctgtccagagtctttataactgcttggattttttaaaaaagctctttttatgcttaaaaaaaaaatgttgagatagagaattacagagtattccattcctgtagaagctgacaaggataacaattgaccttgggcggtaattgtctcagtttaagccccagactggagacatggcccacggtgttgcaacaatgttgtgtgttaaccttgtagttgcaagttttagattctagatgcagttgttcctgcccctcatcccctcacccccccccaaaaaaaaacaaaacagaaagaaatagcaagttgttgggtttccttggaggaccagggggagaggagaaaaagagagcgggatggagcagaaggggtggggtgaaggctgttcagtgggggctggagattctgttgggtccagtgatggcagactccgtctagagcagttgtgtttggggcaggtccatcagcgggaggagacatagaccagatagtgtttcggcctatgtcagctgccttgtccagggcacagatgtcagggtgtgatagttgttctctggatttcctacctgaagtctttgaatgtgtgtggatgagagggagtgccgttggagggaagagtcagaggggaaggtggggtgcagtcgccaggtggagggataggtgctggtctcggagaagctggtggttgagtgggacctggcgtggccatcaagtctgtcgcctaaggctgagttcaagggaggccggtatgggaggcacctgttcttgtcccgtgctgaggccataaaggggggatttttttttttaattaaaataacaccaaagagatccaagtgtaggacaggagtgaaatggtgtgttgtgctgtggccagcctagtctggccagatttcattacaaaggaaaataaggttttgttggctgtgtcttttgagaggttgaacatagagtttaaagaatgtgagtcagaggtcatgaaacccatcataccagagatgcgcgctcacccagaaggcctcggagggcagcaggcctctttccagtactgacttgactgaggtgcccagaaccagggcatcctctgagaacagagacctcctggtccatggggtgaaatccagttggtcaggccagactgacctcaaagagagacacacaaatagctggccagaaaagggggttcactgcccctgagagagtgaaatttgggctacccacgggtctctttattcagaaagtctggctgggaggagggaggtgagcagagtttcttatatggttgtctatggtgctgaggttccagcccccaaacctgtccctttttccgtgtggtccctcctccctctgagtggaagtgctgtgctgttaaaggtgaggagagacttacacttttgtcatcaaggaaagagtatttcttctacagaactttgcatattcgcttccctgtgtgaaagggtgctccggcaaacatgatggcacaaacctcgcgggaaggtgggcaggaagagaagatgttagtgaacattaaacgcattgatttaggggctggagaggcagctcaggggtcaagagaccacaatgctcctgcagaggacccaggttcagttcccagcacccaggttgggcagttcgcaacagcctgtacctgctccccgtgagagagtaccaggacagacgggtatgtagagacccttgtatttttctggctactagttatatttttctggtacttgttatattcaagtacactatagctgttttcagacaccccagaagagggcgtcagatctcattacagatggttgtattattttgtgagtaacctgttcatgtcttcatttatttcctttggaaattttttcatatttgtacatatatgaaaatactttttaaaaagtatttaatccttagggctggagagagggctcaacagttatgagcacttgactgctcttccagagctcctgagttcaatttccagcaaccacatggtggctcacaaccatctgtaatgggatctgatgccctcttctggtgtgtctgaagagagtgacagtgtgctcacatacataaagtaaataaatacatctttgggggggtactttaaaatttatttcgtaacttcactccagctttaggaaggtaggtgctggcagaggccaggcgaggaaatgagactcccaaagcggctctattacccacacatctctctgttcagaaaagtctggctgggacagggagatgggactggaactctctgtagatcagactgtcctgaaacttagagagatccgcctgcctctgcctctctgcctcttcctaccaattactggaattaaaggcctgtgccactatgtccgccctaataaaaccatttttaaagatatatttatttatgtatcatttattttatgcatacgagtacacagtagctgtacagatggttgtaagccatcatgtggttgctgggaattgaactcaggacctctgttcactctggcccaaagatttatttattgttatattcaagtacactatagctgttttcagacaccccagaagagggcgtcagatctcattacagatggttgtgagccaccaggtggttgctgggatttgaactcaagatctctggaagagcagtcagtgctcttaaccactgagccatctctccatgaagggttgtcatgcatgcatgcacagtaaagcccagcaggcttgcacatgttccgacttagaacacccaccctcggcagatatgtgtccatgtccacactcgtgcaagtttaaggctaaaggctttggagacacagtctgacagacagggtaaagagaggtctgtgtctcagctcacagtggaacactcattacagtcatcaaagagtgaaacaaacggcaggttcctgggggaaaataaaagataaaaagccatgaggagggagagctgttagttcaccccagcctgactccacagtgaaacctgtctcataaaaacaccaagatgaacagctagctgctgctgtcagcctgtgtgggatgtgtatgccccaaggattctgttagcttcagttggattgtggtgacccataacaaggtaggagagtcacgaggttgagacctagtctgcagttacaaaatgagctctaggacaccctgggctgtgagaccctctcacaacacacacacactcacacatacacacacacacacacacacataccatagccaataaaataaatcgggtatttcaaaagaaaacaaaaacaaaatgaagccagttgccaagataggcaaatacctctgagtaaatgggcatagtgtggccacagctccaataacttgccgtgtgcacaattgtatggagcaaggtaggactcgaggttgcagcagactgttagcagttatgatgttaagctggatatgttggtatacacacatacacacacaaaataaaaagacagagttaaatcttccatatgagcctgggcctactcagaacatataaacacacacataagcacacactatgcactcacacactcaaacacactctgtactctcacataaatacactgcattctcacacataaactcactgcctcacactcccataaatacacactatgtattgacacactcataaacacacactgcactattgcacttgcataaacatacattgtgcactctcacacacaaactctgcactatcacacataaacatacactgtgcacacataaacactgcactcacataaacacatacacttgttaacataaacatactgcatgcttatacacacataaacactcagcactcacacacacataaacaccacactcacatacacacataaacactatgcatgctcacactcacataaacacacagtgtgctctcacacgctccatacacagtcacaccctgcagtgagccctagtgggaagaagttgaaggacggaagccagaagcaggtctgctaagtgggacagctcgggagggtttgtggcagatcacagcaggaagcctgccttgccctgatgtggtttcagagtggattggcaccttggcctgctgtgtaggcccttccatcctgctggcagttacaggtcagccctgcctctgtgccagcctcctggtaagtgagctaacttcctggaaccagcaaggcctgtgtcccatttccttctactctaggagaggaagtagggccccggcccaaatgctgccccagccgctcgcctccctctggctcctgatggaggcaggtggtggtcccagctgctgggcttccttcggtagggtgaagcgatggcatctggctcccctcagtttacctggtgctcaggctcaggagcaggcacccaaggtgcttggtccttccctgcccttgaccaccatcatttaggagggactcactctgcgctggcagcacctgtacgtcactgccacccttccctcccctggggaaggctggaacattctcctgaaaacttttattttactcagatttattgggtagaaacagtaaatgtactactatgtttgtgtgtagtggtgcagaacacagtgttttgatattctttattattattaatttaccatatttggactttttgagacaggattaatcctgtagccctggctgacctgcaactcactctgtagaccagactggccttgaactctctacctcctgagcactggaattaaagtgccaccatgcctaatgtgataatcttaatatgtaattttagatgagaacaatagtttgtaatatgtatatagtgataatagcttcaaaataaaaaataaaaataatcaaaagagggctgaagagatggctcagtggttaagagcacagattgcccttcctgaggttctgagttcaattctcaccaaccacatggttgctcacaaccatcagtaacaggatctgatgccctcttctggtgtgcatgaagacagcgacagtgtactcacatacataaaataaataaaatctttttttaaaatagtcaaaggaatttgaagtcgtcctaggtgccaagggcaagaaaacgcggttgtaacacttagagcaaactgagattgtctgtggggagcaagtcagagcgttcaaaactccacactcgtgccttatgtgattgttagtggctgtcgagttaagaaaatccaagatggcagcctcgcggagccccagctgactgctcacggtctctgcccctagcttacacggacttcttcctgccgctgctgagtcgttgcccatctgccatggggataaaaaataaggatggagagactcctgggcagattctgggctggggacccccctgggattctgccgaagaggaagaagatgaggaggtttccaaggagcgggaatggcggcagaagctacaaggcgagctggaggatgagtggcaggaggtcatcgggaggtttgaaggtgaggagcccattgccacccccagccgccctccctcccgcccctgccctgtgtcctctactccaggcccaatgcatgtggcctcttgattttactctttgtcttgtaagtccgctaatcatagcctctctccgacaacctcatcccacctcctgaacagatgatgcctcccgggacacgcaggagcccgagtccttctcagcctggtcagagcgcctggctcgggagcatgcccagaagcagcggcagcagctggaggcagagggatcctgccgacctccaagggctgagggctccagtcacagctggcgacagcacgaggaggaacagcggcttttccgagagcgagcccgggccaaggagaaggaactgtgtgagagccgagccaggagggctcaagaggctcaacgggacaaagggccagagcctcccagggctgggcccagggcagaacacccacgaggggcagagaggggcagcctctggcgctttggcgatgtgccctggccctgccctggtggaggggacccagaggccatggctgcagccttggtggccaggggcccccctctggaggaacagggggctctgaagaggtacttgagagtccaacaggtccggtggcatcctgaccgcttcctgcagcgattccgaagccagattgagacctgggagctgggccgagtgatgggagctgtgacagccctttctcaggccctgaaccgccacgcagaagccctcaagtgaccctagggaataagcaagaacctgtggggatgtagcctcaagaatagacggaaggaagcaaggtcgtggatggggatggacaagaaggggcagctgcggcacagagaggagaggatatgggacggctaacgtaatggttgtgggggtggggtgggggaggctctaccactgctctggactgccatttcctaataagacttggttccacacctcactccagagtctcctctgttttttccattgctatggttttcatcacccacgacatctcctttcccgcccaattgttgaaacccacagctcccacacacctgcggtacagtcacagtgcgctctcaatggagaccagaagcccctgcccgccctccttcagaaggcctggttcatcgtccagaccctgtcagctccccaccccacccccgccggggtcctgacaaggttgcagttgaagaaaaatgtgaacaagagacagaaaaaggaacaacccctccctccatctccaaccacatcctcacccctgctcagctcagggctttccctctgctgagtcactgaatgagctgggttgggggcagcagggctaggggaccacgaggacctgggaggatagaggatagaaccagaggggatggaggaagnnnnnnnnnnnnnnnnnnnnnnnnnnnnnnnnnnnnnnnnnnnnnnnnnnnnnnnnnnnnnnnnnnnnnnnnnnnnnnnnnnnnnnnnnnnnnnnnnnnnnnnnnnnnnnnnnnnnnnnnnnnnnnnnnnnnnnnnnnnnnnnnnnnnnnnnnnnnnnnnnnnnnnnnnnnnnnnnnnnnnnnnnnnnnnnnnnnnnnnnnnnnnnnnnnnnnnnnnnnnnnnnnnnnnnnnnnnnnnnnnnnnnnnnnnnnnnnnnnnnnnnnnnnnnnnnnnnnnnnnnnnnnnnnnnnnnnnnnnnnnnnnnnnnnnnnnnnnnnnnnnnnnnnnnnnnnnnnnnnnnnnnnnnnnnnnnnnnnnnnnnnnnnnnnnnnnnnnnnnnnnnnnnnnnnnnnnnnnnnnnnnnnnnnnnnnnnnnnnnnnnnnnnnnnnnnnnnnnnnnnnnnnnnnnnnnnnnnnnnnnnnnnnnnnnnnnnnnnnnnnnnnnnnnnnnnnnnnnnnnnnnnnnnnnnnnnnnnnnnnnnnnnnnnnnnnnnnnnnnnnnnnnnnnnnnnnnnnnnnnnnnnnnnnnnnnnnnnnnnnnnnnnnnnnnnnnnnnnnnnnnnnnnnnnnnnnnnnnnnnnnnnnnnnnnnnnnnnnnnnnnnnnnnnnnnnnnnnnnnnnnnnnnnnnnnnnnnnnnnnnnnnnnnnnnnnnnnnnnnnnnnnnnnnnnnnnnnnnnnnnnnnnnnnnnnnnnnnnnnnnnnnnnnnnnnnnnnnnnnnnnnnnnnnnnnnnnnnnnnnnnnnnnnnnnnnnnnnnnnnnnnnnnnnnnnnnnnnnnnnnnnnnnnnnnnnnnnnnnnnnnnnnnnnnnnnnnnnnnnnnnnnnnnnnnnnnnnnnnnnnnnnnnnnnnnnnnnnnnnnnnnnnnnnnnnnnnnnnnnnnnnnnnnnnnnnnnnnnnnnnnnnnnnnnnnnnnnnnnnnnnnnnnnnnnnnnnnnnnnnnnnnnnnnnnnnnnnnnnnnnnnnnnnnnnnnnnnnnnnnnnnnnnnnnnnnnnnnnnnnnnnnnnnnnnnnnnnnnnnnnnnnnnnnnnnnnnnnnnnnnnnnnnnnnnnnnnnnnnnnnnnnnnnnnnnnnnnnnnnnnnnnnnnnnnnnnnnnnnnnnnnnnnnnnnnnnnnnnnnnnnnnnnnnnnnnnnnnnnnnnnnnnnnnnnnnnnnnnnnnnnnnnnnnnnnnnnnnnnnnnnnnnnnnnnnnnnnnnnnnnnnnnnnnnnnnnnnnnnnnnnnnnnnnnnnnnnnnnnnnnnnnnnnnnnnnnnnnnnnnnnnnnnnnnnnnnnnnnnnnnnnnnnnnnnnnnnnnnnnnnnnnnnnnnnnnnnnnnnnnnnnnnnnnnnnnnnnnnnnnnnnnnnnnnnnnnnnnnnnnnnnnnnnnnnnnnnnnnnnnnnnnnnnnnnnnnnnnnnnnnnnnnnnnnnnnnnnnnnnnnnnnnnnnnnnnnnnnnnnnnnnnnnnnnnnnnnnnnnnnnnnnnnnnnnnnnnnnnnnnnnnnnnnnnnnnnnnnnnnnnnnnnnnnnnnnnnnnnnnnnnnnnnnnnnnnnnnnnnnnnnnnnnnnnnnnnnnnnnnnnnnnnnnnnnnnnnnnnnnnnnnnnnnnnnnnnnnnnnnnnnnnnnnnnnnnnnnnnnnnnnnnnnnnnnnnnnnnnnnnnnnnnnnnnnnnnnnnnnnnnnnnnnnnnnnnnnnnnnnnnnnnnnnnnnnnnnnnnnnnnnnnnnnnnnnnnnnnnnnnnnnnnnnnnnnnnnnnnnnnnnnnnnnnnnnnnnnnnnnnnnnnnnnnnnnnnnnnnnnnnnnnnnnnnnnnnnnnnnnnnnnnnnnnnnnnnnnnnnnnnnnnnnnnnnnnnnnnnnnnnnnnnnnnnnnnnnnnnnnnnnnnnnnnnnnnnnnnnnnnnnnnnnnnnnnnnnnnnnnnnnnnnnnnnnnnnnnnnnnnnnnnnnnnnnnnnnnnnnnnnnnnnnnnnnnnnnnnnnnnnnnnnnnnnnnnnnnnnnnnnnnnnnnnnnnnnnnnnnnnnnnnnnnnnnnnnnnnnnnnnnnnnnnnnnnnnnnnnnnnnnnnnnnnnnnnnnnnnnnnnnnnnnnnnnnnnnnnnnnnnnnnnnnnnnnnnnnnnnnnnnnnnnnnnnnnnnnnnnnnnnnnnnnnnnnnnnnnnnnnnnnnnnnnnnnnnnnnnnnnnnnnnnnnnnnnnnnnnnnnnnnnnnnnnnnnnnnnnnnnnnnnnnnnnnnnnnnnnnnnnnnnnnnnnnnnnnnnnnnnnnnnnnnnnnnnnnnnnnnnnnnnnnnnnnnnnnnnnnnnnnnnnnnnnnnnnnnnnnnnnnnnnnnnnnnnnnnnnnnnnnnnnnnnnnnnnnnnnnnnnnnnnnnnnnnnnnnnnnnnnnnnnnnnnnnnnnnnnnnnnnnnnnnnnnnnnnnnnnnnnnnnnnnnnnnnnnnnnnnnnnnnnnnnnnnnnnnnnnnnnnnnnnnnnnnnnnnnnnnnnnnnnnnnnnnnnnnnngaaggaaggaaggaaggaaggactgggcggggagaaactgtgttgttggccaccaagcctgaaaacctgagttctacccacatagtgggggaagggaactgattcctacaaactgtcctctgacctccatagtgccctgtggcactcatgcacaccacaaataaaagtgtaattaaacttttttagccagaaagtggtggcacacacctttaatcccagcactctgaagcaaaggcaggcggatctctgagttcgaggccagcctggtctacagatcaagttccaggacaaccagggctacacagagaaaccctgtctcatgggtggggagttggaggaatagtggatggttcctgagaaagaaccaagattggattctagcttctacacacacatgcacacggacaggtgtacgcctgcacagatgaacatacatacatttacacacctgcatatacacacccgcatatacacacctaccaagatgacaactacaatatcctataaacttcgtacaaagggacatgaagatgtgccacatggttattggtagaactggggaagttcttggatcagcacccgtttcagctgcctaaagggttggatgtggcctagagcaggaaggttcatggctgaggagaaagacaggggttccgtttcagagagtttcatgaattcagaaaagacactgctgcacagtgagtaaacatgaggccactgtcagaaccctaggaaagaggcaaaaaaaaaaaaaaaatatccaagctaaatctacagagaacttggaagcagcctgcccaaggtactacagtgcttggctcagaacagccatgaccctcaggggaaacgtcctgcaatcgggtgtggaacctaagagcttgggcatctccttctcctcagaggtaaagcagccagagaagtaggagaatgcagaggcctgggtgggggtgaggtcagccagagaaggagcctcaagtcaagtcgtgatggggcagctacgacttaggcctcaaagagatctgctgggcgagaattgaaaggacctcgtaggttcacaaactagacgattacgaattttaagagagacaattttgttttattagaagggagagttgcttttcacactgaggagtgagtgggcggtgagctgagtgaggggcggtgggtacaaaggatggtggagacaagacaggcatcatctctacccacgagtcttgatgatggggaaaatcttaccagttcctgttagtcaaggggccttgtactgtgaaacaccgcacagagggaaggcgagagggagacagattccagggagggaatttaaaacttatcttcaagaaatgacaccaaatacgtccgtgcgttaaacaacatacgatggaaaagacactaaggacggggatgaggcggagggggaaggattatagattgaaggatcaattttgaaaagaaaaggtttttccaagaaagctgtaaaggggaagctttagttaacagaagggcaaagacggaggcagggagggaagccatcttcaggggccttaagctcagtggagggtgggggaggtcgagggttgtggagaacattggagaatccctcggagactgaaacccgggcgagcagcctgggggcccaccagcagcccctcgtgaccgattctgcagctcaggaggaaaacccaggaaatgcctttcatttcctcaaaccgagatcttcaaggtcttcttggttaaacatcgggtgggaacatttttcaaaactgagagtgtaactgaaattgttgagcctgtttgtttgtggtaaacaaaaaccagcaagaattgctgggggctggctgggctgagaaatggctgggctgggggatgggactggggctgaggctgggatgagggagctggggaggggctgagatggctgggatggggatggtgcattttccacataagcatgggcacttgggcagcaagcccagcaatcctaccttgagatagaacatgaggagggaaggagaatccccaggcacttgtgggctagcctgggctgtgcagccacaaaacctgaacctgcctcaaacaagggagaaggtaacacaagcctcccgaggctgcccactgacctccagacacacgtgtgaaagcgcacacaagaatttttaaaatcagaagtagcccggtgtggtggattatgcctgcagtccagcctttagacgtgaaggcaaaagcaccgggggttcaaagtcaacttcagctatatatcaaaaccaagaccaacctatgctattggacagtctcaagtcccacatccccaaaaataaacaccaagaaagaattcagggggttggaaagatggctcagtcattaagagtgctgactcttcttccaaggattctaagttcaaatcccagcaaccacatggtggctcacaaccatcttctggtgtgtctgaagacagtgacagtgtagtcatatatgtaaaataaataaatatttaaaggaaggaaggaaggaaggaaggaaggaaggaaggaaggaaggaaggaaggaagagggagggagctggagagctggctcagaggttaagagcactgatgctcttccagaggtcctgagttcaattcccagcaaccacatggtggttgacaactatctgtaatgggatctgatgctctcttctggcatgtaggcatacctacaggtagaacactcatatacataaaaagtaaaataaaaccaaagaaagaaagaaaggaaggaaggaagggagggagggagggagggagggaggnnnnnnnnnnnnnnnnnnnnnnnnnnnnnnnnnnnnnnnnnnnnnnnnnnnnnnnnnnnnnnnnnnnnnnnnnnnnnnnnnnnnnnnnnnnnnnnnnnnnnnnnnnnnnnnnnnnnnnnnnnnnnnnnnnnnnnnnnnnnnnnnnnnnnnnnnnnnnnnnnnnnnnnnnnnnnnnnnnnnnnnnnnnnnnnnnnnnnnnnnnnnnnnnnnnnnnnnnnnnnnnnnnnnnnnnnnnnnnnnnnnnnnnnnnnnnnnnnnnnnnnnnnnnnnnnnnnnnnnnnnnnnnnnnnnnnnnnnnnnnnnnnnnnnnnnnnnnnnnnnnnnnnnnnnnnnnnnnnnnnnnnnnnnnnnnnnnnnnnnnnnnnnnnnnnnnnnnnnnnnnnnnnnnnnnnnnnnnnnnnnnnnnnnnnnnnnnnnnnnnnnnnnnnnnnnnnnnnnnnnnnnnnnnnnnnnnnnnnnnnnnnnnnnnnnnnnnnnnnnnnnnnnnnnnnnnnnnnnnnnnnnnnnnnnnnnnnnnnnnnnnnnnnnnnnnnnnnnnnnnnnnnnnnnnnnnnnnnnnnnnnnnnnnnnnnnnnnnnnnnnnnnnnnnnnnnnnnnnnnnnnnnnnnnnnnnnnnnnnnnnnnnnnnnnnnnnnnnnnnnnnnnnnnnnnnnnnnnnnnnnnnnnnnnnnnnnnnnnnnnnnnnnnnnnnnnaccctatcttgaatagaaaaaaacattgagataggtcttactctgtagccttgtctatgtctagtctgagcttcctatgtaggccaggtttctctcaaactcatagagatccacctgtctctgcctccccaggtctgggattaatggcgtacaccaccacacctggcaccagtgatgtgaaactgacctttgaaccccacaaggtagaaagagaaactgaactgattcccgtaagttgttctctaacctgcacacatgaaccggggcacgtattcacccctgcatacacaaaataatttttaaaatgtaattttttttaatgaaagagaggctagagatctgagtcaaagtgaaggattaactcagtggagaagagaggatagaagaaacaggttattattcctagggaaaattcagagatcaaagtcttaaaaaaaaaaaagaatcattttatcattaatctgtgtgtgtgtgtgtgagttgtgtgttgtgtggttgtccccacagagaccaaaaaaaaaggatcagagcccttggggctggagttgtgcggcacctgacatgagtattggaaactgaattcctcctgtcctctgcagaggcagtacatgctcctaaccagtgagcagtctctccagctcccagggttgaagctcttgaaaggcagccttgcttccaggggaagctgaggtgggaagtgtggcctttcccagagagaagctgaagctggccaccttaaggctggagagctgagcccagagccgaggacagacatgtgcactctgtgtgggtttgaagatggtgccaggtgatgaaagatgaagagaaactgaaccagatgtccaagttgttaggcatacagtacagatgttgatggagatacaactgtgaagacaggacgagtacggttcgtgcagagtcaggagcctctaaagaagagaatcctgttggtagcatggccacactcctccgtcacttctccctaatgctggtgtcaaaggaagagctaccttctccagagagggcacaggcgttgtctggtgcctaaagaaaacatcttcaaagatgaaacaggggatgtgcgtagatattccacagcaagaggacactgtgaaccagattcacagaagagtccttgctgggtagtgaaccacagaggggaccaaggagaaggacatcctgacaggctcgcttttagaatccataacaaacaggctcgcttttggaatccatgacaaactatgcattctatcaacacctggcatttattgtggggaggcgtgggacactaacaggccccgtggtccagggcttttacatcccaggccaccattatgctggcagctccttgtttccctctaaccccatcttgcctgtgaacctgaatggcttcagacttaacaactctctctctctctctctctctctctctctctctttctctctctctctcttaataagatttatttatttattttatgtatatgagtacactgtagctgtacagatggttgtgagccatcatgtggttgctgggaattgaactcaggacttctgctcactttggccccactcactcaggcccgcttgctctggcccaaagatttatttaatattatatgtaagtacagtgtagctgtctttagacacaccagaagagggcgtcagatctcattacgaatggttgtgagccaccatgtgggtgctgggatttgaactctggaccttcggaagagcagtcagtgctctttcctgctgagccatctctccagccccagacttaacaactcttgagagtggatttagatctcatgtacccaaagcagcacatttggcttttcctgcccacctacctaaggaccctaccttagctcccatccagctccatcacccagacccctgtttctcctcttgttcttctgcaaggcagcatagaccagggagccaccttgtagaccaggctggcttcagactcacaaagatccacctgcctcccaatcaccaccatccctcctccaccctgttctatcacacacactcacaccttccaaaaggtcccacttgaaccggaaagatcacagttgaataaaatgtcgatactttgtgtcttccaaaagatcacagttgaataaaatggagatactttgtgtcttctcacatggtctggccctgccttcctctcccactgcatctgacctcttcaagtgtctctgatgtggtcaagttcagtttcttgctgtccatcagcatccctggcttcctccctcctccctacctatctgtcacctgggccttttcttcagtgctacccttgctgagagtcacattactgagtgctgtatccaagagtattctcttccactccccacgccaccctgccttgttatccctgtaggactgttttacagattcattttattttatggcgatgctggggatggtccctgggtctcactcacgctaggcaagtgctctatctctaagacacatccctgctctttgatgtgtcttttccatctggcctggctggaacatgatccctaagagtaaaggatttactcttaggattctttggctcaactttgtgccacagtatacttcctgccttgaacaaacttcctggttggtactcagtaaacatgtattaaaagctgttggagggtgcggtgaggtaggacaatgtccagctctaatttctggctcaggtagaagttccatctagtatcatgctttgtttggggtcagtagctggataacaccagagacagggtaagctgtttcacaggaaggagtttatttgagagtcctttgaggggtatgtgcttagatttgaggttacgtttgaattgtgatttgggtgaaggttaaacttgggtaaaatctgaggctaaaaaaacagagactcacagtagtctttgactactgtcagttcagcctggtttgcaggctccggagctttctgtggcccttcctgagagtggttatagacgatgcacaagactcctagtcatcagccctcccccccggggaaagtcccagacagctgttggcctccccaagagagaaactgaatttcacacaacctctaaaactgagattgaaaccaaaattggcccatggcaaggcatatccgccagcgtgctgccagctcccgtgacacagcttagccaaggcttacccttccttcgtctgtctccatcatccccttatgcaccctctcctttcctctgcccctccaggtcccagccttctgctctgactcaaatctaatcctctctctgtctctctttctgtctctctctgtctctgtctctgtctttctctgtctccgtctctctgtctctctctgcctctctctctgccaattttcattttaatacagcttagccagcgtctcggctaccatcagttaagagacaaaagcaacaggaagcataaagactcccagagaaagaggaacaaagaaaaggagccaaagatgacacaatgacagaattaaattctgtctgagagaactcagtgaagagagcctgcttagcctgctcaggctgtgggtcccatggccagttctgccaaa

SEQ ID NO: 128 - DNA, 1497 bp, Mus musculus
ccgggtgcatcctggcgcgcctcctccctccccacctcccttctccgagcgtcttaagcccaggcctccggcctccgtctctgagggtccttggggggggcggggagcaggtctgatgagtaacccctccccccaggccccagaggaagaagcctctacgtctgtctgtcggccccagagttgttccatggcctccgcttcccgccggcaccgccgagagcgacgcttccggcggtacttgtctgcaggacggctggtgcgagcccaggctctcctccagcgacatcccgggcttgatgtggacgctgggcagcccccgcctctccacagggcctgcgcccgccacgatgcccctgccctgtgcctgctgctgcgtctcggcgctgaccctgcccaccaggaccgccatggcgacacggcgctgcacgctgctgcccgccagggccctgatgcttacacggacttcttcctgccgctgctgagtcgttgcccatctgccatggggataaaaaataaggatggagagactcctgggcagattctgggctggggacccccctgggattctgccgaagaggaagaagatgaggaggtttccaaggagcgggaatggcggcagaagctacaaggcgagctggaggatgagtggcaggaggtcatcgggaggtttgaagatgatgcctcccgggacacgcaggagcccgagtccttctcagcctggtcagagcgcctggctcgggagcatgcccagaagcagcggcagcagctggaggcagagggatcctgccgacctccaagggctgagggctccagtcacagctggcgacagcacgaggaggaacagcggcttttccgagagcgagcccgggccaaggagaaggaactgtgtgagagccgagccaggagggctcaagaggctcaacgggacaaagggccagagcctcccagggctgggcccagggcagaacacccacgaggggcagagaggggcagcctctggcgctttggcgatgtgccctggccctgccctggtggaggggacccagaggccatggctgcagccttggtggccaggggcccccctctggaggaacagggggctctgaagaggtacttgagagtccaacaggtccggtggcatcctgaccgcttcctgcagcgattccgaagccagattgagacctgggagctgggccgagtgatgggagctgtgacagccctttctcaggccctgaaccgccacgcagaagccctcaagtgaccctagggaataagcaagaacctgtggggatgtagcctcaagaatagacggaaggaagcaaggtcgtggatggggatggacaagaaggggcagctgcggcacagagaggagaggatatgggacggctaacgtaatggttgtgggggtggggtgggggaggctctaccactgctctggactgccatttcctaataagacttggttccacacctcaaaaaaaaaaaaaaaaaaaaaaa

SEQ ID NO: 129 - DNA, 1146 bp, Mus musculus
atgagtaacccctccccccaggccccagaggaagaagcctctacgtctgtctgtcggccccagagttgttccatggcctccgcttcccgccggcaccgccgagagcgacgcttccggcggtacttgtctgcaggacggctggtgcgagcccaggctctcctccagcgacatcccgggcttgatgtggacgctgggcagcccccgcctctccacagggcctgcgcccgccacgatgcccctgccctgtgcctgctgctgcgtctcggcgctgaccctgcccaccaggaccgccatggcgacacggcgctgcacgctgctgcccgccagggccctgatgcttacacggacttcttcctgccgctgctgagtcgttgcccatctgccatggggataaaaaataaggatggagagactcctgggcagattctgggctggggacccccctgggattctgccgaagaggaagaagatgaggaggtttccaaggagcgggaatggcggcagaagctacaaggcgagctggaggatgagtggcaggaggtcatcgggaggtttgaagatgatgcctcccgggacacgcaggagcccgagtccttctcagcctggtcagagcgcctggctcgggagcatgcccagaagcagcggcagcagctggaggcagagggatcctgccgacctccaagggctgagggctccagtcacagctggcgacagcacgaggaggaacagcggcttttccgagagcgagcccgggccaaggagaaggaactgtgtgagagccgagccaggagggctcaagaggctcaacgggacaaagggccagagcctcccagggctgggcccagggcagaacacccacgaggggcagagaggggcagcctctggcgctttggcgatgtgccctggccctgccctggtggaggggacccagaggccatggctgcagccttggtggccaggggcccccctctggaggaacagggggctctgaagaggtacttgagagtccaacaggtccggtggcatcctgaccgcttcctgcagcgattccgaagccagattgagacctgggagctgggccgagtgatgggagctgtgacagccctttctcaggccctgaaccgccacgcagaagccctcaagtga

SEQ ID NO: 130 - DNA, 24888 bp, Homo sapiens
tagttgtttggggatctgggccttggtacagtatcaaataacaccagaaactactttctggtttcaagggggaaaagaacaactgtggaatcagactgtcacgacgctaatcctatggtaaatctaaaatcattaatgaggccaggtgcagtggctcactcctgtaatcccagcactttgggaggccgaggtgggtggatcacttgaggtcaggagttcgagaccagcctggccaacatggcgaaaccctgtcactactaaaaaaaaacaaaaattagccaggcatgatggcacactgtagtcccagctactcggggggttgaggcgggagaatcgcttgaacgtgggaggcgcaggttgcagtgagctgagatcgcgccactacactcacagcctgaaggacacagcgagactccatctcaaaacaaataaataaaaataaaataaaataactaacataagtcgaccagatttgtggcataacaggagatacagcatcacctatgaaggattcttgccaaaaatgcttaacttcaatcagattttttctttttttttgagatgggagtctcactctgccacccaggctggagtgtaatggcacaatctcagctcactacaacctctgcttcctgggttcaagcgattcccctgcctcagcctcccaagcaggtgggactataggtgtgtgccaccatgcacggctaatttttgcatttttagtagagagagggtttcatcctgttggccacattggtcttaaactcctgacctcaaataatccacacgccttggcctcccaaactgctgagattacaggtgtaagccattgtgcacttggccagaatcctcaatattcacacaccactggagctgttttaaagtttccggctttctctgccacataccccaaaattattaaactgatatgattcaaagtcagtataaagtagtaagaaaagggtggtcttgtgttaagcatcatccatagcccaattacgaatcctcctgttacataggaactcaacactctgttacaccacagcaaactaaagcttctccaaaattaaagagactattggcctacaagtttcttatccctccaacttgccacaccctcactctcaggtctctttaccttggcttaccttgacattgggcatgtatttagagaagcgctcatattccttgctgatctgaaaagccaactcccgagtgtgacacatcaccagcacagacaccttaggcaggaagtatacggagacatatggtaaatgtagctcttcattatcccctctagggaagtgactgtcacaaaaacacacctgggccgataataaatgacttcaattctgtgatctaaatcatgaaccccacgcttgcgacagaacatcccccacagctgtcaggttgtcaagggtaacagaggtcatgtgctcatggctctgcaagcatcatgtagttaggacaaaaacacccttcccttatagtcctaaccaaaatcccctccccagcactctccccaaatatacctgcccagtaactggctccagctgttgcagtgtggccaagacaaacactgctgtctttcccatgcccgacttggcctggcacaggacatccattcccagaatggcctgagggatgcactcatgctggactaaaagttggggggggaggaagataaattagacttcagtctccagataactctacctttttcaccatgccaagcccatttcttaccactcaattctcaaagtctagtatttacctggttcttgccaacttccagacccattttacctctctctgctcaattacattcacctcaaaatcagactctcctaattcctcctagctttagcctcctccagatctaggccttcccagtcctagtaacaaaccccttgcatctaccaaccgctcaccttcaatgatcctagctctgtccttatttttcttaatctgtaacaattcatgacatttgaatacctgccacagaccacttctcctgcttaggttgctatacttcgggtcacgtaactactacaaccctggacaaaatgaaggacttggtacctgacccagaagccagtcatctctaaaccagtcatagaggtttccagagaccacagttggcctggcccaacagagggagactacaggtccaagcaggacctttctggaaatttaaaattagaagtcaagtgacaaaattaaaaataagcagacaagaaaagccagtcacaagaatgaatggcagacctggaagtcacttttggatcattagcactttggtgctatcacgaaagaaagaataagcctgtataagcctcctctatccaaaattgtttttgatacttatcccgattttttcttcctcactgtcgccccggctggtgcacagtggtgcaatcacggctcactgaagcctcaaccttcacctgcttaatttctgaacgttttgtagagacaggagtctcgctatgttgcccaggcttctcttgcacttttgagctcaagtggccaccctcctgcctcggcctcccaaagtgctgggattacaggcgtgagccactgcacctggccctgatctagccttaagtataaacccttaccaccacctgagcaacgacaaacacatctttgtattgtacccttaaagagcccaatgagcactacatgcccaagagaaaatttaccttctgacggatgctcaaagccacagtcgacaatggcccggagcaactctggcttgagcaggaagtcacgaaagccagagctgtggatggagacataggagcccttgacatccttcttggcaggggcctcagccccatctcccccagctgctgtctccacctcatcatcttcatagtccaagagctcattgtccacatcgttctctgccataactgggccggcaggggaagaagggaagggggatctggatgggttctcgcaaaataggtgaaaacaaggggtgaagagtaggggattgaggaacagcaaaggaaaacaaagatactatttctaacagaagagctggaggggggaaaaaaaaagcaagacttaatcacgagcacagccttcaccatttttccatccccagttcccactttccctaaaccaggaaacttttacctggaaagaaaaacagatacaaaacataaaaacgaaaagcaaatataacagaacagaaaaagcagtaccagggaaagtggttaggacagaggttcccaacaagattagcaatcacagtagcggaaaccagaaaagttggaaggggaagaccaacttataaattcttgatctgaaagtaacagtgaggaaatagaatagataataaaaggtaaaatatgactaataacttagtaaagtggaaaatggagatgacaagtagagtcctgaaaagtcctcaaaggaagactccgctttccctattataatcccaccgttatggatgcctaactcagcagccatcagtcaagggtgatagatgagggtcatcactgcgcaaagcgctcacctttcgaaaagaaaacatcatatggccgccgtccacctcccatagctctcagcctcccacttctcagtatcctcccttccgctgtttaagcaagccttgtgtaattagcatgggggggaggggcggtgcaagacaaatggctcggccacaaaaaaacaaaattcatgtctccaccctacaataagaaagctaataggtgacagagaaaggcaatccccgcccaggctttaacaggatctttaccaagtggtctcacatcactgttacgctacgaaggtgagactccttttggagaaacatacaatgacaccaatcgtatcgtaaacacttggaaggcactccaaattaagttgggcaagtcaaggtgagaaaaatccaactgggcccagaaaccagctcctcctcccagtcccaccgagggccgaaaaagagctcaagaaagaacaaggaaggtgagaagagccccgccctccgcaaataccaagaccaagggacgccgagcaccgcctctcattgatgctgaggcctccaatatgagaagaacccattggaagaagggagcaaaacgaacacaatggcgccgaggacaccatcttggattgggtccccccttagcttcccttccttcccccaggagctctttgctctcgaaagggatgcaagctaaggaaatagcgaaccaactaggccccagcgaccagaccatcgcctgtgaaaagggtatcaggaacccatgtgacgggatgggtgcggagaagcgcagatggaaacggattgtagcgaaggccaaagcttacctaaacagggagagcgcgtatggcggcagcaacagcgacgaaggagggaaatctgccttcacttccggttgcaggcttccctctactccagcctcccgccttcttggctgcaagagcgcaggcgcaagggaccggaaacagggccttccgcggttatacagatccgtgcgctccaggcttgcctttggaaaatgcctgtctgaaatttgttttaaaaccgtttctaacttcactgctacctccagtaacaaaagatataaaggaaactaacgtctcccccccactgttatctttattctcttatcctactcctctccatgcccctcatctcttcgtttaggtttttgccacgcaggtcttctctgtaggcacccctccgtggatgcgcgaggaacgagtgtggcgaaggctgcgagttcccacggggtccttggcccggtagtgaaggtgacctgaggactgctgggcacgcactaggaaccggcaggccctagctgaggggagggaggagggaagtctcagggaactggattgctcgggggtgtttcccgactctttcccagtcgtggggctggtgggcggtattttcccaaaaggatgctgtccgaggtagctgatgccctagggccagtgagtcaggaaggtgttctgaatccgagcgggaagacggggtctggattcggccccaagtgttaatagtagggcttgagggttatactacattccattaatactgtttttgtttttgttttgagacagagtctcgccctgtcgcccaggcgggagtgcaatgtcctgatctcggctcactgcaaccgctgcttcccgggttcaagcgattctcctgcctcagcctcccgagtagctaggattacaggcgcccgccaccacgcccagcaaatttttgtttttttagtagagacggggcttcacccatgtatgacctcaggtgatccacccacttcggcctcccagagtgctgggattacaggcgtgagccaccgcgcccggcccattaatactgttaattcgagcagaatgttcttggccccgccccaacagccccattgttcaacctggatttttttcctgaatgaaacatttgctatccccgtctttgagatggggagccacaaaagtaagacctgatgtcctgctgtgtaataaaacaacaaacgtttggccctctccctgttaacatacttaatcatttaatactaaggagtaggtaccgttattctcatcttattgacagaagcgaagcaaagcaacatatctcaagcagtacggctggtgaggttacagccaggatgcaaacatctctcattctctattgtattctgcctccctgctcaaagaatctggttagtaaatacactgcaggttaccttattggttcaaattcttggtgaagtaagcttgtcttcagtgacaaatgaagtaactaattcaagaatggtgtcatagaaggtattttcccaagtatcatttaatttattcaaaagtatttatcaactgcctcccttgtgccacatgttgtcctaggatctggggacacaacggtgaacagccctgttctcacagtgtttacattacaggaaagaaaacacataaacacaaatataatgtcaagtatcgataagtggtcagggtgcagtggctcaggcctgtaacccaacccttgaggaagccgagcccgaaggattgcttgagcccaggagtttcagaccagcctgggcaagtgagaccccatctctacaaaaaattttaaaattagcaaggcatagtggcactcgcccgtaatcccagctactcaggaggctgaagtgggaggatcatttgagtccagggggtcaaggctgccgtgagctggaactccagcctgggcaacacagcaggaccttgtctcaaaaaaccagtagcagtaagtgctatgaagaaaatgcaaggtaaaggggcaaagagcacttgctcctacactccagcttttctctacagttgcgatctatagtcctcagattcccaaatgaggaaccatgtttctcactttagagaaataataaagtactacttgttcttgtttctccaagaagtttcaaaggatagccatttgggctgtttagggaatatgtaaacaaaaaacaagaaagtgactgaaggccaggcacagtggctcacacctctaatctcagcactttgggaggccaaggcaggtggatcacttgaggtcaggagtttgagaccagcctgaccaacatggcgaaaccccatctctactaaaaatacaaaaaatagccaggcgtggtggcacacacccataattccagcaacttgggaggctgaggcaggagaatcgcttgaacctgggaggcagaggttgcaatgagctgagatcacgccattgtattccagcctgggcaacaagagcaaaactccatctcaaaaaaaaaaaaaacaaagtgactgaaaatgagaaatgatgaggcaaaaggaggctgcttcaactcaccaatttatttgccaataattattttattgatactttttttattgttacaatgggaaagtaaggtgtcaaggatatagaaaggaagggcatgcatatgagggaacacagtatcattttagatcttagaaagcaatgagcatctgataagtctttggggaaataggaaaggaggaaaatctaataaagacaaagatcagcaaaagaaaaacaaagagaggctacaaaatgcagttatctacctggaattataagagaggggctaaatgtagtcatctcctctttttggagatcagaaggtctctgggaaaagagaagaaccaatttttcagaaaataactagggtcacagaatgaacaagtggaattagagagccagtgatggacgtgaggaaacagctgtgtaggttttgaccagtgagcaggtggtggtaatagtatcacagggttgctacttactgaatcactgctacaacatgcaaggaactgtgctagactttacagaatgattcctaatcattgaagcaaccctcacaaggtaggcattattatcatcccagtttcacagaggaggacatcgaggctaccaagttaagtagcttgtcctggtttcacagccagcaagtgacagggtcaagagagggacccacatcggccagacactgaagtcaggatgttttccacattcctacttccccatattacaaatttcacagagggtttaggtgagaatgacttggaagtttacaaagtcccagtgagggttaaagaacaacaaggagattcagatgtgagcaggatatttataagtgtcacaggaaaattattggatcctgcctcccaggatttctaggggatggaaagaagacagggattatggtgggaggtgattttgattggaggatttctttgagggagggaactggcagaaggagtcaggccctacggtggccctaggcagaaatccggtagttggggtggacctggggcctgacgtcgcagaccatgccaagaagctgggccaggacacgctctcggtttctctgctgggagctctgcatgccctgcacctggcgccttgtagcctgctccacctcagcagacaggttcccctgggagcccatggcctggggggtagggagaggggtggaagagagaaagggaaaagcagaaacagacaagggtccaggcatatgaggggaaagatcctgaaacaaagcctagaagaaaggccctctcagaaaccacccccatcccacagaaatatcccaacaccaaagagatcaacacagtcccctttccccttagacctaacatgcaacttcatcctaaaacagaccgtaatatccccaccacctcaccatccatgaccataaaactctaccctccaccacaaatgttaatcatactccacatagatgttatactttacacagactgtggcattccgcccacaagctctatgtggccttcaaaactcccagactctcctacatatcatcacaaagtttcaccaatgttgtggtccctgccagggtcccctcagcctcagccctctgccaccatattttcttgttgagtcacccttacacacctcactagatgcacccaccaacttgcagtggggtctcatcccgactctgcctcaactcaccgcctgctgcttgctctggaattcgtgctctcgctctctgcggtattgctccacctccatctgtgcctcctcctttgcctgcttcagtcgccgggccttccctggaggcagaagaaaggacagtgagtggggatggacccacacacacacaatgtaatagcaggagtcagtcccttccagaaagttatacagccttctctcagccaaccaggtgccagattctaatatccatccatttcttccctcctaaccagcctccagaccctagctgtcttcccgccagccttgggttttcccaaaatgtttgctgtcccccacccccaattttctttccaaactcctaagggaggaaagaggagactcactctttctggcatctgccaccttctcagctgcccgcttctcagcttgcagaagctgctggataccttgggactgactggccatttctgttgttatggccgatgctgttttgaatgctgtcaaagtaccagatggctcccaccccccaccgcttacttctcctcctccagctcgttgctgcagtcctccactacccctgggtcttagtgctcccctgctcactcagcctcctgcaccgagtgtctctcccaatctcatcctcctattgatgactggtcctcctctccagcacttcttgctcaggcagtacccaaaggggccgcctgggagcagcagagaccaggcccaaagctgcgggcttacaacaggttagccatcccagtcggaaaggtctagggatgaggcaggggcggagacgggggagtactgaggtgagagaaggagaacttgattggtggtaacagaggaagcataaagggttgtgaatgcggtgaaaaggtaaggatgtcatcatgcaacctgtgttgggaaaagagcattctgggcttaattctaaactaactctctacctttctctctctctccaccatcccgccccctcccctgcctcccgttgttaacatctccatctttttctacatatttctcaagtccaaatttttgcatctcacttgccccatcctacgatagtcttcttccgtcttttgtctgtattttttcttttttttgatctgtccctgttgttgtcccactgtggtttttgtttttgttttccatgtttaatgtgatttttatcctgtctttatctcctctattttctctgtcttctcatcttttcgtccatcactgaaccatctcctctctctgccaagttagaggaggcggggaaaaacctccaaataactctcttttctccctcccctcccctcgcctccttttcctcgcctccagtccagtcttctggtttcagacggcccctttaatttaagttccctagtttcccctgggagatctggccaagaactacccggtcggggcggaacgacatccggtaacgcccctcacagttcacttccgtcctccacctgcgtctctgcttgcgccatttcctccagcctggagtgtctccgcccttcccgcctcccgtctccgagcttcttaaacacaggccttgggcctacggctctgggggtacttgggggggcgggggcaggtctgatgagtaacccctccccccaggttccagaggaagaagcctccacatctgtctgccgggtacatgatattcaatttctagatcattattggagattatctgtgactttttaaaactcagatttctgctgataaaaattttccccatccggccctgttgggtttttttaaagttctttgttaaaaattaaaaatttacctgggctcctgagccttaaaccaattatttacccttttctcgaattttacattaaaaaaattaaacctctgatcctatcacccccctcaaaaaaaattttttttcaaatctatcatctgataaaggatcagggttaggttaggcctcatctcttgctgaagatattaaaaaaagacggaaccaaagggagaaacaacaggggatgtcagagatggagggagaaggaccagccaaggctgaagtcctgactgctgccttttttccttccccagcccaagagttccatggcctccacttcccgccgccaacgccgagaacgtcgctttcgtcgttacttgtctgcaggacggctggtccgggcccaggccctcctccagcgacacccaggcctcgatgtagatgctgggcagcccccaccactgcaccgggcctgtgcccgccacgatgcccctgccctgtgcctgctgcttcggctcggggctgaccctgcccaccaggaccgccatggggacacggcactgcatgctgctgcccgccagggcccagatggtgagtctgctcagtggggaacaaggtcataagcagctgaccagacctgaaatgaaagccaaccaatagttgagaaataagctggttatttggtcatcaggacctagggaaggagttaaccaagttggcatgtggctgtcatttgtccctttacattactgagctaccattgtctgaagaacccaacattccccaaagatcaactggtcttcaaatttcacatctgtttagattagtagctactttgtttcttgacagattgtttgctcgtagccaaaaagtagcatagaaggtaggctctggagttagattgcctggattcaaaccccagctccaaatcccagctccacacttcatagctacgtattcttggacaggttacttgaggcttagtttgcccatgtgtaaaaattaaaataataacaacctttgctatgtgccagacatttcttataaagtaacacatttaatcctcacaacaatcttaggaggtgagtactgatattatcccccatttcccagctgaggaaacagggcatagagaagtcatttgccagagttacagttattcactggtagagcagagattataacccagatggactagatagagtgtccatgcttttaacagctacattgtcctgtgttatacattatagcattgtacattgattgtgcccatgttcagagtacccatgttgtgccatatatgttttgagaatcaactgacatagtacataattagagtacctggcacacacgataagcacttggtatatgctggcgattgttgttcctgtttctctgttttttgtttttgtttttgttttttatgaagtttcactcttcttgcccaggctggaatgcaatggtgcgatcctggctcactgcaacctctacctcccaggttcaagtgattctcatgcgtcagcctcccaagtagctaggattacaggcgcatgccaccacgcccagctaatttttatatttttagaagagatgggttttcgccatgttggacaagctgatctcgaatgcctgacctcaggtgatccaccaacctcagcctctcaaagtgctgggattacaggtgtgagccaccacacctggccttgttcctgtttttgttatcaacaggtccatactcccttaaccacaattctaaactcaaaaacactctgagaaccaacatttttcatcaggctgccaccaaaattcatttggtgacagaaacctaatctgaactaaagtaagactattatttattttcatcctactgatgtcaatattcatacatttccctgcagaaacactcatgtgtttggttcttgggctgcctaggccctcctgggctacctaatatagagtgagtgtacttttaggtcagccctatcaagtcccaaaaacatttgaattctgcaaaacctttggcactgaaggattcaaatggggaacctggtgatattataatagtggtggaggccaggtgcggtgggtcatgcctgtaatcccagcactttgggaggccaaggcagtcagatcacgaggtcaggagttcgagaccagcctgaccaacatagtgaaacccccatctgtactaaaaatacaaaaattagccaggcatggtggcacacacctgtagtctcagctacttgggaggctgaggcaggagaatcacttgaacccggaagacagaggttgtggtgagccgagattgcactactgcattccaacctgggcaacacagcaagactccgtctcaaaaaaaaaaaaaagagtggtggaagcagctctttataggtagagccctgcttactagaataaaagctgaaaccttctttccccatctagagatttccttctggagtaagaacattacaggaaaacctctagatccagatgaacaaccctaacatcccccagctcaagtatagacagaaggcccctcccccaaaactcccccaaatggtcaaaaaaccccctatttaaaaatttcctttaacgtacctgagataggctagcatattcagatttgtttcttgttgtttttacttaaaacagagtaggtttactgagtgcaggcatctaacttgacagctcatattgtaagaggcaggaccctggaaggcaaaagagcagattaccccgaagcagacctgcatccagaccccagctctgccatcaacagggacatgcagcttacctctgtgagcccaatttgcctcgcaaaaatgggagttttgttttttgttttgttttgtttttttgagatggagtttccctgttgttgcccaggctagagtgcaatggcgcgatttcagcccacctcaacctctgcctcctgggttcaagagattctcctgcctcagcctcccaagtagctgggattacaggcatgcaccatcacgcccggctaattttgtatttttggtagagacggtttctccgtgttggtcaggctggtctcaaactcccgacctcaggtgacctgccagcctagcctcccaaagtgctgggattacaggcgtgagccaccgcgctcagccaaaatgcccctgatagtgtggtagggatttcctttattgtttgtttgcttgtttgttttgagacagggtctcattctgtctcccagcctggagtgcagtggtgcaatcatggctcactgcagcctctacctcgtgggctcaagcagtcctcccacctcagcctccctagtagctgggactacaagcacacaccaccatgcccagctaattgtttgtatttttggtagagactgttttgctatgttatccaggctgttctgcatctcctgagttcaaacagtctgcccacctcggcttcccaaagtgccgggactagaggcgtgagccaccacacccaactccattgtattgaattttaagaagctggtgagactgatattatcccatttacagatgaggaaagcagggcccaaaaggttcgggaacttgtctgaaatctcacagctctcaggtcattgtcttccaaagggggacccaagctcagtgccttcactcccagaccctggtgtcctctctggccttatttactcctggtcctctgccagccctgccaccagatggccttctaactccttggttgaaaggcccatctcattcagcttccagcttcctttttcttttccttttgagacggagtcttgctttgtcgcccaggctggagtgcagtggcatgatctcggctcactataacttctgcttcctgggttcaagcgattctcctgcttcagcctcccaagtagctgagattacaggcacacaccaccatgcccagctaatttttttatttttatttattaatttttaaatttttatttgtttatttatttttgagacggagtctccctctgttccccaggctggagtgcagtggcagtatcttgactcactgcaacctccgcctcctgggttcaagtgattctccttcctcagcctcctgagtagccgggactacaggagcctgccaccatgcccgactaacttttgtatttttaatagagatggggtttcaccatgttggccagactgctctcgaactcctgaccttagatgatccacctgcctcggcctcccaaagtgctgggattacaggcatgagccaccatgcccgacctaatttttgtgtttttagtagagatggggtttcaacatgttggccaggctggtctcaaactcctgacctcaagtgatccacccacctcagcctcccaaaatgttgggattataggcatgagccaccgtgcccatcccacagaatgtcttttggttttgtttttgttttctgttttgttttgttttgtttgaaaaggagtctcattctgtcgcccaggctggagtgcagtggcacaatctcggctcactgcaacctccacctcccaggttcaagagattctcctgcctcagcctcccaagtagctgggactataggcgtagggactgtaggcgtatgccaccacgcctggctaattttttgtatttttagtagacacggggtttcaccatgttagccaggatggtctcgatctcttgaccttgtgatctgctcacctcagcctcccaaagtgttgggattacaggcgtgagccacagcgcctggccaaaatgtttttatgtttatttttcttagtatgaaactccagcgtattaaagagcattgagaacggttgatctggtaaatcgctataaaggcggcatttcttttttttttttttttttttttttttggcgaagtgggggatggagtctcattctgtcgcccaagctggagtgcagtagtgtgatctcggctcactgcaagctccgcttcccaggttcaagccattctcctgcctcagcctcccaagtagctgggattacaggcgcccgccaccacgcccagctaattttttgtatttttagtagagacagggtttcactgtgttggccaggctggtctcgaactcctgacctcatgatccgcccgccttggcctcccaaaatgctgggattagaggcgtgagccaccgcgccaggcctaaagggggcatttctaatactggagaaaggtgaactttttttttttttttttccgagacagagtctcgctgtgtcacccaggctggagtgcaatggcgcaatctcagcttgctacaacctccgcctcccgggttcaagcaattctcctgcctcagcctcctgagtagctgggcacctgccatcatgcccagctaatttttgtatttttgtagagatgggggtttcaccgtgttggccaggctggtcttaaactcctgtcctgacctgaggtgatccacccacctcagcttcccaaagtgctgggattacaggcatgagccactgtgcctgaccaggtgaactattttataaataatattggaacatttggctcatctagggaaaaacaagagtcccacctcacacctaatcaaaaagtaaattccagcagattaaatacctgaatatgacaggaaggtacacaccaaattcatgggacagatggcctggggaggaatgaaacttggaaggcggtatcacggtaaactacctttatctgtgatgattttatttccttaaaataaattatactacaaacatgacagtacattaacaaaccctgtggtaggaatggggttgtgtattgtattatactttgtatttttgagagttttttaatttcttttttgttgttgttgagacagagtctcactctgtcacccaggctggagtccagtcgcgcaatcttggctcactgcaacctctgcctcccgggttcaagcagttctctgcctcagcctcccaagtagctgggattacaggcatccgccaccacgtcaggctaatttttgtatttttagtggagacggggtttcaccatcttggccagactggtcttgaactcctgacctcatgatccacccaccttgggctcccagagtgctgggattacaggcatgagccaccgcgcctggccgagttttttaatttctaaaaataaaaatgagtatacatctaaagtagtagaagaaaatgcagagaatgttttataatcttaaaatagagccttcctaagagtgaagtgaaataaaaagtcagaaaataatatattgatatagatttaactacatgaaaattttaggccgggtgcggtagctcacacctgtaatcccacactttgggatgccaaggtaggcagatcacttgagccaggagttcaagaccagcctgaacaacacagtgagacctggtctgtacaaaaaatacaaaattagccaggcgtggtggtacgtggctgtcgtcctgtagtcccagttactcaggaggctgaggtgggaggatcgcttgagcccaggtggggcagagtttgcagtgagcaagatcatgccaccgcactgcagcctgggcaacagggtgagaccttgtctcaaaaagaaaaaaaaagcttttttaaagatagatagaagaaaatgtttgcaatatgtataacacatacagtatatagaaccctcatatcaatatatataatttccaaagaaaaagtggataaagaatatgagcaattcattcacaaaaaatacaaatagccaaaagacatgaaaaagaaaaaaacattgttaataaaataattttttaatctatccaactggcaaaattaaaagggttgatgatattcaattttggtaaaggaagacataggcacacttgtatattggcacaaacttattgagagcagtttgaccaaattgcgcatgtcctttgactcagaaattccacttatgaaaatctacccccacagaaagactgtaagatactcatgaggctgaacattttttgaaacaaagtctatcgatattggggtaaggagatttgttttgtacacacagtggaacactaattataaagtcgtcaaaaagtatgaggtagactgtatatattcctgtggaaaaatataaatgagatgttaaatgaaagaagcaagttgccaagcaatatttgtagtatggttacatatctccaaataaatgtgtcatatgtatgcttttaggtacaccaaggtgggactggaagggatcacagtacactgttaatagttatcaaatttgttcgtccttctttaaaaagaaaatttcaacttaattatatccctttcacattaaaatgtcaaataaaattgggggaaaagccacctacagccccaccacccataggctagaatttttacatattttttgccagtctattttttttctttttttttttttttttttgagatgggagtctccctctgttgcccaggctggagtgcactggcatgatctcagctcactgcaacctctgccttccaggttcaagtgattctcctgactcagcctcccaagtagctgggattacaggcacatgctaccacgcctggctaatttttgtatttttagtagagacagggtttcaccatgttggccaggctggtctcgaactcctgacctcaggtgatccacccgcctcagcctcccaaagtgctgggattacaggccatgagccaccacgcccggcctctttttttccaaccataggatttggtctcttgttttagacagttattatctgatcctctctctctctctcttttttttttttttttttttttttgagatagagtctcaccctgtcacccaggctggaatgcagaggcgcgatctcggctcactgcaacctccgcctcccaggttcaagcagttctctgcctcaacctcccaagtagctgggattacaggcgtcagccaccacgcctggctaattttatatataatataaaatataattatatatatattttgtttgtttgttttagtaaagacgggttttcaccatcttggccaggctggtattgaactcctgaccttgtgatccattgtccccccccccagcctcccaaagtgctgggattacaggcgtgagccaccgtgcctggccacatctgatcctctctacagttttgtagccagcttttttcaaacacatgcctcagttgtagtggctgtttaatattatgtttttatagttggaggccctactccttaaaacctatgaatgtaaacctcccatgcaagcctgagcactcaccatgctcaccacctgagctcaggtggggaacaagcgaatgagagacaggaccaggtactttctgggtgggacaagttgagagggtctgtgacaggtcacagcagcactagggagaagtgccccccccaccaaccctgatgtgatttgggtagggatggtgggccttcgccagccacacctgggccattctgtcttcttgccttcctggccttgccttcccctattccagctttctgccaggtaaacagtactttccagcactaccaaataaagatttaaggactgctagcccatttcctcttaccccggggaaagaaagtaggtccacaggaaggaaggctgcctccctccccttcttctatcccccaagtgaaagaggtggttggtggccacagcaggtgggcctggccaggatgcctgggttggcagtgaaggaagtagcatggcactcagctaaccttgggccagatgcagcaaggttgggactgaagaaaaggggagttcaggaacgtcggttcctctcctgttttctctcagcccatgggtgagaccctctgtcacactccactccctttcccctgccctaggtcagcagtcatttggaaagagcttgctctgccgccggccatagttgttgccggttcacctccccacccctctcccatcatcccctggtaaggctggctgagagaaattcccctgaaaacatttattttactcagtttattgataagtgataataaaagataagtattacatatttgtgtatttattaatggcccagagtagagcattcagatattttcccagtctgatatatggtttcaggtgagaaaataagggatttatatagtgacaatatttttaagtgaaaagtggaatacatagtcaaagaatttgggcactgccttggtggctggaggcaggtcagaaaatgtcagttggcatggtagaacttctaggatgctgaaatagtttgtggagacacaagtaagaattttttttttttttttttgagacggagtcttgctctgtcacctaggctggagtgcagtggcacgatctcggcttactacaagctccacctcccgggttcacatcattctcctgcctcagcctgccgagtagctgggactgcaggcgcccgccaccaggcctggctaattttttgtattttttagtagagatgggatttcaccatgttagccaggatggtcttgatctcctgacctcgtgatccgcccgcctcggactcccaaagtgctgggattacaggcgtgagccaccgcgcctggccgagaatattttaaactaccacacttaccatgcatgtggtaaactatcagtctgtatttatcagtgatggttatttcctaatacccaggaggcatccatgtgagccacccttccattgctttaagaccaagggagcgagtgaccagcaggattcaagatggcagctctgccgaggagtgggagtcccagctaacttctgctccctgctctcccaccaacagcctacaccgatttcttcctcccgctgctaagccgctgtccctccgccatgggaataaagaataaggatggggagacccctggccaaattttgggctggggacccccctgggattctgctgaagaggaggaagaagatgatgcctccaaggagcgggaatggagacagaagctccagggtgagctggaggacgagtggcaggaagtcatggggaggtttgaaggtgagaagtccactgctatccacagctgcccttccccactggctgctttccatctgcatgaatgcgtcacactaggctcctctgccccctcctctgtgcttccctgcttcttggggcccatcaccttctcacagcctctctccaactacccccatcccaccctcccaaacaggtgatgcctcccatgaaacccaggaacctgagtccttctcagcctggtcagatcgcctggcccgggaacatgcccagaagtgccagcagcagcagcgagaagcagagggatcctgtcgacccccacgtgctgagggctccagccagagctggcgacagcaggaggaggagcagcggctcttcagggagcgagcccgggccaaggaggaagagctgcgtgagagccgagccaggagggcgcaggaggctctaggggaccgagaacccaagccaaccagggccgggcccagggaagagcaccccagaggagcggggaggggcagcctctggcgatttggtgatgtgccctggccctgccctgggggaggggacccagaggccatggctgcagccctggtggccaggggcccccctttggaggaacagggggctctgaggaggtacttgagggtccagcaggtccgctggcaccctgaccgcttcctgcagcgattccgaagccagattgagacctgggagctgggccgtgtgatgggagcagtgacagccctttctcaggccctgaatcgccatgcagaggccctcaagtgaccctagggaagaagcaagaaacttcggggctgcagcctcaggatgaggcagaaggaagggtaagggaaaggatggggaccacaaggaagagccaggtgctgctcagcagaggatatgggtgggagcgaaagttgtaacaagtgggggtggggggtgcgggccgccaccactgctccttgactctgccgtttcctaataagacctggttccacatctcactcccagtgtctcctctgtctttttccattgctgtggttttcatcacccatgacatctcctttcccgccccgcctgctgaaacccacagctcccacacacctgcaacacacacgcacacgctaacacgggctctgagctggaggcaagaagcctctgcatgccccctcagttcagccctaagaaggcccagtttgccatccagtctcactccactccctacactggggtcttgtccaccctgcaatctgtggctggagaaatagatgcgaacagaggcaaaaaggggaacaaaaccagtttccctcccctccctggctccccaagctgaaccacatcctcctccccacttaacacccccttcccccaacacagggctttccctttgctgagtcactgaatgagcgagttgggggtagccggcgctggggggccatgaggaggctgggggaggatggggaatacaagcagaatggctggaggaagagccctgtgggggagtggaatttcagttgctaaaattaggagcaggggaaggaggtggaaagagcaaaattatgtaacatgggttgtctgttcttgggcaactggagctccacacccaaagccagccaggctgctggctccatccatctctgccctctagcttgtcagttgtatctctcttcctccagggccccaatcctcatctccgccattcagctgctgccccatcctaaacctgagttcatctctgggcagcccaggcatggccttccctataaacatttccttttccaagaaccagtagttgaagtcctgagaggtggagggagagtctgggattcccacggaggagagaggggggctccctggaaactaagataggtagaccccactaccatcgcccaggacacaactgggaacttggcaaaaagaaaggacagggctgcaaggagagtacagacatgtgctggtgagtgcactgtctgcatagttacaccagagcatcttatcaatcagaaacttatctttcaggttttgagcccagttctctacaggagaatcccaggagtggaagtggaaggcagtagaagacagggagggcacgcctctgggaacacgggaacatgggtgggcatgagatccttgaataagacagcctgaagttcggaagagaccaaggcctctgaaggaccaggcagatgttcagggtgcaggagggggaagggctggtgagaaagatcctgtgagaggaagctgctgtgattcagagaagagacttcaagctgtgtgtgaccctggcgtccggttcctctcacaggctggagcttttcggaagtggcatgcaaagagtccaggtttggccttggggggagttggggttaggatccctaagctggaggttgagaagtaaattacagaaaactctggtgaccaaatttgctcctccacccaggagatttctcactggtttttaagcacatcatttccccttctgcaagagttacataaaaccaaagcaaaataagccctgaaacctgggcccaccggaccacagtcttttcaacgtcccttcctggtgtctggcccccagccctggtgggggttcccctgagataagggctgttcactttctctgaccacatggtttccgcttctgtgtctcttgtttcctaggctgataaaaatactgagccctagaggccctggcttcctctgaccccttggggcaggcagcaggcatcctgtccagcatggtgggggcagggacaggggccagggattcccaaggggtgactcagtgcctgccatgaaacagtgggtaggtggaagtgtatctctgctctctagagctggcaccaggagttgagtctcagtggaggatgcattgggattcaattggaggaacaggcctggaaaagaataatgagattgaagagggtcagtttgaggactcaggttggggcaggtttggattaagttaggaaaaggatctgggagggactctgttcagtgtaggtcaactgagcattatgtagcccaaagataaatttaaaccctgcttcaagcttacaatctagtggggaggcagacccatacctaattaactgattcaaggcatgatgagtaaactttaagatgattacagaaagaggggagattaagtccatttgaaagcatccagggagcctctgaggagacagcatttgaacttgctctaatgaatgggttcactaggtggaggtggatggaaaggttccataggcgaataacacgtcttgagcgagcctgacaagtcagaaaatgcagtatgttctgggaaaggagcgtcctgagggagaagaagcacaggtgtgagggaacatgtgatgaagaaaggaccacagaaagtcaaggtcagagattggactgcatcctgtgggcagtggtccaggtgacgatgaaaaagagggagaacaggtgagtgctgcagtacagacaaggagtaagaaaacggccatcatcttgtgaattaatacctactgtgtgttaaccagcccttttcctaacaccacaaatcctctcaacgtctgtccaaaaggtgggtggtggtggccaggcacctcactcctgtaatcacagcactttgggaggccaaggtgggagcactttgggaggatcacttgaggccaggagttcgagaccagcctggccaacatggtgaaaccccgtctctactaaaaatataaaaactagctgggtgtggtgttgggcacctgtaatcccagctactcaggtgtctgaggcacaagaatcacttgaacccgggaggcagaggttgcagtgagctgagatcatgcctctgctctccagtctgggtgacagagcaagactctgtatccaaaaaaaaaaaaaattattaagcacctattaggagcagggcactgcttgacaataggtataaataataaagtcactgccttcatagaacttgcagtctaatgagacagtatacaaataataactatacattatagttataatgtataggtatgcctgcttagggtaataaagtgctcaatgaaggtttgaggtaccagcatgactctcaggtggagatttccagaaagcaggtctggagctcaagagaagttgggtctggaggaacagatttgggcatcattcccttcccagtagaggttgagcctttgagtggacaggatcttcaagggagggggcggagtgaccagaagagccctgagcatgatcaaaggaagagaaccaataaaggagaggttggggagcagtcagagaagcagggcacggggggcgggggatgccaagcagagacagggcagccatgtttgaggcttcaaagaggtctagtaaatgagggttgaaaagattgttgggttcaggaactagacgattacaaattttgagaaaaccgtttccatttaatagaggggcagaaatcactttacataggttgaggaatgagtgggaggtgaggaaaaggaggtggtgggcatgaggtcagaatggtgaacacagaataactgagaatcatctcttagttctacccacagattttacagttgagggaaattttaccagttcctgaaaaagtggttcgttaagggggctagtcttttgagacatcacacgaaaacggaaggtgagatagactggacatttgagggagaaatattaccaaggaaggatcactacttc

SEQ ID NO: 131 - DNA, 1459 bp, Homo sapiens
ccgagcttcttaaacacaggccttgggctacggctctgggggtacttgggggggcgggggcaggtctgatgagtaacccctccccccaggttccagaggaagaagcctccacatctgtctgccggcccaagagttccatggcctccacttcccgccgccaacgccgagaacgtcgctttcgtcgttacttgtctgcaggacggctggtccgggcccaggccctcctccagcgacacccaggcctcgatgtagatgctgggcagcccccaccactgcaccgggcctgtgcccgccacgatgcccctgccctgtgcctgctgcttcggctcggggctgaccctgcccaccaggaccgccatggggacacggcactgcatgctgctgcccgccagggcccagatgcctacaccgatttcttcctcccgctgctaagccgctgtccctctgccatgggaataaagaataaggatggggagacccctggccaaattttgggctggggacccccctgggattctgctgaagaggaggaagaagatgatgcctccaaggagcgggaatggagacagaagctccagggtgagctggaggacgagtggcaggaagtcatggggaggtttgaaggtgatgcctcccatgaaacccaggaacctgagtccttctcagcctggtcagatcgcctggcccgggaacatgcccagaagtgccagcagcagcagcgagaagcagagggatcctgtcgacccccacgtgctgagggctccagccagagctggcgacacgaggaggaggagcagcggctcttcagggagcgagcccgggccaaggaggaagagctgcgtgagagccgagccaggagggcgcaggaggctctaggggaccgagaacccaagccaaccagggccgggcccagggaagagcaccccagaggagcggggaggggcagcctctggcgatttggtgatgtgccctggccctgccctgggggaggggacccagaggccatggctgcagccctggtggccaggggcccccctttggaggaacagggggctctgaggaggtacttgagggtccagcaggtccgctggcaccctgaccgcttcctgcagcgattccgaagccagattgagacctgggagctgggccgtgtgatgggagcagtgacagccctttctcaggccctgaatcgccatgcagaggccctcaagtgaccctagggaagaagcaagaaacttcggggctgcagcctcaggatgaggcagaaggaagggtaagggaaaggatggggaccacaaggaagagccaggtgctgctcagcagaggatatgggtgggagcgaaagttgtaacaagtgggggtggggggtgcgggccgccaccactgctccttgactctgccgtttcctaataagacctggttccacatctcaaaaaaaaaaaaaaaaaaaaaaaaaaaa

SEQ ID NO: 132 - DNA, 1146 bp, Homo sapiens
atgagtaacccctccccccaggttccagaggaagaagcctccacatctgtctgccggcccaagagttccatggcctccacttcccgccgccaacgccgagaacgtcgctttcgtcgttacttgtctgcaggacggctggtccgggcccaggccctcctccagcgacacccaggcctcgatgtagatgctgggcagcccccaccactgcaccgggcctgtgcccgccacgatgcccctgccctgtgcctgctgcttcggctcggggctgaccctgcccaccaggaccgccatggggacacggcactgcatgctgctgcccgccagggcccagatgcctacaccgatttcttcctcccgctgctaagccgctgtccctctgccatgggaataaagaataaggatggggagacccctggccaaattttgggctggggacccccctgggattctgctgaagaggaggaagaagatgatgcctccaaggagcgggaatggagacagaagctccagggtgagctggaggacgagtggcaggaagtcatggggaggtttgaaggtgatgcctcccatgaaacccaggaacctgagtccttctcagcctggtcagatcgcctggcccgggaacatgcccagaagtgccagcagcagcagcgagaagcagagggatcctgtcgacccccacgtgctgagggctccagccagagctggcgacacgaggaggaggagcagcggctcttcagggagcgagcccgggccaaggaggaagagctgcgtgagagccgagccaggagggcgcaggaggctctaggggaccgagaacccaagccaaccagggccgggcccagggaagagcaccccagaggagcggggaggggcagcctctggcgatttggtgatgtgccctggccctgccctgggggaggggacccagaggccatggctgcagccctggtggccaggggcccccctttggaggaacagggggctctgaggaggtacttgagggtccagcaggtccgctggcaccctgaccgcttcctgcagcgattccgaagccagattgagacctgggagctgggccgtgtgatgggagcagtgacagccctttctcaggccctgaatcgccatgcagaggccctcaagtga

SEQ ID NO: 133 - DNA, 47115 bp, Mus musculus
  misc_feature (1171)..(1270): "n" at positions 1171 to 1270  can be any base
  misc_feature (28066)..(28402): "n" at positions 28066 to 28402  can be any base
  misc_feature (34855)..(34891): "n" at positions 34855 to 34891  can be any base
  misc_feature (37116)..(37389): "n" at positions 37116 to 37389  can be any base
  misc_feature (43130)..(44280): "n" at positions 43130 to 44280  can be any base
gctctgtacaaggtcattttccagacaaggccagccacctgtgttcagggacactctccagacagagacagggaagccccactaagaaagggagaccccattttgctctatctggtcttggtggactgctaccatcatagcgaggttctccaacagctttcctgctcagtcacatatactcagatgtcaccggcttttctcagaccacattgcaagggaacccatctgtgtatctgacttcgttcttcatggactgtagctgcctatggatggggcagtcctgacgtctatccttggagtcccagaacctggtactagacacgtgcctaatgaatccttgttctgggaatgtccttagtgagtcatgacagtgggcactgtactcatgctgggtgcctagggattgggatgcccgtgagggcttcagcgtaacagccacacataggtgatgccacatagtgtgcaggctttcgtcacgtgagcaagccgaggaagcagagcagtatagaggctcacggggaggccttgctcatgtatatcactcaccacatggctcttttacttgtacctggaggagattatcttacagagagcctgtccctgggtcctcagcaagaggagtatgtcctctcagtttctgagtcatctctctagctctaagatctcatccctaatgcaaatcctgtctacaaaagatgatgggctctgtctgagttcttcttctgtttcttttttggactagcccaaaccacagctcaactttgtctatgctttctttcattaaactgacaaatttttaaaaaaatcatgtatggtaggtctctatgttgatcagcctggtctacaaaggaggttctaagttagatggggctagaaccatatatatatgtatatatatgtgtgtgtgtgtgtgtgtgtgtgtgtatgtatatatgtatgtatcacatatatatcataacatgatatatgtgatatatgtatatatgatatatgtgtgtatatatgatatatataatccttatacaaatatcaatatctaatttgtaaatttcctttttacagaaaaagggtttataaacgctaccagctcgcaagaagagtatgaaattgacccgtacgaaaagttctgcttctcagtcaggtttaaagcgtacccacgaatccgatgcannnnnnnnnnnnnnnnnnnnnnnnnnnnnnnnnnnnnnnnnnnnnnnnnnnnnnnnnnnnnnnnnnnnnnnnnnnnnnnnnnnnnnnnnnnnnnnnnnnncaattccccggcccccatccccggtatcgagcacctctgtccccgagctatagacttagccccctcagtctgtgagttgatttattgttgagtcagaaaactgaagactgaaagcaaaccgcacctgtgaggagagccacttttccttctcttccgggactaaagcctgctgcatgaaaacagaatcctggcagttttctgtcaagagactgtggtttcctgtctaagtgctgcgctctgacagtaccgggcggctaagtgcggttgtgagtgatgggggagtcggacctccttgccaactgaaaacatctgccctaggtgtactgatttatgttctcaaacacaaatgcagaaatagcccgagcataagtcacaaaagaggatctccttctcctgggggtttgttcaactctggtctagagtgttctggaggcgaacgtctcattccttctttgaaaagcaaaagcctgctttccccggtttcttctgttaactatggtgcctcttctgtctttctctcctttacagattttagttttagccatgtgtatgtgggtgacagtctgtgtgtgtgtgactgcggtgtccctggaggccagaggcttgggattcccctggagttggagtcacagtggctgtgagctgtcccacgtgggtactgggaacccagctcaagtcctctgcaacggcactgtgggtttgctcttattcgctgcaccaaatctgcagcacagctcatggagaaacactgtctcaacaacaacaacaacagacagacaaaaaaccaaacacacaaaacaggaatgtagaacatctcattaataattttcacactgaggctatgcttcaatgattgtttgaggtatgagagttacagagatcaacgaatgcactcagctttcccctctctttacttcatatacatatctgcaggggacttaaaaggaaaacgaggcagctgtctgttgctctggtcactgtgacaagagctgacctctttctaccctctacgctgctcctagtgtttctttcatgatagtatgcttttttttaaaaaattcccataagtgatttataattggtctttgagaaagtgtgtgtgtgtgtgtgtgtgcacatctatctgtatctctctctctgtatgtctgtgtttattctctctctctctctctctctctctctctctgtgtgtgtgtgtgtgtgtgtgtgtgtgtgtgtgtgtgtgtgtgtgtgtaggatggattccctggatggaactggacttataggcagttgtgaaccacctcatgtaggtgctaggaatcgaactcaggtcttctggaagagcaatgcttgctttaaacccctgagttctctctctacctctaaatttgcctaggggggtaggggtgtcttgtggggtgtatatgtgtgtgtgtgtgtgtgtgtgtgtgtgtgtgtgtgtgtgtgcgcgcgcgcgcgcacccatgtgcagaggccagatcaacatcctctgttgtgctccactgttttttaaaacaatacttcatgtaatgcttatgagtgttttgcctgcatgtctatctatgcacgtgtgtctgctggggcatcaggtcacttggaaatggagttatgggtggttgtaagccaccatgtggatcctacgaatcatgcttttaacctctgactcatctttctaaccctctcaactatttttttttttttgagacagactctctcattgaacttggatcttaccattttggctagactggctgacctccataccccagcactaaggctacagagcacgcactaaggctactgcactcaacttttacatggtggggatctgaattcagattctccggctatactacaagctttatatacagagccaccctctctgcttcctatttgtattatttatttatttatttatttatttatttatttatttatttatttattggtggggagaaggggacagtttgagaaagggtttctttctctctgtatccctggctgtcctggaacttattatgtagacccgactggaccttacactcactgagatcttcctgcctctgcttcctgagtgcatcaagctatgcaccaccaccacaccaggctcgcataagctcttatccagaacttgaattccagaaggagaagacagggaggaacggatgaccatggagcctgttttcaggatagctggcttgctggcccctctgtggtcgtgtgagagctaacacagccttagggactcctgctgcattccaggatggttgtgaacctgactcaggtgaaggaggggataaacctggtttaaccaatggtaaggtcgcgatgcagcaacacatttaatcctagcagtccaggggcagaggtggctcatctttgagttctaggccagcctaggctacacagtgagttctaggccagcctggactatacagcaaagggccatgtgaatgggtaagaagctgccattttccttctctcccagaggatgcatattgtcactgtgtaacctggtgacacacagcagaccctcttggggtatcacggagctgtgtctgccatgcatgcatcaggagctgggctaggtagccgcatttcatcctgaggctccaacctacaagcctgaactccagacacgtcccatcccagctagagccgtcctgtgtccctttcatttccagtcacctgagagcagcttcccagatgtgacatctcagctctgagtttagaacctccataaagatggccaggctgtcatctctctagctccgtcccgtgcctcatacaggaaatgtgtgtgtgaaccaggaaacggactcactgccactcctggacatgacttcttggagaaagctgtgcctgtgttgtcttgcgtacagcacacatggcgcccagtgcttggcgtgagattctctgaaggttcccagagaataaaaaacatggcagcaaggaagcctgaggtaaagcagtcagcgctgaacaatgtttttccgtgttctatgatccttctctctgctgtgtaggctctggttgaggtgagaggtaactcaagctctattcaactttaatggtggaaagtttcaaatttgctaatacaccaaaggaactggcatccactcactctcactccagtccaaagatttacttattactatatgtaagtacactatacctgtcttcagacacaccagaagagggcatcagatctcattagggatggttttgaaccaccatgtggttgctgggatttgaactcaggactttcggaagagccatcagtgctcttaaccgcggagccacctctccagcccaggagctggcatccttagctccccactagattctgcagttctgttgccctgagttgggatggtagaggatcgagatcatgttttgagagctgacctgagtggcgggagagttgctggtttgttggttttttgtttttttttaatctgtgtagtagctgaactactgcagaagccccgatgcggtcgtggcacacgccagaagtctctcggcttcccgaccatcaaagcttcatttctgcaatttacttcctcaaatcacaccctgaggctccctggggcttgcctttccgtgtttgtgtctggtttccagctgcctggagcccttttacttctgaaaaagagactgaaggagattcaccccttactttgggggcgaattctgtagactcaccgataaatactgaatccgcattagtgtcgtggtagaaaaagtatgagcatggcataacttttccctggagctatttcatcctgtcttccacgtatctcagtccattctgtcccctctgagctcccactgggtgtttccaaagtgaaacaggggctctttcctgtgttcgcagtctggaggacctgctaggggcctgctcaggacaagagtggccacatagaagctcctgaacaggacctgtggcagagctgacatttttgtttttaatggaatggggcttgagggtaggagagctgtgagcctgagtatatacaaaaaggaaggggaagatgtttgtctctagagcaacaccaagaacccaactaaatctgttttccctttattcatgctgcctgtaaccgtgctgcctgtaaccgtgctgcctgtaaccgtgctgcctgtaacggtggccccggcccttcctttctggggccacacagcgagaccctgtcttaaacatatgtagtaaagtgtatttactgtatggttatattgttatatcttagttaccattttttaaagatttatgtattttatttatatgagtacactgtagctatcatcagagggtttcagagcccactgcagatggttgtgagccaccatggggttgctgggaattgaactcaggacctctggaagagcagtccatgctcttttttttttttttttttttttaacatctgccactcttttttttttttttttttagatttatttatttattatatgtaagtacactgtagctgtcttcagacactccagaagagggcgtcagatcttgttacagatggttgtgagccaccatgtggttgctgggatttgaactctggaccttcggaagagcagtcgggtgctcttacccactgagccatctcaccagcccccagtccatgctcttaaccactgagccatctctccagccccttagttataattttggtagctatatagtgttaaaggttttaaaagttgaaacagggtctcactgtacaagcactgggtagcctggaactggagacatagatcagactggcctcaaactcacagaaatgaccacctacctggccctccatctgacactctttatgaatcataagctgattccagagcccttagccaaggttggccttttttaactcctccccctgggagctaaatacaaggaaggagaaagtgacctgatggtagagaggccctcttcctaattgtaatgacactgcattgtctcggtctccaaagatatgtcactggcaactcaaatttcctgatgccaagtgggaaaggggaggtgggggaacctgaaagaaaggaggctctgagctgcctggtacctgacggtccctctccttgctgctggggtcatattcatgggagaaagcgaggtgtggtggcacagacctgtcactctagaacactggaggctgaaggcagggcaaatgcaggtctgaggcctgccaaggtcagacagacaaaagaaagtggtaaatctgtctggacatttggttctgtgtcccgccaagttatgtgatcgatatcctgacctcagggggctctgtctgtctgaggcgaggcacaccctgtggagacgacagcgccatggacagaaaagacaaatcatcatgcagtcctgggctttgttccacacaacacacacacacacacacacacacacacacacacacacacacacacacacacacctattgtgtggtcattagtttctctcccaagttgagtggaactctgagcatggtccttggccaactatgtcagtcacccagtccctctcccctcccggtctccatcactgtctctgactccttctctccctctgtttgacataggcgaggctcattaggtgagccacattggccttgcactctctttttaaaggatttatctatttttatttgctgtgtattagtgtttgcctgaatgtatgggttctgtgtccatgtgcacacccggtgcccatggaggccagaagagggcattggatgccctgacggagtaggtgcgagccacccaccatgtgggtgctgggaactgaacctggatcctctagaagagcagctagcactcttaactgctgatcttgaccttgaactctctcttaaccctcccatttctgcctgcagagcactgaggttagaggcataggcatgtgcctgtgccctcagctgcctaccaagcccccccagtccctggttggcctttggggttctcccacaatctttccaccatttcatccctgccccccaacccccgccacatttcttccttgtctagaaggccaggatagaaaatggggaatagggctggagaaatggctcagtggttaagagcactgactgttctttcaaaggtcctgagttcaattcccagcaaccacatgatggctcacaaccatctgtaatgggatctgatgccctcttctggtgtgtctgaagacagcgacaatgtattcatatatgtgtgtgtgtatatatatgtatgtatatatatatatatatatatatatatatatatatatatatatatatctttaaaaaagaataatttatgatattgagccgggcatggtggcgcatgtctttaatcccagcacttgggaggcagaggcaggcggatttctgagttcgagaccagcctggtctacaaagtgagttccaggacagccagggctatacagagaaaccctgtctcgaaaacaaaaacaaaaaaaaaaagaaagaaagaaaatggggagtagtgatgtaggtcagatggtaaggtgcttgcctcactcctacagagccctggttcaccctgcttccacaaaaccagatcactcagaaggcagaagcaggagttcaaagccatcttgtagcaagttcaaggccagtctgagatgccagagactctctcttttacaaaagatactgggcatagtggcacattgagtccagcctggtttacagagtgagtttcaggacagccagagctacattgagaaactctgtctcgaaaaactcttccttctcctaattctaggccactcagggctacaagagaccctgtctcctcccctagccgcaccccctgcagaaaaagaaagaaaagaaaaggggtaagaactggaaaaaaaaatgtatgcaattctcagcctttaattgccgaaagcactttattttcctttgggtgttcctggggattgaattcagggcagtggacatggcaggcaagcattctagtgcacgcttcacctgcagaccaatggctggagggctccctcctgggaggctcaaagagtgacttccttctcattagccgaccaggagcatctgactaagagatgggccgcttagagcgctggtgcccaggcacccctggctcagagctccatctgtccaggtgtatcttggggccaacagggagcctgcagctgccttattgcatatgcacaccagcacctgcaagtctgtttagctcagggcctcttctgtgtgtcctttcctgcctttccctctgtaggaacattctctgaaacctcaaattccaactttaattctttagggatggcacttcccacaccctagcatatctgctctgtttcccgtccctttacgtgctttagagacggtagctactcgtgtaccccagcccagcctcgaacctatgatcttcccgcctcaacctcgcaagcgctgagacgcaggcgtacatcaccatgcccacttcccataactgtgtctgcttctaacatcacgctgtgaattttaggatcaagaaaacactctgtcttcagatctgctgcaggagatttgattcttcccgcggtcaggtctccggtggctgaatgaactcatgggctcctagactgtcactaccatctctagacttccggccaataacgtctcccactaggatcaggtcgatctaaatgttgtacatgctatggattttgttttcaaacgtccagtgaaaatgtcgttttcacctctgaatattctaggccatttttcaagggtcctaaccaatggaccccatcctacctcttagccctctttgcccagacaccccagcgcctcctcctgtttcagtcaggaggcccaatttctcttccatgccctgtgaccttcccgtcctcaggattctggtggcatctccttagcgctctcctttttgcactcgtagcaaatgggactcccgccttgcctctgagaaatccacagaactttctacgccgcctctgcctctctttggcagctgaacgccttcgacttgaagctttaactgcttcttttgtggggttccacagctcacttgggctgtggtctttttgaagccgaggagaatagctaggccctcacacactgacacctcgttgctgcgtggagccaggagtgactgcaagcctgtctggcaaggccttgtgggaagtcagtggatggatgaatgtgccaggggattctgggatgccccacttcctgtctttcgcttccctgctacatcttgtagtctggccatgtcgtaccccctcaccagccccagagcaacagggacaaccaacagtgggttgaagttgtgtgctccaatcagatttctctctctctgagttgacttatttcagccctctgttatggtgacagaaggcatcaggggagggggacaaattagaacaaagataatgatgatgtatgaaaatgctgtaactaagcccattaatttgtacttttaaaaataagatttatttatttcatatatgtgaatacactgttgctgtcttcagacacaccagaagaggttgtcaatcccattacagatggtcgtgagccaccatgtggttgttgggaattgaactcaggacctctggaagagcagtcagtgctcttaacctctgagtcctaatttgtactttttttaaatttttatatcctgttcttcacagtagcctctcctggaagcaccaagctgagttcttctttaattctttctcaaacagcatatctaaattttgcgatcataagaacaagccaggagagtacatattctatgcagaaaatgatgacgcccagttcaccaaaatgttcacgctgaatataagaagtaagttgaatctcatcttgtctattttattcctccattaatttttaattaagaagagccaaacacagcttaggagggacgatatcaaactaatttaaaaaaaaaaaaaaaggattatttgcatgtatatgagtgttttgtaagtggtatgtatgtctctggcccacatgcatgcagtgcccacaaaggccacaagagggcgtctgatccccttggaacttgagttacagatggttgtgagccatgatgtgggtgttgggaacccagttcctctgcaatcacaaccagtgatcctaacctctgagccatctctccagcctctgaaactgctcttgtaagcgccatgcttcttgtgtgttggctgtagttatatatgtccctttctatacttgttctctgagctagtacatgttccatctccgatgtgctgtgactttactgccttggcgctatgaaaggaacactaaggaaaggctatacagtcacctgctacttatttcttttaatgattttcgtcttggtctatgcaaaataagaaaaagacactatatttcattaaggtttttgcagattttttttacctgcattttttttttttacttgcatgtatgtctgtgtgaaggtgccagatattggagttacagacagctataagctgccatgtcgatgctgggaattgaacccaggtcctctgggtggtatttttaaagctaagtgttacattgaggtttgcagatagatggaggttctacacttcagctccctctaggaggtgagtcatagagaggtgttgcctccaccagtcaagaaagttttgtgacagaggaggaagggaccaaacaaactttgaggcatcctaaataaggggttgttccaggggtacatagcacctgggctaaagaagcagcctaagttgaagctagctctgaactgattctagaaaaaaaaaaaaaaatctatcttccatgagcttactgcgcgctactttctacagagaaacctcaagtgctagcaaatgcctcagccagccaggcgtcctgttcctctgatggctacccgctaccctcttggacctggaagaagtgttcggacaaatctcccaagtaatgagaaccctgacgtctcttgaagtggatgagccaagccgggcagtggtggcgcatgcctgtgatcccagcactcgggaggctgaggcaggaggatcttagagtttgaggccagccttggggaacacagtgaggccctttctcaaaaaacaagaaggaaaaaaaggaaagaagggaaggaaggagggagggagggagggcaagaggggcaagggaaaggagaaagaaaaagaaaggaagaagaaaagtgagaataaggcataagattctatcacctgttgccatggatacagcttaagaatgacattgaaaatgcttaccctacagccacagcttgttttctttgggaaccatctgtagaaaccctgccttcctgtcctaccatgaccccacccatctaacttcctgtcctaccatgaccccgcccatctaacaatccctttccaccattttttttttcttttcagttgcacggaggaaatcccagaaggagtttggaataaaaaggctaacagaaaagtgtttggccagtgggtgtcgagcagtactctaaatatgagtgaggccgggaaagggcttctggtcaaatgctgtgcgtacaattctatgggcacgtcttgcgaaaccatctttttaaactcaccaggtgtgcagccatttgctgttgtgataaacacaccctgtccccagaaattcccccacctgaagttgggcattgtggctggcctttgctggggaattcttatgagattgcccagttctgagtgagcataaggtctttttgagtcaagcaagaatccccagcagactgtaatttgacgtttcaggacccagttatccttaggctgtgtgactcacaggtcacggagctgtggagtctgggaaatccatggtgtgaagattagcctccagaggtgcaggaaagcagacttagtgatctggaatttctgtccttttccattctgtcagttcccttatttactttgagccggctagtctagattttggagttgtgtttagagtctttctaaaatgacactaacagtttagggtcaccagatagtattgattaactccagggacaaaagcaagaggctcctaagttcacgttcagcctgggctccatagtaagacgctgtctcagaaaaatgccaaacaaagcaagcacgtaagtcaaaattgtggctttggtctcagtagttaagaacacaggctgctcttgcagaggacctgggtttaattcccagtacccacatggtggctcatagccatctgtagctttagctccagctctggggggtgggggggaccttaacgccctcttctggcctctgagggctccaggcatgtacatggtacacaaacacacatgcaggctagcagtcatacacataacttctctacatgtgtgtgacgaaccttgataacaaatacacagacttctttttacctgacacgggctctgtaaaaggtttatatgggctttattcacgtgacatcatggtccagtttttaagatgggttcagaatcgtttctgatttttctggggactcattgtttacagaaacaaaccaactttctgtggggcacccagacagaacacacagattgctcataaggcctgaagatggtggttacttgaacaggatgtgagagactctaacaagagacttaaacaggcctgcctgttttatctcgcccccgcctagtgattgcttctcttgcaggccccttccctttcatccaagacaacatctccttctatgcgaccattgggctctgtctccccttcattgttgttctcattgtgttgatctgccacaaatacaaaaaggtaaaaaccggttggcgaaggctcatccctgtcgtgactctgcagcgctgctgacccgctgttcatctctcaagcaatttaggtacgagagtcagctgcagatgatccaggtgactggccccctggataacgagtacttctacgttgacttcagggactatgaatatgaccttaagtgggagttcccgagagagaacttagagtttggtaaggattgactgttcagagcttcggtggcattgcctctgccttgcaaacatttttttaacccgcacttactccatctttacagggaaggtcctggggtctggcgctttcgggagggtgatgaacgccacggcctatggcattagtaaaacgggagtctcaattcaggtggcggtgaagatgctaaaaggtaccaaaaggtggggttatctcagcaaagtccctcagagaacgagtccagctgcctcccctccccttcttctgccctctgcattattctgtctgctaagcactgagggttaacgagaagcaggcaggggcagtcgtgagcaaagactgcaagcagggaaggcaagcccccaccccttcctctttctcattgttcagttggtatcagcttctgtgttacagtttgacacagattctgggtagaaaacacaccggggacttctcacttcccactctgtcccatcctctcccatctggcatccaccctcgagcagggccaccctcagccgattcttaacccagcgcagaggattgaatccaggattttgtgaacgctaggcaagtcctctacctcagaaatacatccccagcctgtcattctataacacgatgtcttgctatataggtcaggcaggccttgaactcacaacttcaagaatgctgagatgtatcatcccctcgggactgatggcccattcttttgctgaggtgttccctgtaaggataaagggagcccctctctccaaacacacacacacacacacacacacacacacacacacacacacacacacacacactacagagagagtgacagagacagagagagagagacagagacagagagagaggcagagagagacagagacagagagtcactgaagtgcattgcagtacgcagaccaaaaggagaaatggcacacaggacatcatggacagaaatctcacagtcacctcctagccaggtgactgatgatgctatacatcctgggttacagaaagaaacggaagctggaactgttagaggatagctttaggatacatacatttgccgggcggtggtggtgcacacctttaatcccagcacttgggaggcagaggcaggtggatttctgagttcgaggccagcctggtctacagagtgagttccaggacagccaggactatactgagaaaccctgtctcaaaaaaacaaaacaaaacaaaacaaaacaggatacatacattttctgtagatcaaattcaggatgtgaaaagggatagactttcccctctgatatctgcaaggtacaaaaccttgaagcaatgtcagaacacgatcacttgttacatccggggaacagatatgaaggtttctttttacactgtttttcttcacccgtacatcctagttccacagaataaggagtgtcgtcgctgtggtattcccatatgtatactttggtccagttcactagcaccgttccccctcccctcgtcaattctcttcctgtcggtccatttcttcttctcaaatagctcccccctctacttccgtgccttttccttttaatctcgatcctacatatgagagatgatgcactgcttgtcttcctgagtttggcttttttacttaacatcccagtgtctggttccatccatcttcctgcaggtggcccatcccgttcttcgcagccaaatacaccacttcctatggatcgtatttccaacatccatccatccatctgtggcaggcccctaggctggttagatagcatgttgattgtaatagtgccaacatcgacttcctgtgtggagttccttatgcctccactcgctccacgcactcaccaaggacccccctctataacccagcttcatctcctgtaccaatagctctcataactggttccctaagccttggctttgtgtgcccaaatacttgtatctcagcactgttcatccaggctgaagtcctccaaccctggcctccatctctactccagcctggtaattactggaacgtttcagtgagactacacattccacacaaccatagaaacaaggaagcgggttccatagctggctctctctcagccttccccaacaggtttcctgcacagtgtctgctgggcccatcctcatctctccgtggtctctgtggtggtccagttctgtctctcctagagactcttaatggtagcttttaaaaagcatcccaccgattctgctaggggctatgtgctgaggtggggcatggccacgatgcagaacaccttcttgcttggcactgccctaagcattgacaatggctttctactgctctgaaaatggttcccacaggggctggagagatggctcagtcagtggttaagagcactgactgctcttctgaaggtcctgagttcaaatcccagcaaccacatggtggctcacaaccatctataatgagatctgaatccctctcctggtgcgtctgaagacagctacagtgtactcacatataataaataaataaatcttaaaagaagaaagaaaaaagaaagaaaagaaaatggttcccacaactttgagcagtgcagccgtggctcagcctttccgcctcattcttaaccttctttcggttccccagagtgcctcgtttccctgcccacaggctttgcgcaggtgaatccttccacctgctcttccccttttgctgtaggaagccacttacctctcaaatgtcagctttgagatcacttcctcagggacacctcctttcacgccatggacaagatcaagtccctggggaccgtgggtgttctaagtggtacaagacatactcagcatgcttgaggccctgagacgaattctaacattaaaaatatagtacgtcctaagaacactatgtagacttctcccagaatcggagactctaacacagttgcgtttagggattcagttaggttctaagccctctgaaagcggcatgtggcttttcccgtgctgttgttacttaatactgtgtattctgctgcctccgcctgcggtggtcttgtgtgactcctttcggttccccactgagggagaactacagggtcctgctttttcgggctgtctggtgtcccccctagagttcccccacaggactttcactgtctctctctcatcttgtgtggtcatccctcagtttctgcaggaagttggttgcacagtcccctttgcagacgccagggtcccagacgatcaggtcccttctataacacaacagtatgtgcatagaaccaggagtccctggaacagagaccccaaagaaaggtgttacccttgtccccgaggccccaaaacccacggatgcaagggtgccccaggcagctatgctagcctcagtgaccagagccctgggagtaacaacccatgcttgcatcctagcaagatcgtggacacagtttgctccactggagagattgcattggttcatgtgttgtcttctttaactttcccccattgagcacacttaccaatggaagtttctagacctgaggagcaacttcatgttggagacatctgtgcttgctgaccctcctccttctggtcttcctatcagctgaataatctgatttttttttaactaggaaaatcacgttctgtttatcgtgttgtctacctgctttgagagctgggtggaaggacttttatttttctcagggaaagtcaagtagaaatgtatattcttgctgggcatggtggtgcataatttgatcccagctctcaggaagtagacgtaggcaggactcagtgaattcgaggccagcctaatctgcagggtgagttccaggccagccagcgctatatagtgagaccccgtctcgaggaaggaagagattatacattcatatagttaatatctataactcacgttttaaaacgctgtcttaaaacacagaacattattgtctaaatttatgtgttatttttgtgtcagtttttctcttccagttttgaatgtgtgtaagttgtgatctgaaccaaggagagccttggtttctaaaacagcatacagttccctgaggtcaatcctgtttctgctcctccaccaacagagaaagctgacagctgtgaaaaagaagctctcatgtcggagctcaaaatgatgacccacctgggacaccatgacaacatcgtgaatctgctgggggcatgcacactgtcaggtaatgtctacacatctgcatatcgaagccctgttccacactactgcagcccaagggagcgaggcctgcgctctttcctcagccccagtttgtagacgatgggtctgtttcttccttccagccccatgctcccagaaataagactcagactcaaaatatatttacaaataccttgaccatagagctaggctctcctttgactagataaaaacttaatataacccatttattctaatctacattctgccacctgtgctcgggtgccatgagcctgtctcgtctcgttttgtcacgtcttcctgggtgaatctcccaagcctggctctatcccagaatcctttctgtctcccagatgtcctacctcttatttcattcctaaaccataggccatcagacttatatgggcataagctattctcttcacaccagttcaagtggaattagacggtgtcccctctgcagagcacatgaccccgtctttcccctactctatctgtcacagagtcctaaccgcctgagagaaagcggccaccctgcacattcatgttgtggggtctgagctcctccctagactgtgaagctggcctaaatgcagtagtgacatcagcttcagaactcagcacacacatactgatatgttgatgatggtgaggtcagacgtttagaactggagagaaaggctagaagacagattcttgtatacagtgctgagatcgagtgtagtctaatgtacgagctcatttaaagcaccttctgagggcaaggagagcaggaaaggcccaggtcctgttgcgctacagtgtgattttggaggaaagacctgacctgtgtctaaacctgtaactacaattgtaactgtttcagggccagtgtctgcagtctgtctaaccttgtaactacaattgtaactgtttcagggccagtgtacttgatttttgaatattgttgctatggtgacctcctcaactacctaagaagtaaaagagagaagtttcacaggacatggacagagatttttaaggaacataatttcagtttttaccctactttccaggcacattcaaattccaggtaagagctccatcagaggtttatggctgtaaaccccgggacagacagaatgaccactgcacacacctacctgcaaccccacccgggcaacattcggagttgctgtgtgtggcctgagacctaaggcagctatttgtttatgctgggaatttctgtcccattatttcttattttacttaataaagtttcaattacccaccagaagacatggttcaaagatcctaaatagaaaagtccagaaataaacaatccttaagttttaagtacctttacaaacagcttattaattaacattatactatcttatcattggttattattgttcgtgtgttactatgcccaatttatttgtactttacttactattatatttcatttattatttattattgtgtgagtttgtagtgctagggggcaaacccagggctttatgaatgcttgacgcatcctccctctctgagctacatccctagtctgccatgcatgctctagaggaactatcctaacacagacgtgcgtagccaataattagatcctttggttcatttttggtcactgggctattaaataaactaaaagcattaagccttttttcaaagggaaggggagttgaaaactgggataaactcttatggtgggaaatactgagtcctgacctatttgtagtggtgcgggcctctctttgatgcgcttgaaaaggtaatctggccagacagtggtggtggtggcatggtgcacgcctttagtcctagcactcgggaggcagagacagatctctgtgagttcaaggccagcctggtctactgagagttccagagcagccagggatagacagagaaaccctgtctctaaaaaccagaccaaaacaaaacaaaaacaaacaaacgaaagaatgaaagaaagaaagaaagaaagaaagaaagaaagaaagaaagaacaagcaaaaggaaagacagaatctgttgcagctatttgcttatccctcagaggaggggaacgtggttcacagacgctggcttgaaaagatggcgctggaaatgtacaccttcccacgaggcagaaacctacacatcaaacacattgatgaaaagaatatcaaaactctaaatttgtaagctctgtgttgcatgaactctgaaaggtgaaatggcctgtgtctggagcagcaggatgccctgtaaattggttcctctctttataaacttgaggacatagtaatcatttactgccccagtttctgttttatgtacccagcttacagcgtgacagtgactgaatggcagctcttatccaggttggctcggcaaattccaacacacagatgtttttaatgtacacggggtaccgttgacaagccagcatcgtgctttctgtttaaaagcccatttgtaactgaaatctgttcctctgatgaattgtcctttttgtaataaagtgtctgctcagaggaacaatgtaaataacaaaggaacaaatttatttttaatagcatgcctggttcacgagaagttcagttacacccgcccttggatcagctctcagggttcaatgggaattcaattcattctgaaggtaatgttttacttttcattggtattttacactcactgaaatgaatccaagagtcccatgccagctatttttaaactttttaaaaaaattatgagtgtatgtgtgtatgtgcatacacgtgtgcatgcatggtgtgtatatgtgtgtgctgtgtgtatgtgtgtgttttatgtgtatatgtttatgtgtgctgtgtgtgtatgtgtgcatgctatatatacatatacatacatgtatatatatgtatatatatgtattgtatgcatgtatgtgtgctgtgaatgtttgtatttgtgtacatgtgtgtgtggtatgtgtgtgtatgtgtgtcgagtgtgtgtatatatatatgatgaatgtgtatgtaaggtttgtgtttatgtgtatatgtgtttttgtgtagggtgtgtgtttatatgtatgtatgtgtgtatatgtttgtatgtgtgtatatgtgtggaggatatgtgtatgtaagtatgtgtgtgtgtttgtgtatagagtatgtgtttatgtgtatgcgtgtgttgtatgtgtgtatgtgtgtgtttatgtgtatgtgtgtatatatgtgtggaatatgtgtatgtatgtgtgtgtttgtgtgtagggtatgtatgtatgtatgtttatgtgtatgtgtgtggtatgtatatatgtatatgtgtatgtttgtaggtgtatatatgtatgtgtgatatgtgtatgtatgtgtgtgtttgtatgtgtgatatatatatacacacatatacatatatatgtatatgtgggtttgtatgtgtgtatatgtgtgtgatatgtatatgatgtgtgtgtatttgtatgtgtgtggtgtatatatatatgtatatatgttttgtgatatgtgtatgtatgtgtgtgtttgtatattgtgatgtttaaagatatatatgtatatatgtatacgtgtgtgtctgtgtgtgtggtgtctatatatatatatttatttatatgtatatgtgtgtgtttgtatgtgtgtgatatgtgtacatatgtatgaatgtgtgtggtatatatatgtatgtgtgtatatatatatatgtgtgtgtgtgtgtgtgtgtgtgtttgtatgtgtgtggggtataagtatatatgtgtgtatgtgtttgtatgtgtatgaagtatatatatgtacatgtgtgtatttgtatatgtatggtatatgtgtgtgtatatatatgtgtgtgtgtgtgtgtgtgtgtgtgtgtgtgtgtgtgtttgtatgtgtatatgtgtgtgtgcttgtgtgtgggcatgatcgtgccgtggcacccatgaaggtcaactagtaagagctagtaccagggctcagtaccagggtgtcagcctgatggtagcttttctccagtgagccatggcagcagagtggaagcagtgtgtctttgctctggtcaaaggcagactctgtcagtgcacactttctcggaaagtcaaaagctgatagttgtgaactctgtgtccatggtcaacaacaggcacctgaactgttttgtttgttcggaatattctttataaagtcataagctaattggagccagcttgtacctggtaagactgtgagctctagaatcagagtttggttatgttccaactcttttcctttcgaaacagttggctccagacgagagtccccacttctcacttataaaattggtccaattctactttcctcataggactgttaggaggcatacacagaaggttgtgaagtataaagtacagtccatgaaatgtggtagacagttggtcagtctttgcttttttctactgacagatttacctagcatgaagggaaggagggataatgtttgggagttttgcttaccctctctgtctgtgcaccacctgggtgcagtgcccttggagacccagaagagggcactcgatgctctgagactggaattgtgagccaccatatgagttcagggaacagaacccaggtcctctgggagagcagccagtgctcttgaatcactgagtcccaagaaggattcataattagtattccttgtcttagctcagatggctttaacagattattaaagactgggtatcataagctacagtatttctcacagtttcagaggctactgctttcaaaactgaggtgcaggagacacttgcttctcacatgcacatggtgatctttctgggtcctcaggcctcacacagaggcaagagtacacgctttcttctctttaaaaaactttaaaaaaaaagtatttagtgtgtgtcttgtgggggagcaacttacaggaatccattctctccttccaccatgtgggttccagggattaaactcaggtctttcgcctctgtagaaacacctttacctgacaagccatcttgcccattctcctcttcctattttatagagttcatggtcccatttttataacctggccacttcacaaacaccctactcctgataccattgcttgagagttcgtttgcctgtatgtgtgtatgcatgtatgtatacacgtatgtatgtatgtatgtatgtatgtatgtatgtatgtatgtatgtacgcacgcatatatgtatgcatgcatgcatgcatgtatgtatgtatatgtgtatacatgcatgtatgtacatatgtatgtgcactgtatgtgcctggtacctttggaggccaaaagatagagtcacattctctggagctagcattgttacagacagttgtgagccatcatatgggtgctgggaaccaagcctgggttctctgtaagatcatccagtgttcttagctatggagccgtctctccagcccctggggatttgaacagggcttcattccagaaaacagaatgagtgttcaagtagactaagaggagacaggtttatagagacaaaaaaatgactaagggcaggaaaaaaagggaggcagagatcaggacaggaatgactgtgcacaactttaacccaagcatccaggcggcagagtgttagtctgtgagttcaaggtcagctaagtctacatagtacatttcgggacagccagggccacatgttgcttatgaggacaggctgatcattccaatcatttccccgggtttggagtcaggaaatggacaaggtggctagtagcttagccccaggctccccaggagaagctcttctgtaaggtttgaagcagaggccattccatcttcatgcccaggaacctggcctgcgcagaaggtttgatggttgcttcggatttctccgaaggtcaaataatcctttctctttgtatggcggaccttttgtctgggtgacgccattcgatttggtctattgagtctagagcaggagatcagatcaaacgcctcttataaatatctccacactgaggtcgccttagctgcctctcacagaggtctgatagggtactgcctagtgtctggggaaagtgacaagtggacgtctttttacagatgagattgaatatgaaaaccagaagaggctggcagaagaagaggaggaagatttgaacgtgctgacgtttgaagacctcctttgctttgcgtaccaagtggccaaaggcatggaattcctggagttcaagtcggtaagtaccttttaaagagaaaaccgacagaaggcgcaaacacagagccgcagaaaggaatgcatgcgtgcagctttgaatgagccgtgtgtctacgtttgttccatggtcattttaacatgcctcccttgctgtctgccctgcttcccctaattcttttcatacctgcagcacgaaggcccagagtcactggttagagccaacgtcccgtgggatgtctagggaagtcccagaaaagccatactgaaagaagcacagtatcacagtatcgtcatccctgccaatacagggattcattcgggttgttccctgcagtcgggggcatgagcagaggcccaaagttcaccagctctgccaccccagccagccagcctgaacagattcagcctaggctagccacagcgctgtggaacctgtctcttctcagtggctggccctgtattcacaagtgctgcagcaggaagactgcgggacccaccccaaaccatgacctccccgtgctgcgctaggcaatgctgcttctccacccgctgtcccctgtcattccacactataagccaccaaagcctcaaatctttatgtctgctgaagtaacatggtagtaaacagattagcgggggtggggtggggggggggagacaacatctttagctgtgtacgcacctacacaaactattgaaacacaaggaagggctaggttggtgtatcttactaagtttctccataggaaaagatgtctgtgtttcagaggggtagtatgttaattagggctccctaaagaaacagaactgatagaattaaaaataatacatatatatgtattatttttaattataaagttatatatagggctggagagatggctcagtagttaagagcactgactgctcttccagaggtcctgagttcaattctcagcaaccacacggtgggtcacaaccatctgtaatgggatctgatgaccacttctgctgtttcaagagagcaacagagtactcatataaaataaataaataagtaaaaatttaaaaagttatatatatataagtatatatacatataaaattatatattattttactctctatgtaaaaatattttatgcacagacatacacacatacacacacgcatatatgggggatttgttagagcggcttacaggcagcagttcatgtaatccaacaaggtgcacgagactggatgtctcagaaatccccatctggagtcccggggaagtcttagaaagcaggtggtcctgggtctacattgggatcctgaagaagtcagtgagaaagcaaccacagcagcagagcagatggacttgccagtaagagtgaaggcaagcaggcaaaatgcaaacgcttcctccttcataccctctatggctgccaccagaaggcgtggcccaggtgttaggcaggtcttctgacctcagaatccagaaattctctgtcccccgtgctgcagagccgcaatgaccagtttagataatccagcacagtttgttcatgttctctaattacagcaggcctttttatttttactcttaggtgtgttatgacatggacttttgaagagcatccagttttttttttttaaagatttatttattattatatctaagtacactgtaactgtcttcagacgcaccagaagagggcatcagatctcatggatgagatgtgagccaccatgtggttgttgggatttgaactcaggatctttggaagagcagtcagtgctcttaaccactgaaccatctctccagccccgggcatccagtttttagacggtttgtcttcactgcagccttccgctccaatcatgccaagcactgtgctcttccccactctgtgactgtgtcacacatttgtgtggctccatgcgacactgtgctggggcagaaaaccaatgaggatgtgacttcagggcccacaggttttatgtttctaggagaaagacaagcagacctatacatcagatcagtgtcttgtgattgatactgtcactaaagttagcatggctaccccaagaaaaaaggggtgaggaacaggcaagagagcaagagagcctcccttggatggaatccagagggagagggactagtcaaagccagtccaggctgggcaggcttcttgctggtcagaaggagccttcccagagcagctgggaagaatacgggcagggcaggtagtcaggaggacatgatggggatggggacagacatctaggagatgccacatgaagaaagccagacttggagaaggagggcaggagtcacggcacagacattcctgtttttataggctttgttcttttaaaggctgaggagagcgtagtggacccccatgggacaccatgtgctctcttacagagttcattcccttcagagactctgggctctactctcatgtactcctcgaaactcatcgttatcttctgtctgtctgtctgccccctgtaccctgtatgtgcatgtgaaagcaagtgtgtgtgtgtgtgtgtgtgtgtgtgtgtgtgtgtgtgtgtgtgtgtatgagaatgtggggcccatgtaccgtagtgtgtgtgcagaagtcagaggacaaactgtgggagttaattcttccactgtgggacccaggaatcgaactcaggacatcagggttacatggttaatgcgttttctcactgagctgtcatctctttggtccccccaaactcacttcttctgaatgctttcttcgatcttaatctatttattcatttagagacacgacctctatgtgtagtccaggctggcctcaaacttagaaatcctcctgcctcagcctctccagtgctgcgattatggatctgcaccactaggcctgtcagatatgatgcacttttattctgaaagccagttctttatccaaaagggattctgttctcgcacgcacacacgcacgcacaggaagctggctgttagaagcgtctctggagctaggcgaaggccccctttggcacttctttggctcatagctccagggatgcctcagatgactgcagctgagttaacttaggactcagccagtgttctcgggatgtatgacagtcatgggtctctgtcctctgtaactgttgtgagtctctctctgaaggtgtaagtcacagaccatgtcattccagcctctctcttccagtgtgtccacagagacctggcagccaggaatgtgttggtcacccacgggaaggtggtgaagatctgtgactttggactggcccgagacatcctgagcgactccagctacgtcgtcaggggcaacgtgagccgtttgctttttgtcacgagtacaggaaacacctgcactctctgtgatgcgtttttgatttatggtgacaccaaggggagaaaaaaaaaactcccagtgcttcacttctttaggctgaaaagattgttttgtgctcactaagagctaagcaaaatagccacgcatctctggggggctggccactcagaacagatccattaggggttggcatgagatcttcacctgaaaaaaaaaatgcccttactcagacctgtttcggtttccttagctataaagtggctttatatgtgttttatgtttccgatcatgagacaagctagcatgtataaaaagctttttgttttttttttttctgaacaggcagcacacaggtattcactataaagtttaaaggtgctgtagttaactggtagcgtttgttaccctgttactatatgaagagttcaggaagactccaaatacaacataactgacatgtgttcgttcaaagagaatgtgagggggccagagagatggctcagtggttaagagcatagagtgcttttccaggggacccaagtttgatacccagcacccacggcaggatgctcgcaagcatctataactccagctccaaggaatctagtgcctctggcctctttggacatgtgtgctcatgtgcacatacttacacataagtgaaaatcaattcaaagtatgatgaggcaaaaaatgaatgtttaagaagggaagaaagagagagagaaagaaagatagacagaaaatgatagatagataaacagacaaatgattgatagataaacagacagaagacatatagacaatgatagacagacagatagacagtgagatgtctcagcaggtaaaggtagttgctaccaagcctgagggctggagttgccccccaaaaacacatggtggaaaaactggaatggtataagttgacctctgaccttcacctgtgtgccgagcatgcaccctcccccagcgcccacacacatgcacaggaataaaaacataattattcttcttttcatttttcaagacagggtttctctgtgtagccctggctgtcctggaactcactctgtagaccaggctggcctcggnnnnnnnnnnnnnnnnnnnnnnnnnnnnnnnnnnnnnnnnnnnnnnnnnnnnnnnnnnnnnnnnnnnnnnnnnnnnnnnnnnnnnnnnnnnnnnnnnnnnnnnnnnnnnnnnnnnnnnnnnnnnnnnnnnnnnnnnnnnnnnnnnnnnnnnnnnnnnnnnnnnnnnnnnnnnnnnnnnnnnnnnnnnnnnnnnnnnnnnnnnnnnnnnnnnnnnnnnnnnnnnnnnnnnnnnnnnnnnnnnnnnnnnnnnnnnnnnnnnnnnnnnnnnnnnnnnnnnnnnnnnnnnnnnnnnnnnnnnnnnnnnnnnnnnnnnnnnnnnnnnnnnnnnnnnnnnnnnggagtctcagtaccatcatccctgcttatgaaatgacagcagcccaggctgccccagttcctcctctctgctcgacactctcagtactcacttcggtctgaaaatacccactctgtgaagaggaaattgagacaaagaaaagcaacttgcccgcggttgctaacttgccccgtgtggatgcgagcgtgcagagcctgcatccctgtcgttcacggtggtgtcctcctgactaacttcctacaggattctgattttacttcctaggttctcagaaaccaaccaatacaatcaatgacatagccctttaacccaaaatgagaactccaatgaatgctcatctcaggtggcttagagccggttcccagggatggtcgctggctgtggttacagtacactgacctctctgtgtgcttatggggttttcaccccaccagtgggctctcctgtgggaaggtgaattccgttcagaaccttctgttaatgaatcaggtaacccagcctggaccacagattgggccagtgactccatttgcataggatttaaaagaggatttccttctggggctcttctttagcctggccaattaaacacatgaggttcctactggaaccaaatcagaacaaaactccgtgccccaggagctaaccagccactgtgtcctgatgcaaatcaaagcctgtgcaaacagaggccaaccccctgtcccgcctctggaagttattcaagccccggagggcagctatggttactctaggcatgatcacgtaagtccttgagggcgatgcttctcagttctgaggaaagctcccgtaaatgattctccccgcggccttgaacttgtcgacctctgagcaaatacagagctcttccttaacgaacgaacggcatcgctacggcacttgccaatcccaagcacaagcctgtgtccaagatgacttttaaagaagtgtattttgccaggagtggtgccctacgcctttaaacccagctctcaggaggcaaaggcaggttgatttgtgtgtttgaggccctattctgcttatgtcaccagagctacatagtgagaccttgtctcaaaatagaaaaacagatgagctggacggtggtggcgcacgtctttaatcccagcacttgggaggcagaggcaggtggatttctgagttcgaggccagcctggtctacagagtgagttccaggacagccagggctacacagagaaaccctgtctcaaaaaagaaaagaaaaaaaaaaggaaaacaaatgatagatagatagatagatagatagatagatagatagatagatagatagatagagagagagagagagagatcgctataggtaggtaggtagataggtaggtatagacaggtagatagataaacagatacttagatagatgttaaatatagataatagatgataatgggtggatagatggatagatagataagaaacgtatttctaaaaagcttctactttttctttttttctagaacatgattttaatattttcaacttaatattcaacagacagaataattattttaagatatattttgttgttatgtctccttttcatttctgatgttattaatttgaatactgtctctgtgccctctggttagtcaggctaagggtctatctatcttgttttttctcaaagaaccagctcctggttttgttgattctttatagagttctttttgtttctatttggctgatttcagccctgagtttgactatttcctgccgtctactcctcttgggtgtatttgctttgttttgttctagagctttcatgtgtgctgtcaagctgctagtgtgtgctctctccagtttctttttggaagcactcagagctatgagttttcctcttagcactgctttcattgtgtcccataagctttgatatgatgtgccttcattttcattaaattctaaaaagatagactttactttctttttttatttcttccttgaccaagttatcattgagcagagcattgttcagcttctgtgtgtatgtgtgctttctgttgtttttgttggtatttaagaccagccttagtctgtggtgatctgatagggtatatgggattatttcagtcttcttgtatctgttgaggcctgttttgtgaccaattatatggtcagttttgaagaaggtactgtgaggtgctgagaagaaggtatattcttttgctttaggatgaaatgttctataaatacctgttagatccatttggttcataatttctgttagtttcactgtgtctcgatttagtttctgtttccatgatctgtccattgctgagagtggggtgttgaagtctcccgctattattgtgtggggtgcaatgtgtgctttgagctttagtaaagtctcttttatgactgtggatgcccttgcatttggagcatagatgttcagaactgagaattcatcttcttagatttttcctttgaccagtataaagtgtccttccttatcttttttgataacttttggttgaaagttgattttattcgatattagaatggatactccagcttgtttcctgaaacaatttgcttggaaaattgttttccagacttttactctgaggtcgtgtcagtctttgtcactgaggtgcatttcctgtgtgcagcaaaatgctgggtcctgtttatgtatccagtctgttagtctatgtctttttattggggaattgagtccattgatgttaatagatattaaggaaaagtgattgttacttcctgttatttttgttgttagaggtggaattatgtttgtgtggctatcttcttctgggtttgttgaaagattactttcttgttttttctaggatgtagtttctcttcttgtgaagtgttttccatctattatcctttgtagggctggatttatggaaagatactgtgtaaatttggttttgtcatggaatatcttggtttctctgtctatggcaatttagagttttgctgggtataatagtctgggctggcatttgtgttctcttagggtctgtatgacatctgcccaggatcttctggctttcatagtctctggtgagaagtctggtgtaattctgataggtctgtctttatatgttacttgacctttttcccttactgcttttaatattattcctttgtttagtgcatttggtgttttgattattatgtgatgggaggaatttcttctctggtcgagtctatttggagttctgtaggcttcttgtatgttcatgggcatctctttctttaggttagggaaattttcttctataattttgttaaagatatttactggccctttaagttgggaatcttcactctcttctataactactatccttaggtttggtcttctcattgtatcctggatttcctggatgttttgggttaggagcttttttgctttttgcgttttctttaactgcagtgccaatgttttctatggtattttctatacctaagattctctcttgtattctgttggtgatgcttgcatctatgactcctgatctcttccctaggttttctatctccgggtttgtctccctttgtgatttctttattgtttctatttccattttagatcttggatagttttgttcatttccttcgcctgtttgattgtgttttcctgtaattctttaagggagatatttatgtccttcttaaagtcctctatcatcatcatcaggagaagtcattttagagcccaatccggtgtgatgtgtatccaggacttgctatggtggaagaattgggttctgatgatgccaagtaacctcggtttctgttgcgtgtgttcttacacttacctcctgccatctgattatctctagcgctacctgccctggctatgtctgactggagcctgtccttcctgtgatcctagttgtatcagagctcctcggagttcagctgtctctgggatcctgtggttctgggattctgagatcctggggtgttcctgggtgcctgggtccctcctgctggtcccagttacttctggtggtggaacaggtgttgctctcctcctccacctgatcatatcctccttttccatatcaagcattaaaagtgttcttaggtttaaattttatcatctaatgctgggcaatggtggcatacacctttaatcccagcactcaggaggcagaggcaggtggatctctgtgagtttgaggccagcctggtctacagagccaattcctggacagccacgggtgtatgaagaaaccctcccttgaaaaacaaaaataagttgagtaaataaataaataagtagatattgtcatccaatggaaaacaaaaactaaaacttggaaaggctggagagacagctcagtggttaagagcactggctgttcttccagccgatccgggttcaattcccagcaccttcatgtcagctcacacttgtttgtaactctagttccaggaaacacagcacttttacagacagacatgaaggcaaaacaccaaataaatcttttttttttttaagtggcctcaagttttaaattttatcatctaacaacaacaaagaggggctggagagattgctcagtggttagagcactggctgctcttgctgaagacccaggttcagttctcagcacccatatagtggctcacatccatctagaatgtcagtttcaagggatccgacacccactcctggcagcctctggcactgtatgcataaggtgcacttacatacatgcaggcaaaacacccatgcacataaaattaaaaacaaaacaaaacaaaacaaaaaaaaactttaaaaaaatctccaagtctgcatgtgggggaacttcaccagcctctcttgaatcgtacacaggcacggctgccggtgaagtggatggcacccgagagcttatttgaagggatctacacaatcaagagtgacgtctggtcctacggcatccttctctgggagatattttcactgggtatgtgtggcactctgcaggcctccttgggctctggctttgtgtcccccacccctctgtacccttcctttaccctgcatgccaagggcggttaacacaccactcaagaccctagcttctagtcttgcctctgttgccagagttatttgctgacatctgagatctttctttcccacactctgtaattgattaagaggcttggggccctctggatccacttgcagccctcagtacagggtgggtctggcactggggaattctctttgcttgttttcagacagaatgtataccaaatagacaaataggaagaacagtgtttgtgaggccccactgagcgcgtgtttttctcaggtgtgaacccttaccctggcattcctgtcgacgctaacttctataaactgattcagagtggatttaaaatggagcagccattctatgccacagaagggatgtgagtacagccagaccggggttgggtatcaaacatttaccgtgtgctctaagtcctccagatgcattgcaaaaacaaaagcttgatggctttgttggtttgtttgtttcttctttctgttttgttttctttttgagccaaggttcccctgtgtagccctggctgtcctggaattgactctgtaaaccaggctggcctcaaactcagagatccagctgtctctgcctcctgagagctgttattaaaaatgggcaccgctgggctggtgagatggctcagtggttaagagcgcagactgctcttctgaaagcccctagttcaaatcccagcaactacatggtggctcacaaccaaacgtaatgaaaactgatgccctcttctggagtatctgaggacagctacagtgtacttacatataataaataaatacatttttaaaaatgtgcactgccaccacacctggttaaaacacactttcctacgacattgctgagatcttatttatttatatttatttattcatctatctatctatctatctatctatctatctatctatctatctaatgtatgtgagtatactgtcactatcttcagagataccagaaaagggcattggatcccactacagatggttgtgaaccaccatgtggttgctgggaattgaactcaggacctctggaagagcagtcttaaccacttaaccgctgagccatctctccagcccttgtttgctgtttaaaagcagagacatcttggtacagtggcacccacctttaattcccacagcgaggaagcagagaggcagccagatctctgtgatttgaggccagcctggtcgacagccaaagctgtgtagtgagatcctgtcttgaaaaaaacaatcgccaatcaatcaataaattggggggggggggcaggaagggcaaggagacacttgcctataatcccagtactccagaggtaaggtatgaggctgtaggctaatctgtgctaatagcaagacaagaaaggaaggaaggaannnnnnnnnnnnnnnnnnnnnnnnnnnnnnnnnnnnngagggagggagggagggaggaagggagagagagagagagagagagagaaagagagagagagagaaaggaaggaaggaaggaaggaaggaaggaaggaaggaaggaaggaaggaaggaaggaaggaaaagaaagaaagaaagcttcaggtagcttgcgccctcttgggcagcctccaaggcttcattcttctgcttgtggtacctgaggatttgacttcacctcactctctggtgtggtaccaattctagtcttcccacaaagccagcagcgcacagtgcacagcccccaccccccacccccatgctgccctgggtgtgaactgtgggtggagccttgccaagttcattcacaccccctcagctctgctctgttttgctctctcacagatactttgtaatgcaatcctgctgggcttttgactcaaggaagcggccatccttccccaacctgacttcatttttaggatgtcagctggcagaggcagaagaagcggtacgtggaggcttggcttaatcataacggtccccagggagatgtgtgggtgtcacaccgggcactaatggcctcagatccggtttaggccgaccatctttctcacctcactttgcctagattacccttccacagtcctgtgcagaagatgtactatctggtgtgggcttgggggcggggctttcctgtgatttcatccaagtgattaataggttaaaagctcttaagggtccagtgcaaagggctagacaactaaataaaccttaactcctccaggagccactggccttttctaagtcaacatggtgtgagggtgggtatggatgggaagggctttagcccaaagccctgaggacccattcagtctctgctgctcattccccactgatctgaacgatggcaagtttcttctttggcctcggtgttcccatctgtaaaatgggttgcaaaggtaaatgatcctcaagcagcaggatcttggtattacgtcattagcccctcctccttagcactcttagcacaggagaggtctgctccagataagggtggagccttgaacactcagagcccaggttcagatcctgcctccgtcactagtgtctcacatagtgactcacataatgtctcacattagtgactttaatgtcactaatgtctcacgtagcatttgcaactttagactttaatgtggacatcttgtgggatgatagttctgtaaaggacaaatcacctgccatctgcccttttcctactttttattaaaaatgagtggcgggctggtgagatggctcagtgggtaagaacacccgactgctcttccgaaggtccagagttcaaatcccagcaaccacatggtggctcacaaccatccgtaacgagatctgactccctcttctggagtgtctgaagacagctacagtgtacttacatataattaataaataaataaacaaataaataaatataaataaataaataaatagatttagtcttttaaaaaaaatgagtggctgctgtttcagaaaaaaacaaaacccatggaggggactggacagatggctcagtagttagagcactggctgctcttgcagaggatcagggttcacttcccagtaaacagggtagctcacagtcacctatacctcctattccaggagctccagcgccctcttctggccattgcaggcactgcattcaaatactgacacaggtgcacacttgcacacataaagtaaataaaacttcaaaacaagcctggaaactacccaaattcatagttttatatttttaagattattttacttttcaattacatgtagtagtgtttacagggaccctcagaaatcagaagagggtgtcgaatcccctggggctggagttacaagcaatcgtgagccacctcacatgggctcttagaaccaaactcaggtcctcttcaagagcagcaggtgttctaaccactgagccatctctccagcccctaaactcatacttcatgatctgtataaaagtaaggtgtatttaagtactgtgctttctaggcacacaggcgagtcctgctcagccggtcattcttctccctttccagatgtatcagaacatgggtggcaacgtcccagaacatccatccatctaccaaaacaggcggcccctcagcagagaggcgggctcagagccgccatcgccacaggcccaggtgaagattcacagagaaagaagttagcgaggaggnnnnnnnnnnnnnnnnnnnnnnnnnnnnnnnnnnnnnnnnnnnnnnnnnnnnnnnnnnnnnnnnnnnnnnnnnnnnnnnnnnnnnnnnnnnnnnnnnnnnnnnnnnnnnnnnnnnnnnnnnnnnnnnnnnnnnnnnnnnnnnnnnnnnnnnnnnnnnnnnnnnnnnnnnnnnnnnnnnnnnnnnnnnnnnnnnnnnnnnnnnnnnnnnnnnnnnnnnnnnnnnnnnnnnnnnnnnnnnnnnnnnnnnnnnnnnnnnnnnnnnnnnnnnnnnnnnccatgtatctgaaatatagtatattcttgtaaatacgtgaaacaaaccaaacccgttttttgctaagggaaagctaaatatgatttttaaaaatctatgttttaaaatactatgtaactttttcatctatttagtgatatattttatggatggaaataaactttctactgtagaaatgttggttcttgttcctttgcgtgaactataagctcatggcctcatctgtatgtgagatttcctgtttttctgtttgtttgtttgtttgttttttgtttctcttgagcaggtgcattcttgggggatgcttggtgttgtttggttttgagacaggatctagttatattgctcaggctagcctcaaacccgagatcttcctgcctctgcctcaagtcttggggttaacgtcatcacacccgacgaaggtcagctcttcaccaaagtgttaaagcatcctgagccgaccaggctgaggaccgcgggcaccacatctgatcggttctcccattccctcctcattcacttctgatcttttgaaactgagcaagctccagcccacaggtttataaactcgccttgctttgtccctttgtacgctggacaccactgagttctgtcctttatttctttgttttgtcctatgacagggtctcatgtgtcccaggttggcctcaggttgactgtgtagcagaggatgacctggaccttctggtcctcgtgtccccacctcccgagtgctgggatcccggtgtgtgccaccatgcccggcttcgcctgattctttagctagcctctttgccatctaagtcagaggttctcaaccttcctaatgctgctaccctttaatacagttcctcatgctgtggtgacccccaaccacgaaattatttcattgctacttcataactgtaagtttgctactgttatgaatcgcaatgtaaataacctgatgtgcaatggctagagggtcacgatccacaggttgagaatgctgccctactgtgtctcttagctgctgcaagttccgtctccctaagcattgacttggtgtgtggtatggtatggtgtcttgtaagcaccaggtctctccattgatccagcttccacccctctgcctctttgcttctttcaccccctagatactagctgcataatgttttctctctagccaaaaccgcctggatggtcctggatgtgtctgggcgtttcccagccccctcttctgcctcagtctctgtttccatgcccatcaagaatagctgcctccgtggcaacctgtgagatcttcttgtctatatcattaggttgtctctgcacagacagcctacctatgtgatgctgtaattagcttttgtgataatgtcctctctcttctctctttatttatttatttatttacttacttacttacttaatgtatttgagtacagtcattgtcttcagacacaccagaagagggcgtcagatctcattacagatggttgtgagtcaccatgtggatgctgggaactgaactcaggacctctggaagagcagtcagtgctcttaacccctaagccatctctccagcccatgtcctctcctttaagctggagtttgagccgtttgaaggcggatgtgatttaagtgaatccaaacactcagctccacggaggtaataggtataaacagacatttggttactttttagcctactcatgtaaaagcataagatatgcttgatggcaaacattcagctaatattgttttttatttaggtgagtggtggttagccatgtaacaagcgttggaacacctctccagctgagctccggttcaggtgtatctctcctaccttcctgtctgaatgtattcctaccacacacacatgagcatgcgcagacgcacacacatgagcatgcgcagacgcacatacatgagcatacgcagacgcacacacatgagcatgcgcgcgcgcacacacacacacacacacacacacacacacacacacacgagtggcaaggcgggggtgcaggatgcaaatgggaaagaagtctttgtattagttaccttactgttgctatgataaaacagaccttggcttgctgcaggctcttgtttactgttaatattgctgctgagaacatggtatggaaattggaaatacccccccatctctctctgtctctgtctgtctgtctgtctgtctgtccgtctctctctctctctctcacacacacacactttttaaaatattttattttattctgagacaaaggtttttttgttttgttttgtttttgagacagagtttctctgtatagccctggctgtcctggaactcactctgtagatcccctgcctctgcctcccgagtgctgagattaaaggtgtgccccaccaccacaagggttttttatgcaccccaagctggccttgaactcgaaatcctcctccttggcctgctgaggtcctgcactgcttcttcacattggccttcacagctgtctctgtcgcttacccctgagaacctaatgtggaacccgaggccaactctcagcctcccaggcacagcctagtggtttgccgacgttccttctctctctgttagctaccaatggtctttctcgctttctctgtcttctctgtcttgatggaattggaggaggcagaagagatacaggaatttgcaaagccccttgagctacttgtcgtgagatgtgtgttgatagagcaaggcagaatagtgatgtgagctacccaagcctcttccttctttcaaagtgattttgcccagggcatgtgcacattgtgtctgtgacatccctctggatggagccaaacacacagtcacatctggagtcatgtccttgtgtgcagcgttaaaaccctcaaaggacttcatttccacggaaatggatattctcttgtgggtttcgtaaaagtggttttatagccttaatactaccaaatgcttcttttaatagcataatattggggctggaaagacagttaatagtccatactgctattgtggaggacctgagttcaattcctagcactcacaactggaacatcacagcctctggcaactccagttctgagggatctgacgccctctactggcctccatgggcactgcatgcacatagtgcatacacacactcaggcacatacacatagacataaaatacataaatccttcttttaaaaagcgtaatattgacttgttcttcaaagatgtattcatgttatgcagtgatcatccctaatctgaaatactaaaacccagaatctgagcttgatgaacatccgcataatacgtcacacacacacacacacacacggaaaagagagagagagagaactcgatgcctggcctccaatgaacagacgttagaatgaagtgagttaaaattatcacatcaagttaccaccaggctgtgtacataaggcacacatgaaatgttaactgatcctttgaattatatgtgcaaaattattccagtcatagcaagtttagtctggttcctgtcactccagccaaggggtactctacctgccttaccccaagctgacattgtccatattgctgatgtcctatgaaaacacactccttgaccaccatcttcaaactaaggacatttgaatatgcttctgggctgtgtcgggtagaggtttggagcatctccttcatagaaagtgaagtcagcagaggtggaaacttaagggctcgttggaaagtcagtggtgcgggaaggtgtttgctaaggcagacacgtgaaggaatatttagctgaagcagacacaggagaaaaggatgttctgctaaggcaagcatgtgatgaaggactctttgctaacaacacgcatgcgttagtccatcttacgttgtgtagctctatttgtccggaatctatagagagaaatgcaccaaaacaaaacaaaacaaaaaacaacttctggtggtgtattgtggcttcttgctgctcccaaggactccgattggcagagtaatgtcagctgagacagtcgcacaggatgaggcaagacctgtggaggacacgtgatgattggatggagtataagtagaactcaacagacagtcatggagactgagcttggcttgtttatagagctagctgtgcaatgcttgttgatctcttgtcttcaccagtcttcgattccccgagagaggcacagctaagaacttctcctgtgtccctctgggtccttcctgctgactctgctaggtaggttgtgccaccgctgctgattctgtttgctgtcccggctcttccaaactggactgctgatgtttctgtgaagtgtttgtgcgtggatcgagctgctgacctgtgaactgaactgctaatttccagacagcacagaccggagttgctctaaagaacctttctaaacaggtccactttccccgtatcctccccccccccccacttcctctggtgggtggtggactaaaagggaggttaaagcatttaaaagccatcattaaaaataaggattggcagagccgcactcaggcactgcagcgcagctcaggtctgcaccaggcgcgcgaaggtgagccagagccaagatggctgtcctttctaaggaatatggatttgtgcttctcactggtgctgccagctttgatatggtgctccacctagccatcaacgtgggcaaagcctgcaagaaggacaaggtagagtaccctgtcacctacagcatggatcctgaaagtgggcatatgttcagctgcattcagcgcgcccaccagaacgtgttggaggtacaccctccctccctgtttttcctaacggtgggaggtgttaactacccccgtatagcttctggcctgggcttggccttgatttcttggacgagttctttacacatatggagaccctagcaagcggtatcgaggagccacggggctctcttgccctctttactctgatgggcaccgccatgtgctctgcttcccagcatcctctgcttcccagcatcttggctggatcagaccgggcttaagctgcgggtccagatcctgccactgaggaaaggggggccgggggggggcttcctattctcatttgcctcctacgactcatcctgatttccagttccactgtttagtttttgttgttgttttaaatataataaaaacttacctgacatcagcctcatacctaaaaatgaagaaataaaaataaaaataaggattgaaaaagttaaggttacagttaggatcacaaagcatgcccctgttcactttagtgtgggccaagctgtgtcccctgaggggagggtacccctctttttctttccctttcttccttcctttctgtctcttttcttccttccttcctttctcttttaaaaatgtatttattttatttgtatgggtgctctatcagtacctgcgtgacagaagagggcatcagatgccattacagatagttgtgaaccaccatgtggttgctgggaattgaactcggggcctctggaagagcagtgtactggctggttttgtgtcaacttgatacagctggagttatcacagagaaaggagcttcagttgaggaaatgcctccatgagatccagctgtaaggcattttctcaattagtgatcaaggtggggagggccctttgtgggtggtgccatccctgggctggtggtcttgggttctataagagagcaggctgaaagccgggcgtggtggcgcacgcctttaatcccagcacttgggannnnnnnnnnnnnnnnnnnnnnnnnnnnnnnnnnnnnnnnnnnnnnnnnnnnnnnnnnnnnnnnnnnnnnnnnnnnnnnnnnnnnnnnnnnnnnnnnnnnnnnnnnnnnnnnnnnnnnnnnnnnnnnnnnnnnnnnnnnnnnnnnnnnnnnnnnnnnnnnnnnnnnnnnnnnnnnnnnnnnnnnnnnnnnnnnnnnnnnnnnnnnnnnnnnnnnnnnnnnnnnnnnnnnnnnnnnnnnnnnnnnnnnnnnnnnnnnnnnnnnnnnnnnnnnnnnnnnnnnnnnnnnnnnnnnnnnnnnnnnnnnnnnnnnnnnnnnnnnnnnnnnnnnnnnnnnnnnnnnnnnnnnnnnnnnnnnnnnnnnnnnnnnnnnnnnnnnnnnnnnnnnnnnnnnnnnnnnnnnnnnnnnnnnnnnnnnnnnnnnnnnnnnnnnnnnnnnnnnnnnnnnnnnnnnnnnnnnnnnnnnnnnnnnnnnnnnnnnnnnnnnnnnnnnnnnnnnnnnnnnnnnnnnnnnnnnnnnnnnnnnnnnnnnnnnnnnnnnnnnnnnnnnnnnnnnnnnnnnnnnnnnnnnnnnnnnnnnnnnnnnnnnnnnnnnnnnnnnnnnnnnnnnnnnnnnnnnnnnnnnnnnnnnnnnnnnnnnnnnnnnnnnnnnnnnnnnnnnnnnnnnnnnnnnnnnnnnnnnnnnnnnnnnnnnnnnnnnnnnnnnnnnnnnnnnnnnnnnnnnnnnnnnnnnnnnnnnnnnnnnnnnnnnnnnnnnnnnnnnnnnnnnnnnnnnnnnnnnnnnnnnnnnnnnnnnnnnnnnnnnnnnnnnnnnnnnnnnnnnnnnnnnnnnnnnnnnnnnnnnnnnnnnnnnnnnnnnnnnnnnnnnnnnnnnnnnnnnnnnnnnnnnnnnnnnnnnnnnnnnnnnnnnnnnnnnnnnnnnnnnnnnnnnnnnnnnnnnnnnnnnnnnnnnnnnnnnnnnnnnnnnnnnnnnnnnnnnnnnnnnnnnnnnnnnnnnnnnnnnnnnnnnnnnnnnnnnnnnnnnnnnnnnnnnnnnnnnnnnnnnnnnnnnnnnnnnnnnnnnnnnnnnnnnnnnnnnnnnnnnnnnnnnnnnnnnnnnnnnnnnnnnnnnnnnnnnnnnnnnnnnnnnnnnnnnnnnnnnnnnnnnnnnnnnnatgggcccactagggtgtgtgtgtgtgtgtgtgtgtgtgtgtgtgtgtgtgtgtaaaacagtaattatggaagatgttagtcatgaacttgataagcagttgtgggaagcatagggggagttagaagggaaagaaaggggggtagatttcaaatttctgaaaaaaaatttttttaaagggaagacatggcaagtagtaccctagttatggcccagcaggatgcctctccatcccccaccccacccctaccccgtgaagaacaccaccagtaacagccttagataaactgctgctgtgataaaacacttaccaaaaacaatctagggaaggcaaaggtttgtttcagtttatagtttataggctgttgttgaaagaatccaagccaagaactcaaggtgagaacctggaaggcagattcaaccctctcttcttgggcacaaacacacacacacacacacacacacacacacacacacacgcttgtacacatacaaaatacacctaattaaaaaaatatttttttaaacgagagaagatagcacactccaccagaggcaccttaccctgttctgtttacactaattaagtctatgtggtgttaagcatttagagttcaaagaaagattaaaacgcagtgcctgtgctctagagcaacagcaaggacagatgaggtgcttgtgagttaccgtgtgggtgctggggacagaaccagggttgtccctgaggacactgtcctggtaatccaggcaggtcacagggccacctgtttggtctgcatgtggtacacagattacatgcaggtaaaagcatacgtgcacacagacaagatggtaatggcaccaagtgtctgtctcattacatacggccaccgccgccacctcttgttatggcaatgcctcgggtggaatcattctttctgcagaagtctctgctctcctgatcatagccttaagcggaggtggcggatagctcagtattcgggtgctcctcgagcatgcgtgagaccctgggttctgtctccagcacacatattacccctaccaccaacaaaacagttaaacctgtgtttctcatcgcaggaccgttctggataagctcctcccagagatatttaaaccagggtcagctgcccttgcacagggccagcatgtgtgttcagcaaacacaacccatgaggaggaattagctcactcgctcgatgagagcggaccacaggcagggcagaacactgcctccagtccaggatcagccatggacatggtgaaggtcaattccatggacttcggagaatttgtggatgtgtttgggaacattgttgagaaatgccctctgattgccgctgctgtctggtcccagcgtccattctctggcttggaagacttagaaaatcacttttttgcctttattgatgctctcccgagatcaggtaagacttcaggaccgtgtgcgcgaagtcattttcaatattgtatataaaaatattttagattactttagcctccttactcagttatttagccgggattattagaaggatcagtagacatcctttcaaacgctagtctcttgaaggtggacacaagaacatgggggcgggatgggcaaggtagcatggatggccgaggacagcggaggcagagggaggacaatctctgaggtcgagaccagcctgatctagagcgagttccaggacggccagggctattggaggtcaagaatgggaacagggcaaaggccttggtgactcagaagctgaaggcccactttggcaatgccctggatgaaagagaggatagcgaggacctcccagggaccccagagaggaacgggaagcgctgagcgattttcaaaaaaaaagggccggtttggaccagacaaggatgcattcatttagatcccaagactctttgcagagagaagtaaaatgggagcaaagcaatgttttctggggagagtgggccacagggtggggagaagagggggtagaggtttattcaggatggcacagcggccgaaggtccaaaggtacatagtccctgttcataggctactatgggttctgagaataaacccgacatgcccttggggaacaaagtcagagggtaggagtcacctgcccttgagactgttcttagtcttcggtcaggagggtggtctcaggacagagcaggcactcgcagctgcgttcagtatggctgtgacactctgtggattctcagactcctctgtatggctgcctatgagaacttacagaggaagagcacaggtccaggttataaaatcaagctgaggactggagagatggctcagcagttaggagcactggctgctcttccagtggactggagatcaattttaagcacacattccccaccccccaaagatgctcgcaaaggcgtctaactccaggatctggtgtcctgctctggcctccgtaaacaccaaggacacatgtgatgtgcagacatacatgcaaacaaaacactcaaatatgtgaaatttaagtgtgtgtgtgtgtgtgtgtgtgtgtgtgtgtgtgtctatctgtctgtctatctgtatgtatgtttgcaaatcaactaatcaactcagggtctttcttgcttatcctgggcactctaccactaagatgtactcaatctttttcacaatgtttctagaacagagagagagagaagaggagaggagaggagaggagaggagaggagaggagaggagaggagaggagaggagaggagaggagaggagaggagaggagaggagaggagaggagaggagagtctcaatgtatttgaagggtcatttaaaaatccttaatgggaagtggtggtgaac

SEQ ID NO: 134 - DNA, 3426 bp, Mus musculus
gcggcctggctaccgcgcgctccggaggccatgcgggcgttggcgcagcgcagcgaccggcggctgctgctgcttgttgttttgtcagtaatgattcttgagaccgttacaaaccaagacctgcctgtgatcaagtgtgttttaatcagtcatgagaacaatggctcatcagcgggaaagccatcatcgtaccgaatggtgcgaggatccccagaagacctccagtgtaccccgaggcgccagagtgaagggacggtatatgaagcggccaccgtggaggtggccgagtctgggtccatcaccctgcaagtgcagctcgccaccccaggggacctttcctgcctctgggtctttaagcacagctccctgggctgccagccgcactttgatttacaaaacagaggaatcgtttccatggccatcttgaacgtgacagagacccaggcaggagaatacctactccatattcagagcgaacgcgccaactacacagtactgttcacagtgaatgtaagagatacacagctgtatgtgctaaggagaccttactttaggaagatggaaaaccaggatgcactgctctgcatctccgagggtgttccggagcccactgtggagtgggtgctctgcagctcccacagggaaagctgtaaagaagaaggccctgctgttgtcagaaaggaggaaaaggtacttcatgagttgttcggaacagacatcagatgctgtgctagaaatgcactgggccgcgaatgcaccaagctgttcaccatagatctaaaccaggctcctcagagcacactgccccagttattcctgaaagtgggggaacccttgtggatcaggtgtaaggccatccatgtgaaccatggattcgggctcacctgggagctggaagacaaagccctggaggagggcagctactttgagatgagtacctactccacaaacaggaccatgattcggattctcttggcctttgtgtcttccgtgggaaggaacgacaccggatattacacctgctcttcctcaaagcaccccagccagtcagcgttggtgaccatcctagaaaaagggtttataaacgctaccagctcgcaagaagagtatgaaattgacccgtacgaaaagttctgcttctcagtcaggtttaaagcgtacccacgaatccgatgcacgtggatcttctctcaagcctcatttccttgtgaacagagaggcctggaggatgggtacagcatatctaaattttgcgatcataagaacaagccaggagagtacatattctatgcagaaaatgatgacgcccagttcaccaaaatgttcacgctgaatataagaaagaaacctcaagtgctagcaaatgcctcagccagccaggcgtcctgttcctctgatggctacccgctaccctcttggacctggaagaagtgttcggacaaatctcccaattgcacggaggaaatcccagaaggagtttggaataaaaaggctaacagaaaagtgtttggccagtgggtgtcgagcagtactctaaatatgagtgaggccgggaaagggcttctggtcaaatgctgtgcgtacaattctatgggcacgtcttgcgaaaccatctttttaaactcaccaggccccttccctttcatccaagacaacatctccttctatgcgaccattgggctctgtctccccttcattgttgttctcattgtgttgatctgccacaaatacaaaaagcaatttaggtacgagagtcagctgcagatgatccaggtgactggccccctggataacgagtacttctacgttgacttcagggactatgaatatgaccttaagtgggagttcccgagagagaacttagagtttgggaaggtcctggggtctggcgctttcgggagggtgatgaacgccacggcctatggcattagtaaaacgggagtctcaattcaggtggcggtgaagatgctaaaagagaaagctgacagctgtgaaaaagaagctctcatgtcggagctcaaaatgatgacccacctgggacaccatgacaacatcgtgaatctgctgggggcatgcacactgtcagggccagtgtacttgatttttgaatattgttgctatggtgacctcctcaactacctaagaagtaaaagagagaagtttcacaggacatggacagagatttttaaggaacataatttcagttcttaccctactttccaggcacattcaaattccagcatgcctggttcacgagaagttcagttacacccgcccttggatcagctctcagggttcaatgggaattcaattcattctgaagatgagattgaatatgaaaaccagaagaggctggcagaagaagaggaggaagatttgaacgtgctgacgtttgaagacctcctttgctttgcgtaccaagtggccaaaggcatggaattcctggagttcaagtcgtgtgtccacagagacctggcagccaggaatgtgttggtcacccacgggaaggtggtgaagatctgtgactttggactggcccgagacatcctgagcgactccagctacgtcgtcaggggcaacgcacggctgccggtgaagtggatggcacccgagagcttatttgaagggatctacacaatcaagagtgacgtctggtcctacggcatccttctctgggagatattttcactgggtgtgaacccttaccctggcattcctgtcgacgctaacttctataaactgattcagagtggatttaaaatggagcagccattctatgccacagaagggatatactttgtaatgcaatcctgctgggcttttgactcaaggaagcggccatccttccccaacctgacttcatttttaggatgtcagctggcagaggcagaagaagcatgtatcagaacatccatccatctaccaaaacaggcggcccctcagcagagaggcgggctcagagcccagtcgccacagcgccaggtgaagattcacagagaaagaagttagcgaggaggccttggaccccgccaccctagcaggctgtagaccgcagagccaagattagcctcgcctctgaggaagcgccctacagcgcgttgcttcgctggacttttctctagatgctgtctgccattactccaaagtgacttctataaaatcaaacctctcctcgcacaggcgggagagccaataatgagacttgttggtgagcccgcctaccctgggggcctttccacgagcttgaggggaaagccatgtatctgaaatatagtatattcttgtaaatacgtgaaacaaaccaaacccgttttttgctaagggaaagctaaatatgatttttaaaaatctatgttttaaaatactatgtaactttttcatctatttagtgatatattttatggatggaaataaactttctactgt

SEQ ID NO: 135 - DNA, 2979 bp, Mus musculus
atgcgggcgttggcgcagcgcagcgaccggcggctgctgctgcttgttgttttgtcagtaatgattcttgagaccgttacaaaccaagacctgcctgtgatcaagtgtgttttaatcagtcatgagaacaatggctcatcagcgggaaagccatcatcgtaccgaatggtgcgaggatccccagaagacctccagtgtaccccgaggcgccagagtgaagggacggtatatgaagcggccaccgtggaggtggccgagtctgggtccatcaccctgcaagtgcagctcgccaccccaggggacctttcctgcctctgggtctttaagcacagctccctgggctgccagccgcactttgatttacaaaacagaggaatcgtttccatggccatcttgaacgtgacagagacccaggcaggagaatacctactccatattcagagcgaacgcgccaactacacagtactgttcacagtgaatgtaagagatacacagctgtatgtgctaaggagaccttactttaggaagatggaaaaccaggatgcactgctctgcatctccgagggtgttccggagcccactgtggagtgggtgctctgcagctcccacagggaaagctgtaaagaagaaggccctgctgttgtcagaaaggaggaaaaggtacttcatgagttgttcggaacagacatcagatgctgtgctagaaatgcactgggccgcgaatgcaccaagctgttcaccatagatctaaaccaggctcctcagagcacactgccccagttattcctgaaagtgggggaacccttgtggatcaggtgtaaggccatccatgtgaaccatggattcgggctcacctgggagctggaagacaaagccctggaggagggcagctactttgagatgagtacctactccacaaacaggaccatgattcggattctcttggcctttgtgtcttccgtgggaaggaacgacaccggatattacacctgctcttcctcaaagcaccccagccagtcagcgttggtgaccatcctagaaaaagggtttataaacgctaccagctcgcaagaagagtatgaaattgacccgtacgaaaagttctgcttctcagtcaggtttaaagcgtacccacgaatccgatgcacgtggatcttctctcaagcctcatttccttgtgaacagagaggcctggaggatgggtacagcatatctaaattttgcgatcataagaacaagccaggagagtacatattctatgcagaaaatgatgacgcccagttcaccaaaatgttcacgctgaatataagaaagaaacctcaagtgctagcaaatgcctcagccagccaggcgtcctgttcctctgatggctacccgctaccctcttggacctggaagaagtgttcggacaaatctcccaattgcacggaggaaatcccagaaggagtttggaataaaaaggctaacagaaaagtgtttggccagtgggtgtcgagcagtactctaaatatgagtgaggccgggaaagggcttctggtcaaatgctgtgcgtacaattctatgggcacgtcttgcgaaaccatctttttaaactcaccaggccccttccctttcatccaagacaacatctccttctatgcgaccattgggctctgtctccccttcattgttgttctcattgtgttgatctgccacaaatacaaaaagcaatttaggtacgagagtcagctgcagatgatccaggtgactggccccctggataacgagtacttctacgttgacttcagggactatgaatatgaccttaagtgggagttcccgagagagaacttagagtttgggaaggtcctggggtctggcgctttcgggagggtgatgaacgccacggcctatggcattagtaaaacgggagtctcaattcaggtggcggtgaagatgctaaaagagaaagctgacagctgtgaaaaagaagctctcatgtcggagctcaaaatgatgacccacctgggacaccatgacaacatcgtgaatctgctgggggcatgcacactgtcagggccagtgtacttgatttttgaatattgttgctatggtgacctcctcaactacctaagaagtaaaagagagaagtttcacaggacatggacagagatttttaaggaacataatttcagttcttaccctactttccaggcacattcaaattccagcatgcctggttcacgagaagttcagttacacccgcccttggatcagctctcagggttcaatgggaattcaattcattctgaagatgagattgaatatgaaaaccagaagaggctggcagaagaagaggaggaagatttgaacgtgctgacgtttgaagacctcctttgctttgcgtaccaagtggccaaaggcatggaattcctggagttcaagtcgtgtgtccacagagacctggcagccaggaatgtgttggtcacccacgggaaggtggtgaagatctgtgactttggactggcccgagacatcctgagcgactccagctacgtcgtcaggggcaacgcacggctgccggtgaagtggatggcacccgagagcttatttgaagggatctacacaatcaagagtgacgtctggtcctacggcatccttctctgggagatattttcactgggtgtgaacccttaccctggcattcctgtcgacgctaacttctataaactgattcagagtggatttaaaatggagcagccattctatgccacagaagggatatactttgtaatgcaatcctgctgggcttttgactcaaggaagcggccatccttccccaacctgacttcatttttaggatgtcagctggcagaggcagaagaagcatgtatcagaacatccatccatctaccaaaacaggcggcccctcagcagagaggcgggctcagagcccagtcgccacagcgccaggtgaagattcacagagaaagaagttag

SEQ ID NO: 136 - DNA, 32433 bp, Homo sapiens
cactgagacgcacatgttatctttcaaacaagtcaatggactagaataaatcatcctttctcagcatgtggtctgttgaacaactgtgtaagaatcatctgagcaaatgtttaaaatgtggattcctggctcccattccagacatgctgactcaaaactggggcaaaacgctcagactctgcttttttaatgagaacctttggtgattcctatcacaggtctagatctgtgctgtccggtacggtagccaccagccacatgtggctattgagagcttgaagtgtgtctggtccaaattgagatgtactctaattgtaaaatacacactagattttgaagacttagtatgaaaaaaagaatgtaaaatatattattaataatttttatattggccgggctcggtgggtcacacctgtcatcccagcactttatgaagccaaggcgggtggatcgcttgatcctaggagtttgagaccagcctggataacatggcaaaatcccatctctacagaaaatacaaaaatgagttgagtgtggtggtgtacacctttagtcccagctacttgggaggctgaggttggaggattgattgagcccaggtggtcgaggctgcagtagccatgatcacgtcaccgcactccagcctggatgcagagcaagaacctgcctcaaaaagaaaaaataataataaaattaaaacaatttttacattgattatatattaaaatgatagtattttggatatatcgcattcagcgaaatatgttattaaacttaatttcacctgcttccttttactttatacagccaacagaatttgtaaatgatgtacaaggcttgaagttgtgactcacattctgtttcattggctagccctgttctagatgaagagtaggagttcttttcaccttgattccgctaagtgtttgtttcatgattattgttactctttatacctaaaagggatttgtactaaaagtcccttgttgggacttttagaatctcagtgcagggtttgcatggagttgtctactgtctcttactgaaaccccccaatgttcagagcattcatttttaaagtaattaagaatgcagactggtctgggagctgactgaaacacactcccccaaactcagggtttgtcaacagtggcgctgctggcatgttgagctggataattctttgttgtgaaggactgtcccgtgcactgtaggatacttttcagcatcccgggtctcctcccactggatgccaggagcacattcccttttcccagtgtgaccaaaaatatctccagacactgccaaattgagaaaaataacccctggcattttttttttttttttttttttgagaaccattgccttagaggcatcaacccacagtcatcgtaagctgttattcagaaatatcaagctttttttttttttttgagacagagtcttattctgttgcccagactgaagtgcagtggcacgatcttggctcactgcaagctcctgggttcaagcaattctcctgcctcagcctcctaagtagctgggattataggtgcatgccaccatgcccagctaattttttgtatttttaatagagacggggtttcttcatgttggccaggctgttctcgaactcctgacctcaagtgatccaaccgcctcagcctcccaaagtgctgggattacaggcgtgagccaccgcgcctggcccatcaagcttttaaatgtagaaggttggagagtcagcccctctttaccctagttgacttgattaccacttggcctgtgttcagaaggaaatcagcatatcactgtcccctctctcctttgtatcctatccccatgttagataagctcttagcattatgggaatctcttctgaacctgattcaaagagagaaggggtcgattcaatttagttcaacaaatattactttaatatcctcttgatgggtgtgatgctgtgatgggctgcaagagtgaataaggtaatgttgctttccctctcccgcaagaatgtacacagattgctactgtgctggtgatatctggtataaccttttgagattttacagaatcgccagttggggaccatgtcactgacatatgggtcatgggccaatgtagtgggctgcttcatgtagtttcattccatggctacaatccatacccatgaccccagattgttatcctatagaggtagccaaatgaatgaattaggtgagctcctgactcctatagcgttttgtacctcactcattcctacttatctggcaacagataagtatgtatgtcacatctcaccagggagtttataaactctaagaataggtatgctgccatatttctctatctttgtacaatgccttgttcagtaagtgtgtttaataaatgaatgaattcatcatcatatctggaatgcaactcacagtgcagtctgggccaaagatgagtcgacagcatcctcttcactgcaaggaccacgcacatggttcttagcacaacacccagtactcagtgtttattgttatttgaaagttcttgaagagctacagtgtttgtgctaatgatgtgcattgttggtactgataatgtaccaggtgttatgggccactgacgacacacagcaaaggaaagatgggccctccttcttcatgagaaaacatgctcaaagtactgaacaagaaacgaacaacacaaaatttgaacacgcctctgagtgctctaaatgtctttttctctccacatgaggctctatgttgagatggggatggaggactagattatagtcaggggtaatttccacttttctttgtttttgccttttttttttttttgagacagagtctcactctgtcgcccaggctggagtgcagtggcatgatcttggctcactgcaacctccgtctcctgggttcaagtgattctcctgcctcagcctccctagtagctgagattacaagcatgtgccaccctgcccagctatttttttgtatttttagtagagacggggttttgccatgttggccaggctggtctcgaactcctgacctcaaatgatacgcccacctcggcctgccaaagtgctgggattacaggtatgaaccaccgcgcctggcccttctttttgcttttttttttgagacggagtctcgctctgtcacccaggctagagtgcagtggcgcaatcttggcttactgcaacctcctcctcctggcggaggtgattaagtgattctcctctcggtggaggtgagtaagtgattctcctgcctcagcctctcgagtagctgggattacaggcatgcaccaccacactcggctaatttttgtatttttagtagagacggggtttcaccatgttggccaggctggtctcaaactcctgacctcgtgatctgcccgccttgccctcccaaagtgctgggattacagccgtgaaccacctttcctggcttctttttgctttttagagtcagggtcttgctatattgcccaggttggattctaactcctgggctcaagtgatcctcccgcctcagcctcctgagtagctgcaacttggcgtgtgccactgcacccgtctttccttttgactttttattatagaaagtttcaaatttactaataagttgaaataatagtgcatgagcattctttacctaccacctagattcaacaatttaattgaaccgaatttggtttgtgaagtacaatattttagtcatgtatcaagattttataggcaaagtgatacaattttttaaaaatctgttactgaaaggcccctgtaataacactacccctgaaaaaactttggtgtggtcatggtatgtgcaccagaaatctctcggcttccccactttcatggcttcatttctccaatttacttcctcaaatattacgccaaagtttactagggcttgcctttatgttttattaaattataactttctagccgtcctggtgtcctggtcctgataaaggtttccaggatatttcacccattagtttgtataatttcctatctctacagacttaattacaaattccaaatctaccttagctttttccacttttatgggaaaaaaaaaaggaataggactgttgtaattacttagtaacctcttctgaaaccttctccttagccttgcctaagcctgatgttttcctttttcctgaaatatttaattttccaactctgtgaatctaagttttgcccacagtaggcactaaccgagtgcttacggggtaaacagctgtgtggtggtcgtttgggttctgggtggtgagccagggtcctgctcagaagaaccacaaactgaaaagcaggctgtcacatacaatgagtgacacacaattgcagaagattatggagcctgggagaggagttgtttttttttttttcctattttctgaaggagttgagccttgagcacagacagaaaggagggaaaatgagggaaaagtttgagtctagagaaataccagcagctcctacctaaatgccgttcccattcacttctgcagtttgagacaacattcctggctgcaggtcttcccaagaccccactcagttgtaagttattaaccacatcttaagaagccattctgtgagaataaaagatccttctttgagctcttaccatgtgcaaaatcctataggtgtattacctcatttaactctcataatcccattttatgaaatgtggaaattgaggctaaattacttgcccaatcacagaaggcaaagccaacaccctttattccttctttttttctgaaattgccttataaaaacacataattccacctccagagataacattgcagactttttctatgtaagcaccatgatagaaacatacaatatggatctttgtataaacatgaaataaggtaccatttgtaatctgatttttcacttaaaatatatcatgagtatctttctatattaataagtatgttgttatatctaccttattgctgtaatggctgcatagtattccacttttcagaaatttttattttaactaactcctgttgatgggcatcaactttacttttttttctttctctttctttgacatttttatttattattattattattattattattattattattattattattatttcggatggaggcttgccctctcacccatgctggagtgcaatggtgcgatctcggctcactgcatcctccacctcaagcgattctcctgcctcagcctcccgaatagctgggattacaggcgtgtgccaccgtgcccagctaattttttgtatctttagtagagacggagtttcaccatgttggccaggctgatctcgaactccttacctcaagtgatcctcctcctttggcctcccaaagtgttgggattgcaggcgtgagccatcgttcccagccaagaaaccccttttcttagttttaatgagaacgcatcttcttagacaccgaggtattgttttactgtaaactcaaatgtcctgacctccgtctcctgccggctggccatttgtagaaaacccctaggcgaaagaggaagctttgcatctcccaatcagcctaattagttagtccccttggaattcccatggggtcaggacacggttgtcattgcagttgtcattgtttccagggttaactgtcataagcatgaggaaaggcagtttaaagccattggatattcagttttgtgttcctgctatttatgtgaccaatttcatacttggagtttgttcagaagagtgaaaaatgtttcaagtgctatctcttctaaaccatggcaaaccacactctattaagacagcacaaaagactgaggaagaaaaatgtttacgaaacattttgctttggtctgcctcatgataagtaattgtactggtcatttctttttccactgaattgactggtgtctctgacatgctctctggtgagccacactggcttcattacctcctctcttctcctttttcagggtctttggccattgtccagagagaattacactttctctcttagaagctcacgtctttcttctcttgggccacttccacgccagcctcttccacactgccttcctgaggtcgggcactggcatggagctctgtttcctcttctcctccctagggttgtaatctggctttcccccaatctttctattgtttccacttcaccagtgatttcctccttgttgtccagaaataggtcaggataagaaattcccctttttgacttcttcagccttcttgttaacaaagcaaaagaaggttaaacacctcattcaatgctcagcatttttttttttttttttgagtccgggtcttgctctgctgcctaggctggagtatagtggctccagcaattcccctacctcggcctcccaagtagctgggaccacaggtgtgtgccatcgcacccagctaattaaaaaaaaaaaattctgtagagacaaggtcttgccatgttgcccaggccgatctcaaactcctgggctcaagtattgcaccctcctcggcctctcagagtgctgggattacagatgtgaacccctgcacgcacccaaaggtcaacttttaactgcctgaaacttttgataggtcagagagatgaattctcttgttcacaatacacagtcagaattaccttggcttacgagttcagggcacagaacactggtgtcacacaaacgtgggctcaaaagctgcaattacgcagtggcgttttgtggattttttttgtagagatgggatctcagtagattgccaaggctggtctcaaacttctggcctcaagcagtccacccatctcagcctcccaaagtgttgggattacaggtgtgttttgagtcttggggaccaactgggattctcttctcccctttatcttctgtatccaatctagcccctgccatttctttttttctggtgcctctagggtttgctcttttctctcctttcccattctcctccattaaacaacgctccccttgtcatgctccgaaacctcaaatctgaacttttacttctcctatcacagaaacttcccacactccaactgcttattacccctctaccttcaccaccaaattgtaaattctgtgagaacagaaacccaattttttgaatttgctgttgtgtcctcaatttccgtcacaaacaggttctaacattgacagttgaatgaaggaatgaatgaacgagttcttggattgctacaactgcctttaaacttccagtaaacttttgctgccatcagcaggtgcatataaaacactcttcataggccaagccaccctgactcatacctgttatcccagcactttgggaggccgaggtggggaggatggcttgagggcaggagtttgagaccagcctgggcaacatagtgagaccccatctgtacagaaaaattacataaaataaaattaaggctaggtgcagtggctcatgcctgtaatcccagcacttttggaggccaaggagagaggatcacatgaggtcaggaattcaagacgagtctggccaacatggtgaaccctgtctctatgaaaaatataaaaattagctggctgtggtggcgtgtgcctgtaatcccagctacttgggaggctgaggcaggagaattgcttgaacccaggaggcagaggttgcagtgagccaagatcacgccactgaactccagcctgggcgacagagtgagactccatctcaaaaaaaaaaaaaaaagttttattgcaatgctcagggcagtaagcattgttgtagaaaataagtaatttgtatttttaaaatgcgtaattcatcccggcactttgggaggctgaggtgggtggatcactaggtcaagagatcaagatcatcctggccaacatggtgaaaccccgtctctactaaaaatacaaaaaattagccaggcgtggtggcgggcacctgtaatctcagctactcaggaggctgaggcaggagaatcgcttgaacccgggaggcagaggttgcaataagccgagatagtgccactgcactccaacctgggtgacagagtgagactccatatcaataaataaataaagtaagtaaataaaatactgttcatgatattctgctcccatgagaagcttgccgttcctcctcattgcagccctatgacttcccgtctggcgccttcagtcgctgctttgtctcctccttggatgccttttcttttgtcctctcatcaaaaccaactcatccgtgaggctccagcttgagctctacctcctctatgaagcccccgaacctttcccaccgacacagacctctgccttctttgatcatctgctggacttcagtttaatgctttaatgattccacttgtatgggtcctgtctatccacccggtttaggtatctttgaagataggagctacctactttttaggtcttttgcatcctccacactcctcatctaaagctgcgtccactctgactcaccttcctaacctgccaggcagggtctttttgttttttaaactttaagtaggctaggccgggcgcagtggctcatgtatgtaatcccagcgctttgggagtctgaggcaggcagatcacaaggtcaggagatcgagaccatcctggctaacacggtgaacccctgtctctactaaaaaatataaaaaattagccgggcgtggtggcaggagcctgtagtcccagctactccggaggctgaggcaggagagtggcgggcacccgggaggcggagcttgcagtgagccgagatagtgccactgcactccagcctgggagacagagcgagactctgtctcaagaaaaaaaaaaaaaaactttcagtaggctatgtggaggtcgagttagatatcttcggtacaagccttagatttctttttctgttttaagggaatttttttctttttctccaattttgttactgtgagttcacgaaggcatattcaacagctcattgctgccctgcctctcctgcaccatccaacatctcactgcagtatccagcaacccacaggcctgctgggcgtggtggacagtccccaagatcaggttatccgtgtcaaaatattgagtggttgatgagtgctccaagtaggcactagagcctgctgagagcactcagaggtttctgcacaagctcagtggatttgagccctcatcattgttcattgctatgtaagtcaagggttggtcataggtcctgccttggactgtcatttcaggaagcagggcagctacagcagcagtccccaacgtttttggcaccaaggatccattttgtggaagacaatttttccatagattgggggtagggggatggtttcgggatgaaactgttctatctcagatcatcggggattagattctcttaaggaacgcacaacctagatccctggcgtgtgcaattcacagtggggtttccgctcctgtgggaatctaatccctctgctgatctgacaggaagcggtaaagctctcttgcctgctgctcacttcctgctgtgtggcccctttcctaataggccatggacagttaccagtctagaggctggggggctggggacctctgaactacaggcttctccacctgcacaagttctgagaagttagactatccagagcaagaggggcaggaacttcctggtctcactgagaatcttcggccaatctcaactcccaatgggcatatgactcacacggtgatcatcttaaaatgcagattctgagtcagtgatttgaaagggacctgaaatcttgcaattgtaacaagctcccagatgataccaatggcgatgttgatgctgcctgtctgtggaccacactttgagtagcaagggtctacaatatggacatttccttttccagtgaactttagcaagtgaggagcatttcaaggaagacacctcccatgcacactgtcattagttgcagcatctcctgtagcaattgggctaaatctgtctttaattctttttcaaacagcatatccaagttttgcaatcataagcaccagccaggagaatatatattccatgcagaaaatgatgatgcccaatttaccaaaatgttcacgctgaatataagaagtaagttaaattgccgagaatttgatttttattttttaattccttaattttttattagtcttaactaggaaaagttaagtaatggcttagaagggctactacaaaactgtttttgtacgctgaagtgttttgaaactttactctcatatctactggcattgatcatatatctctttattttttatgttattttgttctgtttcatttttaagaccaggtctcactctaccacgcaggctggggtgccatggcacaatcatagatccctgtagcttcaaactcctgggctcaagtgatcctcctaagcctcccgagtagctgggactacaggcacgcgccaccatgctcagctaattttaaaaccatttttgtagagagggggcctccctttgttgccgaggttggtctcaaactcctggccttaagggatcctcataccttggcctcccaaagtgctaggattacaggcgagagccactgcacctggccatatatctctttctgtgtgtatcatcagaagctgaaagacttatttcacattgtctctgaatatgaattagtgttatgactttattgattttagtattttgaaaggtcatgttaaggaaaggctgaaagtcattttatctctcatttatttgtttttaataattttcatttctttggcttataaaacaatgagaagtccaacttctcctgaagctaagaatcattttaaggcatgcaaacaggtggaggtctgtacctcagctctctccagggagaggctggcaatggaaaaatggtgtgtagcagagaggttgcatggcaaggaggttgcatggcaaggaggaaagaagaaattaccagaggtctggaggcatcctaaatgagaaatcctcccagaagcacaaactgccctggagtaaatgggtagcctgtactgtaggcaactttgaaactatttccagaaagtaccatactccatgagcttattttattttattattttcagagacagggtcttgctgtgttgcccaggctggtcttgaactccttggcccaagtgatcctcccaccttggcttcacaaagtattggtattataggagtgaaccactatgcccagccagtgagcttatttcacacgttcttttctacagggaaacctcaagtgctcgcagaagcatcggcaagtcaggcgtcctgtttctcggatggatacccattaccatcttggacctggaagaagtgttcagacaagtctcccaagtaataaggacattgatgcctcttataatggaagaacataaaactctctgacctattgactctttcatgaatacggtttaggaggaaatgatgaaatatttaaaatgctaaccttctcaatcaaccataactctcaatagtcatagactgtttctgataacttatactggatgaatctcttttagaactcgctgcagaaatcctaacttccaatctgatgacagcacacctgtctaaattctttgccattttttttttcagctgcacagaagagatcacagaaggagtctggaatagaaaggctaacagaaaagtgtttggacagtgggtgtcgagcagtactctaaacatgagtgaagccataaaagggttcctggtcaagtgctgtgcatacaattcccttggcacatcttgtgagacgatccttttaaactctccaggtacaacagttgttcttgtgatattccaccatcaggaattccccactagaagttagtccccatcgctgacttttacttggggaattttacaggagagtatagggtcagtgtgtgagaaaaggtttcttgagtcaggcaagaatccccagagagactgtttcacaggttggggcggagtcctccctgtgcccttgtgactcatgtgtcacagtgaccgggagaagcagaaactgccggtgtggtgaatctccatggaaagatctaactctagagaaacagattttgtcacttggagtctctgtcattttcccttttgattagcctccttatttgccctcagcttgctgttttataatttttggtttgctttttagagccctcctaagttaaacagttgtgaaacctggctgcccaccctagtagttaggatcaccaacctcacaaaactgacttctccactttcatgtgcgaccttcataaaagggatatgaacttcttttttctctgacttgtacatcctgtaggtttaaatccatgcatttttttttttttgagatggagtctcgctctgtcacccaggctgcagtgcagtggcgtgatcttggctcacctctgccagggttcaagcgattctcctgcctcagcctcccgagcagctgggattacaggcacctgccaccacgcccagctaatttttgaatttttttagagacgggatttcactgtgttgcctgggctggtgtctaattcttggactcaagtgatcctcccatcttggcctcccaaagtgctgggactacaggcgtgagccatcgtgcctggcccagatgtaattcttgtaaatttaccctagtaaatggttttaaagaatggattgagaataatccgcaattttctagggaggaaatgtatcctttacagggacattgcctgattgtctgtggggagtagagtatatgtagagtggttgttaggactgaaaatgattattactgaaacaggatgtgagagattataatgagttgtccactatttataatgtcacacaggaattctgtttcatcgctgagtgacactcttttgttgcaggccccttccctttcatccaagacaacatctcattctatgcaacaattggtgtttgtctcctcttcattgtcgttttaaccctgctaatttgtcacaagtacaaaaaggtaaaagcaaaggtaaaaattcattattctttcctctatctgcagaactgcctattcctaactgactcatcatttcatctctgaagcaatttaggtatgaaagccagctacagatggtacaggtgaccggctcctcagataatgagtacttctacgttgatttcagagaatatgaatatgatctcaaatgggagtttccaagagaaaatttagagtttggtaagaatggaatgtgccaaatgtttctgcagcatttcttttccattggaaaatctttaaaatgcacgtactcaccatttgtctttgcagggaaggtactaggatcaggtgcttttggaaaagtgatgaacgcaacagcttatggaattagcaaaacaggagtctcaatccaggttgccgtcaaaatgctgaaaggtacagtatagtggaaggacagcaacaaagatgcccaaaaatgggaggcacagtttcccacccatgccttcttctcttttccatccttttaatggttactgtttgccttgtttcaaggctaaaaatggagtggattggggtgtcaacccagtcatgaatacaaaattcaagtcataaatacaaaactccacctcttcttccacttctctctttgtttatttttattttcttttatttttttgagacagggtctcactctgtcacctaggctggagtacagtagtgtgatcatggctcactgcagcctccaccccctgggctcaggctcctcagcagctggggctacaggcgtgcaccaccacgctcagctaagttttttatttttggtagagacggggtttcaccatgttgcctaggctgatctgggactcctgagctcaaactatctgcccgcctcggcctcccaaagtgttgggattacaggcgtgagccactgtgccaggcctatttagtttttataggctttgatatttggggatacagttgccacaggcagaagttctttcttacatttgtgttgttttattttgttttatttttagagacaggatcttgctctgttacccaggctagagtgctgtgatcatagctcactgcagcctcgacctccttggctctagcaatgctctcacctcagcctcacaggagtgtgccaagacaattggctaattttttttttttttggtagatacggtgtctcaccatattgcccaggatggttgcaaactcctggctcaagtgaggctgccttggcctcctaaagtgctgggattacaggtgtgggttgaaacagactctgggtaggagagaaaactggggccctttgtatcctcacttcgttgctccatccattccgatctggcgtccagccccattgctggcctcaccgttaccaccgctgacccagcaaaagcatctccagctggctctcttgctaaggtcaacagtgacttcaaaccaaaccaagcctaatggatatttttcagtcctcattacttgattgttcagcatgaattgatgctgttgattcttctctccatccagaagctttctttctttgggttttgtgtcaccatattctggttttcctcccacccctctgcccttctcagtcctttgtgggctcatcttcttccatccagcttttgttgttgtggctgattttgaaactcagtcctttgtgggctcatcttcttccatccagcttttgttgttgtggctgattttgaaacacagccttgctctgttgcccaggctggagtgcagtggtgtgatctcagctcactgcaacctccacttcccaggctcaagccatcctcccacttcaggcccctgagtaggggggactacaggcatgcgccaccatgcctggctaatttttgtatttttggtagagatggggcttcgccatgttgcccaggctccatccagctttttatggggcatccctgtgggcttgctcctggaccgccttgcgttttcgctccacacactcaacacagtccatccccactacacccgtgatgtcctcccatacaccaagggccctcatgcttgcgtctcctttcggagcttcaggttcatatgttaaatgtttggatgtctcaaaggtccctttaacacagtgtatgcaaggtgaattcccctaaccctggccctgcaccagcagtcctctctgtgactggtaatgaatgccagtgaataaataaccacattctatatagttgggcacactagaaacccgtgacttttccttgacaccttcctctttctaacaccctgtgagctaatcctatcaggtttccgattagtgtctcttgattccatcctcgtccctccatctctatgaccaccactctagttcaaggctctctcctggacaaaagcttccaaagcaggttcctgtatccactcttgcctccctttggcttctccatactgaggtccaagtgacagtggcgaaaggctaagcagatcaaatggctttcctacttcacatttcctccaccacccgcatggctgggccaccgctgcctccccacctcttgctctcggcaccccagagcgctggccttctttcagttcccccagcactgtcctcccacccactgtggggcctttgcacaagtggatccttctgcttccccttcccctttcatgtaagtatctcccactgccccctcagatctcagcttaaacaccacttcctctgtctcacaccacagacaatattgaggcccttgcaatgtgcgacattagctctctgcaggctttcccccgtagaatccatcacctttgtcatgacattttttaacatccaattgttgtcccatctgtccagtagcccctgtgcctcatgagggcagggtctgtgtctgtggtgctgtgctctctcctttctcgacctttgcccactctttcacaaccctcagcactgttctcctccccttccaccatgagtcacctggccagctcccatttttcttcaggactcagtttagacattgaatgctcctttctccacccctccaaggctaaggtagctatcccttttgaccctacagtacccctgcactcctttgccacgttgcattttttcttttttttttgagacggagtctcactctgtcgcccaggctggagtgcagtggcaccatctcagctcactgtaagctccgcctcctgggttcacgccattctcctgcctcagcctccctagcagctgggactacaggcacccaccaccacgcccggctaaatttttttgtatttttagtagagacagagtttcaccgtgttagccaggatggtcttgatctcctgacctcgtgatccgcctgtctcagcctcccaaagtgctgggattacaggcatgagccaccgtgcccagcccaacgttgcattttttctttttctttcttttttctttttttgagatagggtctcactctgtcacccaggctggagtgcagtgaagtcatcatagctcacggcaagcttcaagtcctgggctcaagtgatggtctgcagcctttccagtaactggaactacatgcaggcaccaccaagcccagctaatttttattttattttattttatttatttatgtatttttactttattttatttttaagtagagacaagctcttgctattttgcccgggcctttcttgaacttctgggtaccagcaattctcccgcttgtctcagcctcccaagatgttgggattagacgcgcagggacccacgtcttgcctgccgtattgcatttatggcactgtattgtcatggcttatttacttctctgccttctccaggagactctaagatccaggaagacaagggttgtgtcttgtttttccttcattccccagtgtctaggacattggctcttacagagtaggcactcaataaatacttgttgaatgactgaatgaaagaggtaatggtacatgaaaatgcttagaagaagctaagcatgctaaaaaatgtaagatattattttagccatgaggaataggacatgaacaagtaaagccccgaatccctgtccagcgtgaagctgaagacatgatgtattagggggtcccagtgcccacaggaaatcccacccccaagctaaaatcttggaaacaaggatacccctgagagcttgcccaaaccaaaatagaggatgtcagcaccggagaagccactataaaggttaggatgccttcctggacaaaataatggaacctggcaatcgaaccaaatcttcactgaatgtaaagaagagttactatatctggaagaaaaagtctgttcacagaggggtggtgcctggagcctggagagggaagtccagagaccctgcccttgcccctgtggctgcccgggctgccctgaccaactgcacatgagccgcaatgacgggagcccttggattccatagcgactttcctcacactgtgcttctaagtcagcttataagtacagtttgctgagctatctggaattttccctagagagagaatgcattggccaaccaatatgttctagcctgcttggcagttttatttctcaatgtcaattaatgggtctcttgagcacctgatagtgggaattagtcctctttgaccttctcccattggacttgctggcaaatctaatgttctagacctgagggccacaggctagagtcaaccatgctcacgacactgttatctctctctgactacaacagatccaagagttcaaacaaacaaacaaaaaggacgtttctcccttctgttaacttgtactgaggaggaaaagcatgtgttattattttgtttgtttgttttgagggccaactgtaaggatttttattttggtaggtagaggaaagtcctgttgaaaggtgcattaccagattcaacatttatactatagtctttgttttgttttgttttgttttgtttttgagacagagtctcgctctgtcacccaggctggagtggtgcaggggctcaatctcggctcactgcaacctctgcctccccagttcaagggattcttttgcctcatcctcctgagtagctggaattacaggtacgcaccggcacgcccggctaattttttgtatgtttagtagagacagggtttcaccatgttggccaggttggtcttcaactcctgaccttaagtgatccacccgccttggcctcccaaagtgttgggattacaggtgtgagccactgcgcccagccctatactacagtctgaattctgccttaggctgggcatggtggctcatgcctgtattcccagcactttgggaggcggagttgggaggattgcttgaatctaggagttcaagaccagcctgggcaacatggtgagaccccatctctacaaaaaatataaaaattagctgggcatgatggcctgtgcttgtagtaccagtaacttggagggctgaggtaggaggatcacttgagcccaggaggcagaggctacagtaagctgagatcatgtcactacactccagcctgggtgacagagtgagatactgtgtcaaaaaaaaaagaaagaaagaaaaggaaaaaaaaaaaaagaaaaaggagaaattctgtcttaaaacacaggatattgtttgtttgtttatttatttatttattttaagatggagtttcactcttgttgcccaggctggagtgcaatggtgcaatctcagctaattgcaacctctgcctcccacattcaagcgattctcctgcctcatcctcccaagtagctgggattacaggtgcctgccaccacgcctggctaatttttgtatttttagtagagacgaggtttcaccatattggccaggccagtcttgaacttctgacctcaagtgatccacccacctcggcctcccaaagtgctgggattacaggcatgacccaccatgcctggcttctctcataattttgaatttaaataaataatgcagattgactctgagctgagaaaaattttatttaatgacataaaattcgtattttacttgagttttacatttttaatgctcctttctttgacagaaaaagcagacagctctgaaagagaggcactcatgtcagaactcaagatgatgacccagctgggaagccacgagaatattgtgaacctgctgggggcgtgcacactgtcaggtaacccacttccacgaaaatcacctcatcaaaaagactgtagcttgatgacaaagaggatgtttgctctctctctctctctctctttttaattctttgtcttttctcagtcacagtgtgaactctcaaacccaagtggaattagacactgagcactctataaatcagaggggtcaaaataaagaatgcctcattcatctgctttatcgtgatatattgcataattctcacctgcttaaaaacaacaacaacaacaacattgcaagtacatttggtggtgtctgtgcttctctcccagcttggaagctggtgcacaggcgtggtgagagtggttacagagcctggccactgccccagttgggctgccgtcaaatacggcacagcctagctaggatatcagactttactttcccagaattctctggggcatgccctctgatcttctctcttctgcctagaaatacccaaatgatgtgcccaaggttcattctttctgcagcagcaggcctggggctggtactaaaaggaaaaagaggaaagtgaatctgagagaggactgggaatatatttctccctcctcaagcaaacagcaaatcagcatatagttaccaagtgttcacctataatacacagctagaacattactttcagttgccaactggagaatccaggaggccagtggtattggtgaggccacacatacaaaaaagggccacagagaatgtcaagaagatgctgctttccaaagaaatttgagcaaaagctgaaactgaatttaaagtataagaagagctaggctcagaaaaagttgtactgtccccaagtcagcagagaaccaagccctcctaagagtatgttgtctgctacatagacttctgaaataacagtttgctttgtgtatgcctataattgaaactgtaactatttcaggaccaatttacttgatttttgaatactgttgctatggtgatcttctcaactatctaagaagtaaaagagaaaaatttcacaggacttggacagagattttcaaggaacacaatttcagtttttaccccactttccaatcacatccaaattccaggtaagaggctgggtcagggtttcgtaattacacatcatagaacgtaggcaaagtgtgctgttcaaacacacttcgttgaccagtttctaaaggcaccgtgaagtctgtgggtcctgcaacctagagatttcctgaatctttgctatagtttccctgttgacatggaacgagtcctgtccctttccttcagtacaggtactatagctgagctagtctctctccacccatgcctgcatcacaccatagacgcctatttggtttggggaaaggtgcattattcggtctttcaggacacctggttgcctcacaggtattggtagaaagaatgaagactttttccaaagtccttaacatatgcaaagagagcagctcgggtcctgggactattgcgcaaaagaacgctgaactcaaattggattctaagatattaggatggattgatcgacacgtgatggggacacagtaaagtagcagtaaccttgtctctgctctgtttatcctccgcatccatggggatcctgagagatgcttggtcctgcagggatttattgctttagcgggcataaatgagggctgtaggagtttgctggatctcctcctcatccttgaactttcttgctaattacttgagcatcatggctttgtagcacctttctctgaatggattcccaggcattctgatggaggcattcgttgagccttggagcattctttttttttttttttttttttcagacagagtttcgctctgttgcctaggctggagtggtgcaatggtgtgatctcggctcactgcaacctccacatcccaggttcaagcgattctcttgcctcagcctcccgagtagctgagattacaggcatgtgccaccacgcccagctaattttgtatttttagtggagacagggtttcaccatgttggtcaggctggtgttgaactcctgacctcagttgatccacccacctaggccccgcaaagtgctggaattataggcatgagccaccgcacctggctgagccttggcgcgttcttatttccctccctgtatggaagttctcccttattctgaagggtatttgtttattggagacttttttctttaccaggggctttttagggatacatttgagagtcccggctttgttttcttagaatgtaagttttaagtgcaggcctctggccttccaggtctgagacacagacccagtgtcttaaagccaccaggccccacggagatccccatgcacgtccgtgtgcagctgcccttaacctatgcatgcccgtcacaccgtcctctcctttacattcatttcccagctcatcgtctagaaatgagaactctataaagccactcatattctggaacagaggggctatcctactgagtccgatgtgtgtgaccagtatccactggtcagtacttagcccctttgattcgttctgttcactggaatattaaatacactgaaattattccttttggaatatttgtggtctgaaagcatgaagccatttcctaaagatatgtaaattgtaaattgggttaaactcgtatattagaataaattgaatcgtgatctacttataattcctacagagctcctcagggaagaatttttatataccttaaaagagatttgtattattgctatttattaatttcacagtaaaaagaaatgagctttacaaaggcaaactggaaaaaagaaggatggtgaaacgcttacgggactctcgggaagatctgtattatgtgagggaaagtgggctgagttcagaaaccaaagaatgagatcgatgtgagtcctggttccactcgaatcatatttatctcactgtgcctaatttctcttttataaaatgccacccatctcataggttgtggcaaggattgagtgaggtcctttttgaactgtaagattctatatggaaaacagggattacttttatcttagactggcaagcccagttacacagatgtttttaatgtacacaaaaaatggacaaatggatggtgtgcttttaatttaaaagtcaatttataactggaatccatttatttgatgaattacatttttaaaataaaatgtctgctgagaagaataatgtaaataatgaaaaaacaaaattttttaatagcatgcctggttcaagagaagttcagatacacccggactcggatcaaatctcagggcttcatgggaattcatttcactctgaaggtaatattttattctaagtagtagcactttaaaatggaaatgaatgcaaaagttttatgttagctattttttaaaagtgtgtaaacacaaaagcattttaaaatttgctaattgtcagatgatagctaaaagccagtttgtatactgtagattttatgtcaacattcaactaataaacactgaggactattttatttggtcagattattcatttaaagtcatatattaattacagccatcttattacctgacaagtggaagagataatgagttccgaagttacatagaatttggattaacttctgcttactttgctttctgactggatgactttggacaagttatgtgaccaccagaatcacaattttcttgtttataaaataggcctaacactaccttcctcacaggactgttagaaggagtaaatgaggggctggccgtggtggctcacgcctgtaatcacgccttgggaggccgaggcaggcaggtcacctgaggtcaggagttcaagaccagcctggcccaatatggagaaaccttgtctctactaaaaatacaaaaattagctgggtatggtggtgcacgcctgcaatcccagctacttgggaggctgaggcaggaggattgcttgaacccaagaggcagaggttgcagtgagctgagattgcaccactgcattccaacctgggcaacagagtgagacttcaactcaaaaaaaaaaaagaaagaaagaaaaaaaaaggaaggagtaaatggaagaatataaaatgcacaatatagtttataaaataggatagatgggccgggcacagtggctcacgcctgtaatcccaccactttgggaggctcaggtgggtggatcacgaggtcaggagatcaagaccatcctggctaacacggtgaaacccttctctactaaaaatacaaaaaattagcatgagcctgtagtcccagctactcgggaagctgaggcaggagaatccagttgcagcaggccaagatcgtgtcactgcactccagcctgggcgacagagcgagactccttctcaaaaaaaaaagggatagacaattaatattaattcctttcccactgtgacagccctacctagtgcaaaagagaagtatctaaaactcctgactaatcaatcaggaggtcatcggtcatcaaagcagttccaaagtttatctctaaccaaaacaagtctccagtgacccttcataggcagcataaacaggtcatctctaatgctgccgggaagataatgcgatagcttcatgtcttagcacctcacctaactctggcttgaataaccttcccatagagatttaataaggcaacttcttagagttttggcaaaagtgaagactggctctattttacagatgaaattgaatatgaaaaccaaaaaaggctggaagaagaggaggacttgaatgtgcttacatttgaagatcttctttgctttgcatatcaagttgccaaaggaatggaatttctggaatttaagtcggtatgctccttttaaagaaaaaacaaaccaaaaaaaagatttgaaaagatgtgcttatatatgttttcttgtttattttaacttgtatcccttaaagtctgccttttctcccctgttcactgttggagtcacctagcgtgttaccttggctcttggctaattgtagtagcataaaggcctgggatcccttgtgaggtcacggctagcacagccctcccaggctgcacaaagtcccctgaaacttccaaggctgaaggtcgagataggaagtcctcagaaatccttcctcaaaacaaagcgtagcattgtcagtccctttcagaacggctgttcaggttgtgccctgcatgtgggcattcaacccaggggatgagaggaggctgaaaccgagccagccaccctgagtgtctttgtctaattctcaccctgcgtgctgtgggctggcagcagtcctgcaggctcactgcctcctctgttgctaaccccagatccattcgttggtaaggccctggagcctgccgtgaaccatgtctctaccccaattttgcactctttttgaactgcctttccacccgctgttctctgtgatttcaaatgtctcctgcctataagcagatcatagcccactctctggctaccttccttcctcgtttgcttgcctttcattaccttctctttatttcccaaaattcttccccctcatttttcttgcagtcttctaatctcctcctcctcttctcctccacttccttccccttgcctcttctctcctgttttctctctgaatttggaaagactactttcaattgtatttttttgttttgttttgttttgtttttggagacagtctcgctctgttgcccaggctggagtgcagtggcgtgatcttggctcactacaacctctgcttcctgggttcaagcaattctcatgcctcggccttccgtgtagctgggaccacgggtgcataccagcatgcctggctaattttttgtattttaatagagatgggaattcaccatgttgcccaggctggtcttgaaatcctgagctcaagcaatccacctgcctcagcctcccaaagtgctgggattacaggcgtgagccaccacactcggccttttttctttaaaaaattactgcctcagccagatgttcatggtgtgtgtctgcagttccagctacttgggaggccaaggtgggaggattgcttgagcccaggagttggaaactgcagtgagctaggatcgcaccactgcactccatcctgggtgacagagcaagtctctttctctaaaaaataaaaaataggcagccgggcgtggtagctcacgcctgtaatcccaacactttgggaggccgaggtgggtgaatcacgaggtcaggagatcgagaccatcctggccaacacggtgaaaccccgtctctatacaaaaaaaattagccgagtgtggtggcgggcgcctgtagtcccagctacttgggaggctgaggcaggagaatggcatgaacctgggaggcggagcttgcagtgagccaagatggcgccactgcactccagcctgggcgacagagtgagactctgtctcaaaaaaaaaaaaattaattaaaaataaataaataggctgggcacagtggtgtacgtctgtaatcccagtgcttttggagggaagcccaagagttccaggctgcaatgagctatgactataccactgccctccagtctgtctattcaaaataataatgaaataagcttaaaagcaataataatacaagttttaaaaaattactgtcacagtaatatttccacacctctgaactgcgaggcacatttttctcttcattttccccacctgctgtttggattcttcttgctcacgcatcttgcccacctgagtctttctctatttcacttatacaactacaatcctgctttcacaagcattttgtttttgtttttgagacaatgtcttgctctgttgcccaggctggagtgcaggggtgtgatctcagctcactgcatcctctgcctcccaggttcaagcgatcctcctgccttggcttcccaagtagctggggttacaggtgcacaccaccacacctggctaatttttttgtatttttgtagggataaggttttgctatgttggtcagactggtctcaaactcctgactcaagtgatttgcccgcctcggcttcccaaagtgctgggattacaggcgtgagccactgtacctggcccacgaacatctttatagaggtgggagaacacctacttagattgtctggcctggtttgctgcccatagctaagtaaatactcaaactactcccaactggcagtcaaggggcactgcttccccttcaaccccaggcttgtaataatatgaatttttgaagaacatccagtttcttaggccttctatccttttatcttcacatcaggcctcccctttgaatcatgcgtgtcactgtccccttcttgtctctcaccccctccctgatattcctctgggtgcccctcagtttcctctgtaggcccttgacttcatcaaacatttgttgagccccagctacatgccaagcactgtactagatgctggagatacagagtcagttatgatatgactcctgggctcgaagatcttatgaatgataggggagacagagacaagcagacatgcaagtcgaagatgacactgaggccgggggtgggtggctcaggcctgtagtcccagcactttgggaggttgagacggtggattgcttgaggccaagagttcaagaccagcctggccaacatggcaaaaccccatctctactaagaatagaaaaacagccaggcacggtggtgtacgcctataatcccagctacttaggaggctgaggcatgagaatcgcttgaattgggaggcagaggttgcagtgagcagagattgtaccgctgcactccagcctgggtgacagagtgagactttctcaaaaaataaaaataaaaaattttaaaaagtttaaaaaagacaacactgtagcatgataagtgttgtgactgaagtaagttctgggaacccaggggagggatctgcacagcagacctggttgggggaaggggagatgcagtggaagaggctttctgagggagtgcgtgcttcatgcttggactaatggagatttttgaaggaaaaggaaaaccagcagggaatgtgggataggataggaagcatggaatcaggaggagttttttttggagaaaggtaatgagttggacatactgaatgtgaggtgccttgagcaaccaagtagagcgtggtctagcagacacttggacacttctcctgtctgaagctcaagagaaatgtttgggttggaaatagggatgtgggcaatggtggttgcatccctaggtttggatgaaatggcttgggtgagggtgtgggttgtgaggatgcagccctcaggagtgagagtaggctcgtgcacaaagcccctgagggagacaggagccggcagagcagtggggagaaagcaggagtgaaccatgcgcagggttcccagagggaggaccagaagcgggaggggctggccaacagcagcagacaccacagggaggtcccgtcagatcgagactgtgtgggtgccaagccagtcagtgcaggcctcggccagagcagcttgggcagacaggcaggaggaggaggcaggttgcagacctggggtaaagtgggcaaagtgcaggtagatggcactgaaaaaactgggtatggaggagggagctctagaggggctgtggcacagggctgccagtgttcatggtgctgctttttattttttaaagatgaaagagtgtacattggacctttgctactagtgccctgttccccttcagatcttcctttgtaaagttcattttcttgtcagacccctttgattaacatcacgacatctctcagctcagggactccttctaattccagttcagtaaacctctccaaactcatttttagctttttgtttttccgattatttccctcgatattactccatttattcctaaagctattttccagtcagaaaagagatgctggccaggcgcggtggctcacgcctgcaatcccagcattttgggaggccgaggtgggtggatcacctgaggtcaggagttcgagaccagcctgaccaacatggcgaaaccccgtctctactaaaaacacaaaattagctgggcctggtggcgcgtgcctgtaatcccagcaactcgggaggctgaggcaggagaatcgcttgaacctgggacgcagaggttgcagtgagccgagatcacgccattgcactccagcctggggaacaagagtgaaactccgtctcaaaaaaaaaaaaaaaaagaaaagagatgctatttctcacacccacaataagagtactggaggacagctctgagattccctctgaaggctcaggggagggcccctgttggggagcctctcacttttgctcggaatctgcaaaagatctgctcctctttggcctctggggatgcttcagaagccgcacaaagaactgcagccaccatagctgcagaattaggtctcctatattcactttgtttgttgcacatcatcatggccgctcacggcacagcccagtaaagataagaggccttccatcaccggtacctcctactgaagttgagtctagaagaaagattgcactccaggataatacacatcacagtaaataacactctggtgtcattcttgacagtgtgttcacagagacctggccgccaggaacgtgcttgtcacccacgggaaagtggtgaagatatgtgactttggattggctcgagatatcatgagtgattccaactatgttgtcaggggcaatgtgaggctgctatttcctacttatttttatacggctattttgtgttgtgtcgttatcatggtaaacaactgcactcactgtggtgcatttttgatttatggtaacatcaaaaaaccctcacagcagtctgcttacttatgcttaaaaggtttttctgcagcttcagggaatcttccatctataataaaagctgagcaaaatagcatcacatctgtccttgggctagctagtcagagtagatcagttaggggcctttgagtgcaatcctcactttaaaaaacccaaaatctcaatacttgcacttagttcagttatcctagctataaagtgatgattgagttatgttttcaattatgtgaaaagctaatagtcacaataaagcactttaaaacatatatagcacatacctataaaatgttaaagctaaatacttaaatatgaattaatgaatatttatcatccttttactgttaacacaggaagatctaaaacatgagtgaattggctgggtgcagtggctcatgcctgtaatcccagcactttgggaggccgaggagggcagatcatgaggtcaggagttcgataccagcctgactaatatggtgaaactctgtctctactgaaaatacaaaaaattagctgggcgtggtggcgtgtgcctgtaatcccaactattcgggaggctgaggcaggagaattgcttgaacccaggaggtggaggttgcagtgagctgagatcgcgccactgcactccagcctgggcaacaagagcaaagctctgtctcaaaaaaaaaaaaaaaacaacaacaaaaaaaacagtgtgaattgacttggtaatgaaaaactaaggacagatgtgtttacaaaaagaactattagaagtaatagatgacaaaattgtgtagttgaaaatgtgtgtttttaaagaattacaatacctggctgggtgctggtggctcacgcctttaatccaaggcactttgagaggccaaggtgggagaattgcttgagcccgggttcaagaccagcctatggaacatggtgagacactcaactgtctctataaaaaataaaaaactagctgagtgtggtggcacacgcctgtggtctcagctacttgggaggctgaagtgggaggatcacttgagcccaggaggtcgaggctgcagtgagctgtgatcacgccactgcactccagcctgggcaacagaatgagacccttttttttgagaccctgtctcaaaaaagaattccctacttgtgaaataataataatattaaatgctgacttagtgcttactatgtgctaaacatctaagtgctttatgcatattaattcatttattcctcagagtacccacttggaaactgaggcacagaaaagtaactcgcccatggttacacagcatgtggacttgaacaggaatagtctgagccccgagtctgtgctaaccactatgttgtagtgtttcccatgagggttatgcacttacctcatagcgttgatgtgggaaaaagccaataaaaccaacgtgaaagcaccttgtccagggtgaacatccagtaaatgtgaaaagtcaaattaaactgtattcccactagaaacaaataatcatcttagctgatttacgatctactcctactcatcatagactgctcatatgtagtcattcagtttctaccccaccagctggttgtctcttatgtgggaaagtgaattccatttggaaccacaattaatttctttaattaatcaaattaaccagacttgcctgcatgaatcaatagctcatcagtttgcatacatttaaaagagggtttacttggctgattaagcatgtgctgattaaacatgtgctgtgaaggactcgtcaacccatgtaaaagaaaatcagtacagccaggtgtggtggctcacagctgtaatcccagcactttgggaggctgaggcgggtggatcacgaggtcaggagttcaagaccagcctggccaacatggtgaaatcccgtctctacgaaaaatacaaaaattagctgggcatggtggtgcgtacctgtaatcccagctactcgggaggctgaggcaggagaaccacttaaaccagggagtctgaggttgcagtaagctgagatagcgccattgcactccagcctgggcaacaagagcaaaactccgtctcaaaaaaaaaagagaaagaaaatcagtacaaagctctgccccagtaacctacccatcttgtgtcttgattctagtctgagactatactaagtcaaaactccctttcatgctagtggaaattattaaagccacagaagccagactggtatcatttctggaagtgatggcgtgggctcccctcccgacattattgtggatgacatttccactaaaggtcttcccagaaatgctgtaacagaagatctcactaattcactagtacccacttacccctaggcaactgactggctattccttaatggaaagtacctctttccagtggaaagatggcaagttaaacttacccattccaagcacaagcctttgttcgagaggagttgtaaagaaatatgccttatgttttaggctagtattattagaatgttaatttgaaagtgaaaacctttcacgtgaggaatgtgattttctcaataaggcattaagagtggtcttaggaagatgatgcatttcatcttaatacaaaagaaaagaagtcatgtctgtatgtggaaaattcaccatcttatctcctctgggttttccacaggcccgtctgcctgtaaaatggatggcccccgaaagcctgtttgaaggcatctacaccattaagagtgatgtctggtcatatggaatattactgtgggaaatcttctcacttggtaagttgggcagctgctggcctcccttggctcctggctttgcatcctctgctctctcggtgcccccccacccctccccccaacactgatgggtcttacttgtattgcagcccatgactttatgtttatttgctggtgtcctttagcctgtcttcctcactggtctataacctgcttgagagcgtgaaccgtgacttctttttcccagccgcagcccgtgtgcctgcaacagtgtctggcacatggcagatctcaatacgtgtttaattgaatgaatcaataaacaaatgaagaaatggatgaatggctgcaattgtctaatgttttcctcaggtgtgaatccttaccctggcattccggttgatgctaacttctacaaactgattcaaaatggatttaaaatggatcagccattttatgctacagaagaaatgtaagttcaagtcagactgtaatttggttgaaatcagaaaggtacagtctgtctacttccaaatgcatgaccaaaaaaagtcaaactccttagtgcaaagcgtataggattctttttttaaaaaatagaagtgaggtcttgctgtgttggccaggctggtctcaaactcctggcttcaagcaatcttcctggctcagcctctcaaagtgctgggattacaggtgtgagccaccacacctggctgtctgattccattttaaaaagaaaagaaaactctttgttttgggagtttctga

SEQ ID NO: 137 - DNA, 3475 bp, Homo sapiens
cgaggcggcatccgagggctgggccggcgccctgggggaccccgggctccggaggccatgccggcgttggcgcgcgacgcgggcaccgtgccgctgctcgttgttttttctgcaatgatatttgggactattacaaatcaagatctgcctgtgatcaagtgtgttttaatcaatcataagaacaatgattcatcagtggggaagtcatcatcatatcccatggtatcagaatccccggaagacctcgggtgtgcgttgagaccccagagctcagggacagtgtacgaagctgccgctgtggaagtggatgtatctgcttccatcacactgcaagtgctggtcgatgccccagggaacatttcctgtctctgggtctttaagcacagctccctgaattgccagccacattttgatttacaaaacagaggagttgtttccatggtcattttgaaaatgacagaaacccaagctggagaatacctactttttattcagagtgaagctaccaattacacaatattgtttacagtgagtataagaaataccctgctttacacattaagaagaccttactttagaaaaatggaaaaccaggacgccctggtctgcatatctgagagcgttccagagccgatcgtggaatgggtgctttgcgattcacagggggaaagctgtaaagaagaaagtccagctgttgttaaaaaggaggaaaaagtgcttcatgaattatttgggacggacataaggtgctgtgccagaaatgaactgggcagggaatgcaccaggctgttcacaatagatctaaatcaaactcctcagaccacattgccacaattatttcttaaagtaggggaacccttatggataaggtgcaaagctgttcatgtgaaccatggattcgggctcacctgggaattagaaaacaaagcactcgaggagggcaactactttgagatgagtacctattcaacaaacagaactatgatacggattctgtttgcttttgtatcatcagtggcaagaaacgacaccggatactacacttgttcctcttcaaagcatcccagtcaatcagctttggttaccatcgtaggaaagggatttataaatgctaccaattcaagtgaagattatgaaattgaccaatatgaagagttttgtttttctgtcaggtttaaagcctacccacaaatcagatgtacgtggaccttctctcgaaaatcatttccttgtgagcaaaagggtcttgataacggatacagcatatccaagttttgcaatcataagcaccagccaggagaatatatattccatgcagaaaatgatgatgcccaatttaccaaaatgttcacgctgaatataagaaggaaacctcaagtgctcgcagaagcatcggcaagtcaggcgtcctgtttctcggatggatacccattaccatcttggacctggaagaagtgttcagacaagtctcccaactgcacagaagagatcacagaaggagtctggaatagaaaggctaacagaaaagtgtttggacagtgggtgtcgagcagtactctaaacatgagtgaagccataaaagggttcctggtcaagtgctgtgcatacaattcccttggcacatcttgtgagacgatccttttaaactctccaggccccttccctttcatccaagacaacatctcattctatgcaacaattggtgtttgtctcctcttcattgtcgttttaaccctgctaatttgtcacaagtacaaaaagcaatttaggtatgaaagccagctacagatggtacaggtgaccggctcctcagataatgagtacttctacgttgatttcagagaatatgaatatgatctcaaatgggagtttccaagagaaaatttagagtttgggaaggtactaggatcaggtgcttttggaaaagtgatgaacgcaacagcttatggaattagcaaaacaggagtctcaatccaggttgccgtcaaaatgctgaaagaaaaagcagacagctctgaaagagaggcactcatgtcagaactcaagatgatgacccagctgggaagccacgagaatattgtgaacctgctgggggcgtgcacactgtcaggaccaatttacttgatttttgaatactgttgctatggtgatcttctcaactatctaagaagtaaaagagaaaaatttcacaggacttggacagagattttcaaggaacacaatttcagtttttaccccactttccaatcacatccaaattccagcatgcctggttcaagagaagttcagatacacccggactcggatcaaatctcagggcttcatgggaattcatttcactctgaagatgaaattgaatatgaaaaccaaaaaaggctggaagaagaggaggacttgaatgtgcttacatttgaagatcttctttgctttgcatatcaagttgccaaaggaatggaatttctggaatttaagtcgtgtgttcacagagacctggccgccaggaacgtgcttgtcacccacgggaaagtggtgaagatatgtgactttggattggctcgagatatcatgagtgattccaactatgttgtcaggggcaatgcccgtctgcctgtaaaatggatggcccccgaaagcctgtttgaaggcatctacaccattaagagtgatgtctggtcatatggaatattactgtgggaaatcttctcacttggtgtgaatccttaccctggcattccggttgatgctaacttctacaaactgattcaaaatggatttaaaatggatcagccattttatgctacagaagaaatatacattataatgcaatcctgctgggcttttgactcaaggaaacggccatccttccctaatttgacttcgtttttaggatgtcagctggcagatgcagaagaagcgatgtatcagaatgtggatggccgtgtttcggaatgtcctcacacctaccaaaacaggcgacctttcagcagagagatggatttggggctactctctccgcaggctcaggtcgaagattcgtagaggaacaatttagttttaaggacttcatccctccacctatccctaacaggctgtagattaccaaaacaagattaatttcatcactaaaagaaaatctattatcaactgctgcttcaccagacttttctctagaagccgtctgcgtttactcttgttttcaaagggacttttgtaaaatcaaatcatcctgtcacaaggcaggaggagctgataatgaactttattggagcattgatctgcatccaaggccttctcaggccggcttgagtgaattgtgtacctgaagtacagtatattcttgtaaatacataaaacaaaagcattttgctaaggagaagctaatatgattttttaagtctatgttttaaaataatatgtaaatttttcagctatttagtgatatattttatgggtgggaataaaatttctactacag

SEQ ID NO: 138 - DNA, 2982 bp, Homo sapiens
atgccggcgttggcgcgcgacgcgggcaccgtgccgctgctcgttgttttttctgcaatgatatttgggactattacaaatcaagatctgcctgtgatcaagtgtgttttaatcaatcataagaacaatgattcatcagtggggaagtcatcatcatatcccatggtatcagaatccccggaagacctcgggtgtgcgttgagaccccagagctcagggacagtgtacgaagctgccgctgtggaagtggatgtatctgcttccatcacactgcaagtgctggtcgatgccccagggaacatttcctgtctctgggtctttaagcacagctccctgaattgccagccacattttgatttacaaaacagaggagttgtttccatggtcattttgaaaatgacagaaacccaagctggagaatacctactttttattcagagtgaagctaccaattacacaatattgtttacagtgagtataagaaataccctgctttacacattaagaagaccttactttagaaaaatggaaaaccaggacgccctggtctgcatatctgagagcgttccagagccgatcgtggaatgggtgctttgcgattcacagggggaaagctgtaaagaagaaagtccagctgttgttaaaaaggaggaaaaagtgcttcatgaattatttgggacggacataaggtgctgtgccagaaatgaactgggcagggaatgcaccaggctgttcacaatagatctaaatcaaactcctcagaccacattgccacaattatttcttaaagtaggggaacccttatggataaggtgcaaagctgttcatgtgaaccatggattcgggctcacctgggaattagaaaacaaagcactcgaggagggcaactactttgagatgagtacctattcaacaaacagaactatgatacggattctgtttgcttttgtatcatcagtggcaagaaacgacaccggatactacacttgttcctcttcaaagcatcccagtcaatcagctttggttaccatcgtaggaaagggatttataaatgctaccaattcaagtgaagattatgaaattgaccaatatgaagagttttgtttttctgtcaggtttaaagcctacccacaaatcagatgtacgtggaccttctctcgaaaatcatttccttgtgagcaaaagggtcttgataacggatacagcatatccaagttttgcaatcataagcaccagccaggagaatatatattccatgcagaaaatgatgatgcccaatttaccaaaatgttcacgctgaatataagaaggaaacctcaagtgctcgcagaagcatcggcaagtcaggcgtcctgtttctcggatggatacccattaccatcttggacctggaagaagtgttcagacaagtctcccaactgcacagaagagatcacagaaggagtctggaatagaaaggctaacagaaaagtgtttggacagtgggtgtcgagcagtactctaaacatgagtgaagccataaaagggttcctggtcaagtgctgtgcatacaattcccttggcacatcttgtgagacgatccttttaaactctccaggccccttccctttcatccaagacaacatctcattctatgcaacaattggtgtttgtctcctcttcattgtcgttttaaccctgctaatttgtcacaagtacaaaaagcaatttaggtatgaaagccagctacagatggtacaggtgaccggctcctcagataatgagtacttctacgttgatttcagagaatatgaatatgatctcaaatgggagtttccaagagaaaatttagagtttgggaaggtactaggatcaggtgcttttggaaaagtgatgaacgcaacagcttatggaattagcaaaacaggagtctcaatccaggttgccgtcaaaatgctgaaagaaaaagcagacagctctgaaagagaggcactcatgtcagaactcaagatgatgacccagctgggaagccacgagaatattgtgaacctgctgggggcgtgcacactgtcaggaccaatttacttgatttttgaatactgttgctatggtgatcttctcaactatctaagaagtaaaagagaaaaatttcacaggacttggacagagattttcaaggaacacaatttcagtttttaccccactttccaatcacatccaaattccagcatgcctggttcaagagaagttcagatacacccggactcggatcaaatctcagggcttcatgggaattcatttcactctgaagatgaaattgaatatgaaaaccaaaaaaggctggaagaagaggaggacttgaatgtgcttacatttgaagatcttctttgctttgcatatcaagttgccaaaggaatggaatttctggaatttaagtcgtgtgttcacagagacctggccgccaggaacgtgcttgtcacccacgggaaagtggtgaagatatgtgactttggattggctcgagatatcatgagtgattccaactatgttgtcaggggcaatgcccgtctgcctgtaaaatggatggcccccgaaagcctgtttgaaggcatctacaccattaagagtgatgtctggtcatatggaatattactgtgggaaatcttctcacttggtgtgaatccttaccctggcattccggttgatgctaacttctacaaactgattcaaaatggatttaaaatggatcagccattttatgctacagaagaaatatacattataatgcaatcctgctgggcttttgactcaaggaaacggccatccttccctaatttgacttcgtttttaggatgtcagctggcagatgcagaagaagcgatgtatcagaatgtggatggccgtgtttcggaatgtcctcacacctaccaaaacaggcgacctttcagcagagagatggatttggggctactctctccgcaggctcaggtcgaagattcgtag

SEQ ID NO: 139 - DNA, 49047 bp, Mus musculus
  misc_feature (8143)..(8162): "n" at positions 8143 to 8162  can be any base
  misc_feature (12041)..(12681): "n" at positions 12041 to 12681  can be any base
  misc_feature (36979)..(37681): "n" at positions 36979 to 37681  can be any base
  misc_feature (37986)..(38287): "n" at positions 37986 to 38287  can be any base
gatgctcagccctccagggcaggagagggctatactctaagtggagagataagctacacttgtccatttatagagtggtaggtaggtatattaacggtgtgttctctgaggaagtctccaggacctgagatgagggatgtgtgtggggtcagcatctctggggcagtgggagaagactggtcaggaggaatcacggtagagtatatcaacacaggcagttgttagagctctgtgatcattcagtgctatcacccatggcaacaacctctcccaaccattgattgggaattggtgtgggtttcccctaagggaagtcctgacagagatgtggaggcattttctctgagccatcagcctcctgtctgaggacctggggaggctttgtcagcatcctctatagaaggtcagtgtcttggtgatcactgtctatgctggagagaagagagagagggtctgaggctaaggggctggacgtgatcaggggatcttgtagtgatatcagtttctgtttactagccgttttacccccacttaagacagcgtaaactcccagagctacagttattcccattgtcttaggtcccccgataaaactcaggaaagaaaaccaaaaccatttaaaagatctcttcaagccacgcaggtcagacgctcaccaagtttagtctaactcgactaacatttttgttgttgttgttttgttttgttttgtttttttgagacagggtttctctgtgcatccctggctgtcctggaactcactctgtagaccaggttggtctcgaactcgaaatctgcctgcctctacctcctaagtgctgggatcaaaggcgtgtgccaccactttcctggcttcaacactttttttctttctttcttttttttttttactgtttttgttaacagttctattcggtctttcaattagttgtctaaagactgcaaaagtcacttttgaaattgcttctttctgacttgactccttagcccagcaagtttgtcctctaatccccactcttatggtttgcatctcagacccctgcttaaattttaccttctacttaattgcactgaaaacaagtaaagccttctcagagcaacttggttaaaatcgggtccagtcccacccacagacacctgcccccttcctccttcccacagcatgtacaccagccacctctagtggattatttaccgtctgttttttatctaataaatggtaagctctgagagggcagggaccagctgtttgagcctggaagaactggcttctggagggcacccgacagaactgtaggttgaactcatggctggactctctgcttccattagctccactctggccattggcaacaatgtctagctggaatcacagctctgagtctccatcctaatcctctgggtagatcctgttaagccagcatgctcacctccagcgatagctgaaggtcaggacaaatgttaaagtgtttcctaatacagaccatctctatagatgtccacgattactaatatctcagcgtattgttgacttctcagtgaaagggtatgtgctctgaaagctgtgaccagaactgagtgagattttccaggttatgggtagtggcacaggctggtcgactccatgtgtagaagccacctgaggacagccacctgaagagcgtgagtggctgagagttcaagagcttgtaatgttcacctgccatatctactgctctctgacccggtactcacggcttatcagcaatccagaaggagagggtatttagcgggttgcctcaagagtttactgagcaaaagagaggctggaaaagatttcagagatagtggggagtggtggtgaataaccctgtcttaggattttggaaatgttactaagtggaattaaatagtcccggaagtgaagacagagatgcagaccaggcattggggctcccacttgtaacttccacactcaagagatagaggcagaaagacagagcgttcaaagtcatcctgagatcaaggcagtgcagcctggctacaggagaccctacttcaagaagaaaagcaaagagcaagaaggggaatgggctagagatacaaatgcaatagaagccaggaatggcagggctggagggctctgcaggctaccaggggccatggatgagaagcctttcttccagccagcgaccaacaagcagttcagcctgtggtctggggctgccatcccacttgagactctgttcccattcccgtctggtcatagttcacatctcacaactatcatcttctcattggttccctctctcttctctgattcacccttgcctagttggttttcaggaggtgccatattgctcagtgggtctccatgcaaactcatatcaacggctcccacgcctgcaaacaaaaccccagctctcctatctacacctttcctgtgggcaactgcctgtccctcctcacacccacaggggatgctcaggatgtagcctgctcattttgtgttcctctggagtttaataaatatggttggatgaaaactagaggccaccagtaccatgatatgtccatcgactcccttgtcctgtcctgtctcacttggtagataacaaaataaagtggaaatacagaatgttcttgtattaggcactcagatgataactattactgtgggtggcttctcaatgacaagaaactttgagaaactctatagttttccccagtggggcagttccagaagacacctgctgtgaagagccaagaacagctgtgcaggcaatagaggaagctggcactcactcagtaaaaaaaccaaaccaaaacaagaccctgcctgcagttggatggcaaagttcccagatgggcagcttgacataaagaggcgctgtgaggtgtttgatataaaagaagataaaaccgccggaaacagacatctcctctcctaaactgactccctcaatgtgtgcaaagaacaacccggctcagggtaaaaatagtgtttgtggatgaagggggatgtgtttgtccacccagggaaagactgcagctggccagcctctttcctgcacagtggagggtttgaaggacagtcagatgggtgaccaaggagaggagagcagggtggagatacagatgtggatccatattaaacccagaggagaagcaaccgctcaggaatggcagaatggtggccagatgtggcctttgtctcctcatccctgtgacatcatatccaggcaggagcaccagtcatgccagctagcaccttggagtggcagggtgggagggcagggagaatggtgagtggtgcccaagcaggccaggcaggcagaggaagttttgtcttaggaggccgtgaaggtcagtactctgttggaagctgaggagtccaccggtgacagaaattgcccaggcagacacacccaaaaagtgtcaagtggctcaggcttgtctagtccggggtcatgatactccttactaagtcaatagattgtctaagtactgtgcaaaacagcaaacagaacagggccgagccgggctccagactcaacaaaccaagcaggattctttattgcagggccccatgaggtgttggacattttaatactcgttgcatagagtttgtctgatccctctgacctaactcattacagaatcatcatcatcatcaactttatcagcagtcatcaacagagtctcactgtataatccaggctggcctcaaactcatgaccctgctgcctcaatttccccgtttctgggatctcaagtgtgctccaccatacccagcactgaagactgtcttgtttggcttggagcatctccctgagaccctgggctccttgcagatctcttcaccagatctctttaccctccctaggatgcagagtctaccttgagtggcactggcagaaatattggtgaagtgcaaagagacacagggacgtgaagggggaacaaagagaagtcacagcctttcagttaacagtattgtcctgagaaagcactgcatgccaatattcctgtatttagtcttcataaacactcacaagacagaaaccactagaacctcactgtgcatattagggaactgaggcacaggaatgtctggcaacacacctgtgggtatgtctgtctgtagctcataatgctgtgtgttatgggcaagacagaaagatggtcggggcaggaagggccaccagaaaaacctgggaaaaccctccatcactttgttcacagggctcccaccagatcaagtttggaagtattagttgatgtggttcagggagaccagacctccttgtgtgttcacatcaacaactgagaactctagcctgagcacagcagtgggtgttgcttccactcaggtggggagagggtggtcctggggcctccctattccctttcctggcatcacgcacattccccatcatccccttgacatcagccagcatataatcctgacatgtcaggaacatgtattctcccacatcccacatgctctcctgtggccctgccatagagaggtagactcttgaggctactctaaccaataggcaatgaacaacagcaatgtgtattacttggcattgagtgtgggtactaggtaatcctgctgtgatctctgtccgactgcagcagtggctgagacggtccagatgtggcaggtacaaacatgtcaagcttccatttggcctggatttagagtagagcagaaccctccaacaagtagcatgaaggaaaaaaatagactttgatttgtttagccaacacaaaggatttggaactaattggccattgactggaccaaggagccacttaacacctgatgcaattagcaccagaaaattatggtatagaaggaagaaattaactcctgccgctatcaggaatgccaatggaaataacaaaacaattgacttttgtatagtgtttcatagtgtgtgtgtgtgtgtgtgtgtgtgtgtgtgtgtgtgtgtgtattcagaggacaacctaggatgccacccacttgttttgagacaatgtctctcactctaattaggcgaggctggctgggcaataaaccctagtaatctgcctgtccctgtcaccctagcactggattacaagttcatgctgtcacaaccagcttttaatacgaataccatgggatcaaactcacatccttcatgcttgggtggctaacactttaccaactgagatagctccccagacccatgtttcacaatgttcaaggtacttgataaacagagtttaattaattccaaaagtgaccaccatgcttccatgattctgagcagttttccacctcctttcattaagccgtgactgtgtagtccattttcagctgttagagcaaaccatctgaaactgggtaatttataagacttattttggctaaccgttctgcaggctgggatgtcactgaacatagataaggttgcattcttcttcccatggtgggaacagaaaggcaagaggggtgtgtgtggcagggatgaataatgaagggtggctttatgtttcaacaaccctgcatccaacctgtgacaaaggcactaatcctttttgatgtctagttgcccctccaggtccacctcccaacaatgctccaatggcaataaagttcccatataggtttcgagggtaaaaactattttcaaatcatagtacaaaggcttcaggctacatgatgctattgtgaaggaccccgagagtcagaaaactgggattggaagccccagacttcatctccagagttggttagggtgagattcctaaacggttctaactccaacccctgctttccccaccatcagggctctggatcagtagagtattgcctgacagtcaggcaggacctcacacaggatgaagcagagacatgtccaccctttattcagctcacttaaaataatctcaccacctttgagtcaccaagatgtaaacacaagagaaaaaaattaaaagtaatttactgttgtggctaaaatacaattcctgtctattgtaggagtctgttaaacaacagccaaacatagtgtgtagtacaagttgctccaagaggtggcgttgggaaaggccttgtaagttgctgggttagatcagcctgggaagcatgcttgactccatctcaaagaaaaataaataaggaaaggagaggaaggaaagaaataagtctgtaaaagaaaaatgcacaaagacaaagctaaaagtcctgcctaaaccccctgagtggcaggattctctgttctgatgtagggctggtcatatgcctccttgctcctctctatgagaattggtcaccacgtattatgagctggttttgtaattattagattgtggacatttacacatgccattaactagtttatggcatgacttacctgttaccctttatccaacagctggctagtagacagctcgtgttgtttctaaactctatgtacagatcaggccatgatgagctgcctggtatgtgcgtcttcctgagtctctcttcagatggagtatgcctctagtggtgtggctaatgccctgcgtgtacctctgctctcattgtattaaagattcagttgggtgtttcatacaagagagaatttaccatagaagacttcttttttatttgtttggtttttttgtttgtttgtttttttgagacagggtttctctgtgtagccctggctgtcctggaactcactttgtagaccaggctggccttgaacttggaaatctgcctgcctctgcctcccgagtgctgggattaaaggcgtgcgccaccacacccggccatagaagacttctttaatgggcactggaaatctaggaatcagaaaaggacactgagtcagctcagactgactgtagaaaacacgtcccactcttgggtgcagcagtagttaacactggtcaatgtgatacttggataacttaacaattttataaactatagatctgattttagattgagctaagttgaccctctgaacaaaataaaagttactattgactcttacttaaggttctcctctgtgtcacgccttctgtacgggggtgaaatgggctatctcagttcttgatttagatgtggggaaaacaggcttaaggaagtgaagcaactacgcaaggtcacagcctcccagctgtgcagatgggagctcgtgcatccctggctgcatcctctgtctgtgtgctattctctgttcctattgctgcttctgtggtctcacattgctgtgcagatagaagcttgtgcatctatggcggcatcctctgtctgtgtgctattctctgtccccgttgctgcttctgtggactcacgttactatggggatgataccaccccggggcctagctagaggactgccttgttcatgctgtcagaccacttggaggctaagactaattctatcatgtagctgtctgaaaccaagcatctaacagggggccaaagtgtgtgtggggggaggcttgtccccactcattggtctctatcaagcaaacattgcaccctagtctcagagagctgcacaaaaggcccctccagatgattaagttccttctgctacatgtccgtgaacaccgtcaaggtctctaccacacagggagcccactctgcacttttgacaggtgtagatacttgcagagagccaaagtctgttcactacagctctctgtcattcttgcatgaaacagccttgtggatgcccgatggcagctgtcatagcaccctcctttggcagtgctgaggtgctcatgcgttcatacgctcttgaaggcagtaaaagtcccaaatgctgtggtggaatacatgagaagggtccatatttattactgggtaaggaggcatgacagaaggaggctgtttggtatgtgtatgtgtgtaaatacatgtgtgtgtgtgtacacatatatatttgtttttgctttttgttttttgttttttttttgttttttttttttttttgttttgttttttgaggcagggtttctctgtgtagccctggctgccctggaactgactctatagaccaggctgaccttgaactcacagagatcttcctacctctgcctcctaagtgctgggattaaaggcattgtactaccagtctggttaagagcatacatttttaattttgattttttagtttatgtnnnnnnnnnnnnnnnnnnnnctccttgtgggtgagcctcaccacccattgaatgttctctcagacaggccctgacacagaagcaccagctcttaggagtaactgaaagtttcctgctagtaacctttgttagacccagttctacccacaatagtttacataaaaatgaagcaacaaaggaacccccgggagaccgtttgctttgaagcacaaatgtaaacggtctggtttcagcaccctcagattgctttctgtgcagaaaagggctaaacaatcactgcctgggtcactggcaaggtgacattcctggaattactccttagactgtaggagacgccaggcacaaccgctgttatttgggagaatgttcttgtaaaccctttcttcctctctgactgcacagccttctctcaagctcatgaccacagctgtgtgggcatctccagatgacacgagggagctggtcctcccatagcacttatctgtgatccactgtggttaactgacattttgtagagttctttccctctccctgtaggtgaaccatcagcccccccccccccgtattatatgggtatctagctggcagtatggtcttataagaattcagtcagcaaaggttttgaggtcttgcctaggtcctgtagtaggtgttccagaagtgagacctactaagtaatattaactaaagatgaaattttcattttgcacagggctgtgaaaatgtccctaactccatgcccatgactcttctccaaaactcatctcgtctcagagacctatgttagttatgtagcgaccactctctggaaacttagtgcactgaaaaaatagaaaccaaaaacaaactaagttgcatcacggttgaagtctgaagaactgcattcatgatctcatttgccccatactctgtgatctgcagtgtctgaaccttagctttctataaaatgtgctcacacactggagcctgtggtcctgtgcccactgcaaaacgatagtaactaaagcagcagagtagacagagccaggaaaatcacagttatgggcttgttgggaaaaaagtgaccatggggccaggagagatagctcagtgattaggagcactaactgctcttccagcaggccagagttcaagtctcagcaaccatgtggcagcttacaactgtctgcaattccagttccagggaatctgacaccttccaacaccaatgcacataaaataaaaaaaaattaaaaaaaaaaaagcaaccagcagagtgagaaattcaggtggcattcacgtgaaatcacaacagctgtatgtaacacatctgtgccaattacagacatccagtgtaccataacgtaggtccgagagaaagaatagaagtgagctagagtaaagcaggaatcaatgaataaagtcagcaggagcagttagatgactaagtggtgatgatagaagcttgctaccaagactgacaacccacgtttgattcctgggacctacaacggtggagggggaaagatgcctctgactgccacactgatgtcatggcatgcacacacatgcccccttgcgcagtaagcaaatgtaatacattttttaaaaaatggcttttaaaatgcaacctaaagggtttgaacatgtctaaagataaataacagtactcaaccagtggcgaggtccccctttcttcataagtttattctgaggtactgccgagatcaagtgtatgaaaacccaagttcactgttctttctgtcaagagctccattttgggagaaaggacctgatcagagtgagacattccttcagcaggaagttgtcaccagggtggtacctatgggtctgctggtgagaggacatcagagccctcattctggagacaccacctgatggcacagacagagctagactgtctgcttccatggatccactgcaagcagtccacctgggtcctcggaagaaaagacccaggcagctgggcaccccagtggcttccacgccttatgacatccgatttcgagacttggtcctcttcattttggaaaagaagatgggaacaactcgaagagccttcctcatggagctggcccgaaggaaagggttcagggtggaaaatgagctcaggtaggacagccctggtcactttgcaagcatgcaagagccctgaggacatccccaagggacccaaggggccagttggctaagggagatgagtggggactaaatgagattatatagaaactaattggtaccaaaaaataatattttttaaaaaaaatatggctttccatgactgactctgagattaagtatccaggagtgataaccagaaaactagtcagagaaccacatagaaaccactcgattccattctgtaccaaactgaaccaacaccattgggttcaattttttacattgctactttggagcagggagggtgttctgattgtctggctctgacttatacacacctgctctgctaagggtctatggtgggctaggctgaggtgagtcaccacgggtaccttaatggccttggtgatggttttccaaagggtggtccaagtgggcttcaggaagagatgctggttaaagatgtttgtctaggggtgacagatggcaccccagtgtgctatgatcagagtctaggcagggaggtgattgaagctaccatctgcactcgttcagtaagcaccaattatcattgttttgctgactattgtgtacgttcactctcttgacccaatgaaaagaatcaaagcgattcagaaagtcccagtaaaaggccctggtgtgcctgacggctgcagacagaagtgttggggttacagtgggagtggggggggcactcagttcactgccttcagccatgcaagttgggaggggtgctgaacataccgtgtcagagatgatctgacttttacacttgggattttggaaagtctttgaatttaaaagaaaattgccaaacgtttcttgctgatgaaatgctggctttggagacattgaggagacacatttccaaggtcagtactcaggaatttcacactccacatgcccagctgaggggatctttttagattttttgctaaaatgtccccaatcaaaaattcctgaggttctgggcttctctcttttctgagtctttgtcacatggtctcctattttttgttttaagtcatcacagccactctcaacttcattccttgatgttcttttcacacaatccattatttcaactcgtttttgagtataactaatctgttagccttatgtacagtgttagctttaaaagaaaaagagattagataggtaaagggggagggataaaacagaaaaaacatcttcaaagagaaagttaaaaacagaaatcaaaagttttagcagctaccaagatgcttttcatggtaaaggaactgaacagggaccagtcaggaaagggagagccatcaggcagggtgccactcactcagaaagctctctgataaaaggtccatacatctgttggaggcccatggactgagtcaccaatggagcaaatgagccgaggcaagtgtcaggggtgatgatgatcacgaagcaagtatctttgctggagaggtgaatcagagtggtgccccagatgccagcagccagagctatgcctgctgctggggagacaggaaatgggtgagcaagccgctgctgtgctcaggatggagcaaagttctcaggcggagagcacagacactttcaacgtgtgtgtgtgtgtgtgtgtgtgtgcgcgcgtgctgtagaggaagatgaatcacaggaagcagaagccccgacgataacagaatttctgtgcccagataaagagtcattaattactgtagggagaacctttaggcttcatctcctggtgctggccctttccagaccagcagttnnnnnnnnnnnnnnnnnnnnnnnnnnnnnnnnnnnnnnnnnnnnnnnnnnnnnnnnnnnnnnnnnnnnnnnnnnnnnnnnnnnnnnnnnnnnnnnnnnnnnnnnnnnnnnnnnnnnnnnnnnnnnnnnnnnnnnnnnnnnnnnnnnnnnnnnnnnnnnnnnnnnnnnnnnnnnnnnnnnnnnnnnnnnnnnnnnnnnnnnnnnnnnnnnnnnnnnnnnnnnnnnnnnnnnnnnnnnnnnnnnnnnnnnnnnnnnnnnnnnnnnnnnnnnnnnnnnnnnnnnnnnnnnnnnnnnnnnnnnnnnnnnnnnnnnnnnnnnnnnnnnnnnnnnnnnnnnnnnnnnnnnnnnnnnnnnnnnnnnnnnnnnnnnnnnnnnnnnnnnnnnnnnnnnnnnnnnnnnnnnnnnnnnnnnnnnnnnnnnnnnnnnnnnnnnnnnnnnnnnnnnnnnnnnnnnnnnnnnnnnnnnnnnnnnnnnnnnnnnnnnnnnnnnnnnnnnnnnnnnnnnnnnnnnnnnnnnnnnnnnnnnnnnnnnnnnnnnnnnnnnnnnnnnnnnnnnnnnnnnnnnnnnnnnnnnnnnnnnnnnnnnnnnnnnnnnnnnnnnnnnnnnnnnnnnnnnnnnnnnnnnnnnnnnnnnnnnnnnnnnatttaacccttggaaccccagtaaaggaggaaggaaaccagctctacagaggtgatttctgacctgcacatgtgcaccatgtcatatgctaatgtgcatatacaatcattgtaattactgctagtgatgattaattaaaaggaaaaatgtcaatggtactgattaacagtaatggctacacttctttcttaacttgtaaaattcaaaggcaaagagaatgctaagctctggaacaggctaatgtccacatctcctgtatacttttggctgccaagaggctcagtcttggctcctaccttccctgagatcctctatgtactgagttctctggattgagtctgttctctccaacatgaatgtgtcactttgagtggaatattcagctattctatgtgccaatagaaagctggttcctaaaacatgaaagagaagagatgctaagttccttgagtagttctgaacatcgaagaacaggatattgaatttattctgtcaccagcatcctagactttagagcaggttgctaacttcagctcacctaatacaggctcaacaagggaaccaaaatctcctgttttccatgccctgattgcatcctgagttcccatagagtgagatacttgaaagctctcatctgtcatctccccttctctataaatacttctgctaccttcccctgtgtcttgaagcaaatcactgtagtcaaggcagaagaatatgtagctcggaaggatggcgttccatctttctaaccatccaggcgcttcatgctagcttgctaacaatgctcaggttgttgtaaacacatcagaggacagcattgtcctgcaatggaagatgctgtcttagctgaaagcatcacaaaagcctttgagtgcctgctctgtgcagtatgtgtggagctctggaaaaacagaagaagacatgagccttgcaagcaaagagcttgctatgataaggaaatcatgaattgtatcttgaattgtgctattatcttaattacttttctttcttttaaaaaaatatttacttttatcttcgtgtatcaattaatgatctgcctgcaggtacgtttatatgtatatatgcatgtatgtatgtgcatatgtatgtatgtgtgtacatatgtatgtatgtgtaccacatgggtacagcgccttcagatagcagaagagggtgttggatggtctggaaccgggtttacagatggttgtgagtcatgtcacacaccatctctaggaatcgaacctggatcctctgcaagagcaggatgttctcttaaccacggaaccaactctccagcccctcggattctcttcttgctccaataaagtacactggcaaaagcaaattaaggaagacagggattagagctcacagtttacagtccatcatatcaaggaagtcacagcagcaggagcttgggagagctggtcacctcacacaggtgaccaggtacagagagcagtaaatgcctcgcgtgctgacatgtgactgtagacagactgtgatcaaaaactagctttagcctcctcaacaactcattcctttcggacagcttgtaacaggtgtgtgttggctagtctggctgcctctgccccccaccccccatctgttcactgtttgacctgttcacagtgcgactttcactggaaagtcattatctcagagcatttgccttcaaagcccacgggggaccttgtggtaataaaacccacattttctatttcaaaaattatgagcttcaagttaatgcaaagttttataataccattaaaggttgttaaagaatcaggcaagatcctgaccaaggctggaagagaaagctgtctcttttgaatgctgctgtgtgtagattagaaccaacctcagctgccttgctctcaagggttctaaaacacattggttgctcagagaactgacagagctgtggttggggtgggttgagccagcttctttaagcagctcagtttaagtataaatatggctaatgtcattgttttcaaaatacccaacatgacctctcccaggtgacaagaccatccatgagagagataacactcacactggaaagggtggtgggtaacgatggctgcctctcttattcatagaaggcatctttaattatatgcagtgaggcactgccagccaggaagagaaggcatgaacaggcagagtggtatataagaaagatgagaaaagccaggagtggtggtgcacacctttaatcccagcacttgggaggcagagacaggtgaacttctgagttcgaggccagcctggtctacagagtgagttccaggacagccaaggctatacagagaaaccctgtctcaaaaaaaaaaaatgagaaaaatactcagagctaagatttgtgagttaatcccataatacatagtttccgaacacctggagccctacctgacaatcctagcaatattttgaacattacatgaaattatacttgtcatatatattctacttaacatataataactgcatatacctaggggggatagaataataattgaatatgcatatatagcatgtaaggatcaaagtgactctgtctctttatagctctatcattatagccacctgtcgtagtcagggtttctattttctacaaacatcaggaccaagaagcaagttggggaggaaagggtttattcagcttacccttccacattgctgttcatcaccaaagaaagtcaggactggaactcaagcaggtcaggaagcaggagctgatgcagaggccatggagggatgttacttactggcttgctcagcttgctctcttatagaacccaagaccaccaggccagggatagcaccacccacaaggatcccttcccctcattgatcactaattgataaaatgccttacagctggatctcatggaggcatttcctcaaggaaggctcctttctctgtgataactccagcttgtgtcaagttgacacacaaaaccagcacacacacctccttcctaggtctccatgatataaacaaagggctattgtgacctctgtgtgtgtgtgtttcaggagggtgaacattacaacttatttcttttaaatgtatgttggttgcccacctcatatggctgatgtgaagactaagttttatacacatcccccacacacatatcccacacatggtagtgtgtcatatttgcaagtggtgtagcatctttacagcatgtctttcatgcacccatatttttgttgtttgttgcatcccaggagctcctccatccctgagcatccccagagcctatgtcagagcataggcagggctttacctagaggcagacttagagaaggagatgcagggcaaagccaggcagtgagaatgtgtgggggaggcagcactgcttgcaagatggacctcaggcttctgcactcatcctggaggggggcagcaaaacccagagagcccagagcagttggtggcctccctgcagatcttccgccttggagtgcatctatagcatctatttttagattcaggatagctctaacttcctgcagtcttgtagtccagacattcaacataaaataggaagacaaaaattatacccaagggggcttcctgggcagatatgttacagagagtttcttcattcatatctctgccccttggagggacggtttgcctttaagtatggcgcccgttcagataacccttctgtgaggagggtggaagggagctgactgaacagggaactcctctgctctggaacaagcactgagtcacagattgcaaactcatggctactcaagctcatgggctttgggttagaacagatctgtgatcaaatttccaccatgcagttattagcagggaagggttttaatgtctcccagggctatctcctcattgctatgtgggtctgataatccctgtctcacagcattactaataattaaatgtatgacatgtacatttaatgtatttaatatttaatactagtacctggtataaggcagtgcttccatactcttgatattttcaatactgaagaaacacctggagccgagttcccaaatccacatgtccccggggacagataattgtcactgtgcatcgataaggaactgtcagtggacagcagtggaggaagcaagttgccctgtgatactgtctggtgaggctcaggattgaacatgaagtgtttagtccaagagaatcatctgcaggaggccagtgacagccacaaaccagaagaaacaatgccagctctgattagacaacagggagacaggatcgagtagactcagtacgagagatgagaacagagataggaccaggatggacgtagcctctaaattctcgtcttttaaattatttgtagctaaggaccagtttaacaaaaaataaaatcatatttatcagtgctttaatctaaccatccatgataaagctggtttggcaatgtcaagtggaggagagtgggtctcattttggacactccttttactgataactttgccttccatctctagtgattcggtcacccacattgtggcagagaacaactcagggtcagacgtcctggagtggctccagctgcagaacatcaaagccagctccgagttcgaactcttggacatctcctggctcatcgaatgcatgggagctgggaagccagtggagatgatggggagacatcagcttgttgtaagtgtctcctttgctgggtggccactggcatgggcatcagaatccacagacttgggtcgattacagtcttttctcacggagttcacttagctctggtggacctccatttcatcctctttatataacaataatgcccacctcctgagatgctgtggaaatcgaagtaacatgcatacatggtgcacactgctgacatattaatagatgggactattttctttaaaaaaaaagaatttttagtgtgtgtgtgtgtgtgtgtgtgtgtgtgtgtgtgtgtgtatgtgtgtgcacatgcgtgcaggtgtccacagaggccagaagagagcaatagatctcctggagcaggttgtgagccactcaggtgtttggcaggagtagcactcagtcttcaccactgacccatctctccagccccacaacaagagctatttttatgaacacattcacacaccgatatttcagaatctcagcctggaaactcagaaaagtaaagagtttctttttttttccccattctgataattcatgaaaaaaaaaagaaagaaagaatatgacttcttaaatctaaatcttttaccaataatgctagagtctctgggaaaggggtctggatcatctgtaataaaggaaacaaaggaaataaaatttaatagctggttctttaaaaaaatttttattggttattttatttattgacatttcaaatgttatccccctttccagtttccccttcacaagccccttgttctctccccactaccctacctgcccacccactcctgcctcagtgccttagcattatcccaccctgggtcattgagcctccacaggaccaagaggcttccctcccattgatgcccaataaggccatcctctgctccatttgcagctggaggccatgggttccctccatgtgtactctttggttggtggtttagtccctgggagctttagggggggttggttggttgatattgccgttcttcctatggggtgcaaatcccttcagttccttcagacctttccctaacttccccattggggtccccgtgctcagtccgttgtttggctgcatgcatctgtatctgtattggtcaggctctggcagagcctctcaggggacagttttaacatgcttctgtcagcaagcacttcttgacatcagcaataatgtctgagtttggtgtctgtagatgggatggattcccaggtggggcagtctctggatggcctttccttcagtctcatttttgtgatttcaaaaatatatatcctgcacagacttaagatgtcacaatgaaattcattatctggtgtaattaatatgtactaataagaagaacaatcatacacgcctgtgactatacactagacaggtatgcaacacatttttgagtcctctatgattttgtcctctttcagagacaatcgtcatgaattgtcttaaacgttttctttatatttgagtaaatgtttatagttatatgtacacttactattggctaattaactgtcattcaaaatggatgcttatgctttcgtgtaggtgaatagaaactcctccccgagtcctgtcccaggctcccagaatgttccagcacctgctgtgaagaagatctcccaatatgcttgccagcgaagaaccacattaaacaattacaaccaactattcacggtaacgaggttttctcaaaacccagggcaaaaggggggcttgaggtttctttccctgagtcgacaagttaaattatgattttctggagatctcagaatgcttctccatgcttacccacctaacctgacctctggttcttcgtcaagtgggcctccttgttcatagactcccagctactcaggggtcagggttcatcagagtaaacacactcaggagagtgtcaagcatgggacttctcgtctctaactttcgagctgcatctgtgaggaagagccggaaacggatggcagccactgaacccactgaagcacagctgcgttctctgctaggaaggcaacatgcctcaccttaaataaccccggctctgggtctgagtgatgaacacagccttcatcccacaaacaccagctgtgttttctgaccacactaagagacctgaaagtctcaggagtgtgacagaaccctggctaaagactggtccagaagataggaaagggttatacccaacccagtcatgactgctgggacaccatggatcccaggtcactacttgattaaactgtttctaaatgtctaatgattgaactcagtttcctcataaatgcattagatacatatcttttcagttcagtgacagagtcccacaggggaggatgcaaaggtacaggagcttgatcctgactccaaaggcgctccattagtaaaggggacaggagggacttgcaagtgactcccacgagcagacctgctgacctggttttattgttttaggatgcccttgatatcctggctgaaaatgatgagcttagagagaatgaaggttcttgcctggcattcatgcgagcatcctctgtactgaaatctctgccattccccatcaccagcatgaaagacacagaggggattccttgcctaggggacaaggtgaagagtatcatagaggtaagggagaagtggaatttgctacatctccaaagaggtgaacgggagacagaacagatcgcataagtatgggctctctcctctatttatctataaatggatcaatatagcaagaaacagatatatgggtgtagacatataaaatccatacccaacacgatcccagtaggaagactttctcgggcagtgacttttactagcagcgaaagactcgatcgagccttagatctccagagcagcagaatattctgctttccaccccagtctgggtgggagactcggtctccctcagcgcttcctgtacagcacagggtgatgttcaatgggctgattgtgcatctctctgttctcaggagagactgggcagtagttacatgcttagcaacatttaaggacttcccaacgaggcacgggtgtcatctagtagcaagtttcaatctaaccaaatgcaaggtacatccttctagaaaaatatcggagctccagacaacagagaccagacctcataaggacttgataatggccagcttttcagtgggccaacaattaacccggtggtttaaaaagccctcttatttccacaactcgaatcaactgaaaagaaaatgaccagggtgatttgaacaatgcttgtcagagaatattttgtcttagagtctctaggttcagatctttatctttctgtatcctcgtcagaggttatgaaggtctaggatctatggtaaaccaagattttttttcaagattacaaggaaattcttgctttctccagatcagccagggaaaaaaccctcaagtttcaggagaaaccagtagttgggtcttgcgcgcgctcgactggccaggaagaacgacgctgcaacaggatccttctgcacacgtttattgggagagcttgattgtagaggcgaaaagacttcgagcccagaactggtgctgcttttataggcctaggaggggcgtgtctcacacccggattggttatgcactaagcctcatttgcatgttcctcatctgattggctactctctctcagtaccttacagaacctcattatcatacctcatttgcatgtctcacatctgattggttatactctcagtaccttacagaacctcattatcatgcctgggccaggcagtgtctttgcaaaaaactttactgcatatgtacacattggttgtttgtccaatcttatgcgtggtggccagcagtagtcagtgccactctgcaacggcacatgtggcttcccacagttggggctgggctgtcggtttgagactggcactttgattatgcagagacataactcaaaatcttttgttcaaccctccttgcagggaattattgaagatggagaaagttctgaagctaaagctgtgttaaatgatgagcgatataaatccttcaaagtaagcgactgtacatttggatactggggcgtgttttgttttatttatcctgttgtttgctgtcgatggttatataactcaggctgctataccaaatgccacagagtgaactgattagtcatagaaatttattttctctcagttctggaagcagaaagtttaggttaagtttcagtgtaaagattctgtggaggactttgtggttttcagtggccagccaccctcttgctgctgccctgacatagcagagatagagatggacaaatgctcattctcagctagctttctttattcttacattattgtgtgaagcacgactccttgcttagggaatggcaccttccacagtgggcatcctacattaattaacagacatgcccacaggccaaggtagtatggataattcctcattaagactcctttcccgggagattctaaattgtgttaaaaattaaactaaccagcacatcccacaaagacactacatgccaagacttacctatcacactgagactacctaccaagaatctgtcactcatggttacaaatgtcaaagggacacaggattcaaatagagcaagtgtggtcctgaagcacaaactctgtctgaaaattcctcattgcacctcaatttctgggacttagggttgaccaccctccaatttgtttttgtttttgtttttttaccttaaagtttatggtactatggccagtccattcagttcataagtgatacagggcctaacatacggccagaacaggagctaggctcagagtacagacagaccagggttgaagtttgtactttgctgttatccacttgtagatggggtgaatttgctgaggatctttgagcaagatttacctcatgagtctccttccaccaaaggtgtggttcaggacttcatgtaaaagactgcaaaatctgaagacagacagacagacagatagacagcttctcatacagacacagaacaggcttcttcttacaccgatgcccagccatctttcacctgtttcgttttgtgacactttgattatggaaggatccttcagaaacaaaaagcctctcaacgttaccatccccaggctcaagagagaactccctaaagtgcagagagactgagcaagagtcccagaaccaacaaaaaagctgggtgtggtagcgcaccttttaaacctaagcactgaagagttagagagaagcagagtggccctaaggctcactggccaatcgtcccagcctgaggttgacttctggtttccaaatgcacagttatgcatgtctgtgcaagtacatacatgcgcgcgcacacacacacacacacacacacacacacacacacacacacactcactcactccccatccccttgatgttttcaagagaaactgggccaaaggtttacttatacttcttgttcctggcctgagactttggaaagtgtcgctctgttgtcatagcaacgatttgggtggataacagcctacctttccctccctttcagctctttacctctgtgtttggtgtgggactgaagacagctgagaaatggttcaggatgggtttcagaactctcagcaaaatacaatcagacaaaagcctgaggtttacacaaatgcagaaagcaggtaacggtcttggggaagtcacgggtcattctgggcttgtcagggtccagtgacatggaagccagtttgacttgctccagacttgagactccggtaaatcttggctccagcacttgtcactgagtgatcttgagtaagctagttaaaaccttgagccttcgttgcctcactggtgaacctgagctaaccagggactagatcagcttgcgcaaagccctgagaatatgagaacaaggcctcttcctggggtgctatggttctctttatccagaagttacagcagagtgggcactgtcccgattcctacagacacaccttaggtctggctgtctccctgtgtaagaagcatgcatgaagggtcgaggacagaagggtaagctgacgtgcaagaaggacagaggggagtactgaacaaagtacactctcgacggcttggttcacactgggaatgtgcgctgggggctggaaaacggaagagaaaggggagaaagtctagccacagccttgatctgtccaatcagagccctaagcctaggaagagacaagagtccagagcagagacggaagagctctcattatcatctgaacgtctggcaagccccgcggccaccacgtaggccagttcactgccttccatggacagtgctggtaccttttccagaaatgaggagatgcgattcatagccccttctaaacgtgtgaaaattttttaaagaattatttatttatgtatatgagtacacactgtagctatacagatagttgtgaacctttatctggttgttcggaattgaatttagtacctctgctccctcaggtcatccgggtggtccaccatatggttgctgagatttgaattcaggacctttgaaagcacagccagtcctcttacccactgagccacctcaccaggccaacatgtgaaatttttaaatgtttccttttaatgtacaataaaaatagagtaaaattgtccttcaagagggagtcactgctatagttccctagcttctggggaaatatgtgaagttatcaagtttttttaatatggaagtgatagagtcttctaccagaggattctgggtatgcgcaattattcaacagctatcttctgtttaagtgataatagaaagacagacagacagaatgaacaaaaatgatatcataagaagtggtagatgaggtgaatcatatcttgggggggtcccatcaatgacactatagaaagcccctattaatcttataagcccactaagttctttataaaaacatttttatttatttttagtttatgtatatgggtgttgtctgtatgtttgtgtatgtaccacatttgtccagtgtccaaggaggccagaagagggtataagctcccttggaactgaagttacagatggttgtgtgttgctgttggtgctgggaatcaaacctgggccctctggaagaggagctagtactcctagctactgagtcatttctcaagtttgatgatttctgagtgactattaataagctttatataatgccacacaggaaataaaagagtctaagaaaaaaacatctaatatttctactctggatgccagaaagtgtagtctagtaagggtgttttacaccagctctagagatgctgttaaagagaaatgtatatgactatcaaacctaagggcatggagatggtttggaacaatagtgaggactcctaacacttacagcagaagtggggaacagtggaatattttctcagaaagccttgaacttgtgatgtcctgtttcagcatcttgagtgctaggaatgcaggttgaggtgttggctgacatccacacagtcttaaaaagtcataacctcacattcttgcacatcatctagtgagtgagcggagggatttcctggcaccacccgaggtgaacttaagtgccagtgatgatggcaatgtctatatatattagcacctaaaagaatgttgcttcttagatcaaacacacacacacacacacacacacacacacacacacacacacactcactcacagcagccatgtcccaatcaaaaggcaactgttgacaacagaacaagagaagtttatgtcgtgtcagttatcgatatgaagatggcagatcccccaaggaactggcttggtagtaacaagtgataggtggattagcatcaccatcttttcctggtcctgaaaacacagttctgcaactgtcccgtttagagattacagatgactttgaacttggtaactgtttacagtgtgctcaagccaaatgactttctggtcgtgtctcatcctggggtgagaaacaggagccaatcagcagcctctagagaagtacatccccctcctgtttatcgagtggcatttggatcccttaaatgaaagttcagcgtcttatatggaagcatgactgtcatcaggctctgactctcccagacatgcccagcttcccaccagtactttaccccaatccttggagataagcctccttctcgctctgcctccctcccactgctctgtggtgacagccaaatgctctgctctccctcgtgaccctgcttctgaacggtcattggttcatagtcctcaggccaggaagcagcacgtcagcccctcgaaggcactttacacttggctttggacactgacccacccctcttcctcccactgtcttttctaatgaagccatcactgccaagtcctgaattttcctacccccttttaaatagtatggcatagcttgttggtcaagaaggctggacacagtgctacatacatggaatctcagcacttgggaggtagaggaattaggagttcacagaatctgggcctttcctcaaaggagcagcagcagcagaaagaggaggaggagggggaagaggggaggaggaagaggaggaggaggaggaggcagtgttggattttcattataatatcagataggatcaatttagattccagaaggatctgaatacttcccccttgatatgaatattgtatacttctacatgaggaagtcaaaactcctttgaaaccatgaaaaaaacccaagcaagtgggcaaggcagtgccatagattactgggctctgtacagagtctggccaatgcctaagagcactgtatgagacagcatcctctcctatcaacagctggtcctcttatgtgtgcctttctctccactggctgatcaggattcctctactacgaagacctcgttagctgtgtgaacaggccagaagccgaggctgtcagcatgctagttaaggaggcggttgtgacatttcttccagatgccttggtcaccatgactggggggttccgcaggtaagtgatgtagctgttttagaacccctcttctacctgcctctgaaatggtgcaaaacgccttttctgacaacagaaccaacctcactctgtagctttggctcctgctgcctgtgtttcgtgtcagagtctcagatagcttgacaccccgcacacagagctgtttcttacctctgtgactttgctcaggtgaaactttctctacagttttgtgaatttggtactaatctgacttcacaattccttcagactcaatttagatgctgccacctccaggaagccctcctcgactccttatagctctattctgggctaggaactttcttctgtgcttcccaggtgcctactgcatcatgtgtgctttccccgtggagcttagttcccacggagaccagggtgtgagcctgaccactaagtagatgctcaagaaactggttgagtcaaagaaagctcaatgaacaagccttcagacatgaaatcttcagttggatacaaatgcctccatttcagaaagaggcttgtccctccacctctccttttgagatcttacctggtcacttgcatcaaagaggttttctgggctgggtctgtcacttagcagagtggctacttagtatggaggaaacctggctttgattcccagtatccagtaaatcaggtatggtgatgtagacctataatcccagcacttgggaagtacaggcaggaagataagaggtccagggtcaccctcagcttcaaaacgtgctcaaagccagtctgcatcatataagactccatccttaaaaaaaaaaaaaaaacaaaaaacaatgataaagagcaatctcttaagccataccatagttccaagaaggctaccttgtatggtgttaccaaagctcttggttggctgcctattgtcatacatgtttctctatgtatgtgatgcatatagaagtaatatttattacttgctttccatccatatacaacaacacacattctggatgaagttttttttttttctgtcacaaatttgttttgcaagaagtgagttgaacaaccaggaatagctggttttaaaatgttgtgagtattttgaactacaaacctcacacttgagacacaataacaaagagttttgttttgttgttttgtttttaaatgaaaggctaaaagtccaactgattttccttttgtgcttttttccccccaaactaggggtaagatgactggacatgacgtagactttctaattaccagcccagaagccacagaggatgaagagcagcagctcttgcataaagtgacagacttttggaagcagcaggtaaggaggccagatggcacctgccatttaaggctggcttagattgatttctgcttgtttcttttccgtgtgtgtgtgtgtgtgtgtgtgtgtgcttgtgtgtgtgtgaatgtgtgtgtgagtgtgtgtgtgtggtatgtatgttatgtttgatatgtatgtgtgtgtactgctgtgcgtgtgtatgatgtgtgtatgtgtgtgtgatgtgtttgttatgcatggtgtgtatgtgacacgcacatgtgtgcatatttttgcatatgtgtaggcacatgggtgcggacatgtggagcctgagtttgatgttgaaaatcatcttccgctacttctccaccttattcatggaggcaggctctctcaatcaaatccagagctcatcgatctggctagtcctactagccagtttgttctgggaatccctttgtctccaccttctgaggctggaattgcaggcaggctgtcatgcgtaccaagcatttgtatgggttctggggatctgaaccttggccccctgtgttgtaaagcaggcgctttaaccaccgagccatctccctagccccttgctaatcttaggtgttacatgatcagtgtacagtgactactattctcacttgtttgtaacacctcatcgcagcaccatgtggctggcatgagactgaccagctttgggtcctaggcaacactttacgggcatgcatcttgtttgaagaaggaagataaggagggcaagctgggccctgcagaggtcatggccaatggctcacactggatgaaatcaaacctgccacgtggcagccagtggttaatggtcaaagctgagttaagttaaccccacagccaaaaacctctggctctctagtcaagcaccatttcctagagagaccaagggctctttcctgggatcctacctgtctggctgaatggaggaggctggaccagagttttcctagtacagacagctttccccttcctgggctgagctcactgatgcaccagagagataagaccagataaagtgaaaactagaaggggctggagagatggctcagtggttaagatcactgactgctctaccagaggtcctgagttcaattcccagcaaccacgtggtggctcacaaccatctgtaatgggatctgatgccctcttactggtgtatctgacagctatagtgtactcacataaaataagtaaataaatctttgggctgtggtggcacacgcctttaatcccagcacttgggaggcagaggcaggagaatttctgagttcgaggccagcctgctctacagagtgagttccaggacagccctagctatacagagaaaccctgtcttgaaaaaacaaaaacaaaaaaaaacaaaaacaaactagaaatagccagcccccgagagccatgagatttataaatgaaagctagatttcagatgcagatccaaattcatctgtgagaccattccatgtccccccctgtcacccctcctgagaagtcaggagaaggtgcactggagaaccccttcagtgatagcaagataggcatgacaagagtcagaatacttttccaattctcgattctctgctccaggggttgggagtgggggacgttcggggggttgggtaggggagaataggggaagattaaagactcactgaaagaccaaagaatacctccccacccccaggcctgttgccaaggctggaaactcattgatgtttgtttttgtgccattgtcctatgctaagacatctgctggagttgagaggtgacagaggagccctctttgcatcgctagtttcaaggtagttttcctctggaccctgggtagagatagtcattagaagcccaggccctgcattcggagccaatagtaaaacaggcctaaatgagactttagaagtgctggtacaacctggggtggtgcttaacagttcatggcccattttctgtctgtgctaacccgggattcaatgaaagtctcggggattcaatagaaaatctctggtgtctgacaaatggtggctaagatcagcagcagcaggattgcttattgaattcagtttgagggccaagcactgggctgcaggggacccaggaaccagcaggccagttccttcccttccctcaagtaccgtgattcagtgtccctgctctgaatgacccatccccctgaagccctggacccatccccaataactcaattgtgaaatcagatgagttcttcccatctggctcccacttccacttgactcccttccctgccagcctaaccctgagcttcactttacagatggccgtgagcacagcttagtacagtgcataccggtgtactcacagtacacacacagcatgcccacaagatgcttaaatgtctgcgaagtaggttgaacagcctttagtgctttctcctatctaaatggtgtcctttggagacaacccctgggtcagaggtaggagaaaggaggtgaagagcttagaaatctcatctccagggaggttgtaattcccccaaacatttgttctgcctgaattccaagcagactgctggtagctcacctcaaaggaaggagagagacttcatgactcaggcttgcggtcaggcctggtaaatgggaccggggtacagggaccctaagtgcttcaggtggtctgtcacccctggagttcatggaacttctgggagtcaaaatgttgagtctacagagtaagactgtaagtcagaaccaaccatggtggctcacacttctcacctcagccattcaggaggcagaggcatgagttccattacaggatacctagaaccaaaaggagtttaaactggccatgaccttgggttctgaattcataggtttcactgacctcagataggaaaagatactttaagaagaaagaaagataggaaaaaagaaaggaaggaaggaaggaaggaaggaaggaaggaaggaagaaagaaagaaagaaagaaagaaagaaagaaagaaagaaagaaagaaaggaagaaagacccacacctatactacctatactgagcatccataggcacctcctatcgtcagtctctaaatactacactgtgacaacactgcatgcacttatatagtattaagtaattaatctaagagtgattgaaagtctgtggggatgtgtgtggctcatatataaacattcttaccactttgcaggaagaacgtgatcatctgttgctaccgtgatgactgctagacgactgagggataactatgggacaactgagggacaactgtgggataactgagggatgactgagggatgattgagggatgattgaaggatgactgagggatgactgagggatgactgagggatgactgagggatgattgaagaatgactgagggatgactgagggatgactgagggatgactgagggatgactgagggatgactgagggatgactgagggatgactgagggatgactgagggatggctgtgggatgactgagggatgattgagggatgactgagggatgactgagggatgactgtgggatgactgagggatgattgaaggatgactgagggatgactgagggatgactgtgggatgactgagggatgattgaaggatgactgagggatgacagggatgactgtgggatgactgagggatcactgtgggatgacagagggatgattgagggatgattgagggatgactgagggatgactgtgggatgacagagggatgattagggaatattgagggatgattaagggatgattgcaagatgactgagggatcactgagggatcactgaggaatgactgaaggattactgagggattactaatggatgactatggaatcactgagggatgactgaggaatcactgagggatgactgagagaatcactaaagttgatgactgagagatcactgaggaatgacagagggatcattgaggaatcactgaggaatcattgaggggggaactacaggatcactgagggatgactgactgaagaataattaaggaatattgagagatgattaagggataattgaaagatgactgagggatcactgagggatcactgagggatcaatgagggatcactgaggaataactataggatcactgaggaatgactgaggactctctgagggatgactgagagatgacttcccccacttgagtttgaatactagattggttcctctgaggagaagatgggaaggaactgaaaacaaaggtcaagaatcctggctggaggactcctcatagagtcctgacaacacttcctgctcttacaccattgcttggggtagcctatggctaattggtccactaagttggaagaggtagatcctctttcttgtaagaagcaaagctgaactgccctaaccccaccctgatccctccgacccccataccctgggagcagagagaaggaatggcagggagagctccttcctagcctagccactgatcttctaataggaagacaaccctgggcagccatggccgagcctgagcccaacctcagagcagttccagaggagataaatcacactgagggacgtggggacaggaaaggaaactgcaaacagtaggggaaacccaacagaaagctggcctggaaagctaggaccacgtctgaggtggtaccaggctccactacagacagcacccagaatcagatggaacgccccagtcaaagcctcgccaagttcaggatcaattcacccaagaatgtcccatctgtcaccagccaagtgctaccccccacccccaccccgtgtgcagcacaggaacccctaggggctggtgcttgcctaacattcccttgaattacttattaactttctggatagaaacttgagataaagcaggcttcgtgggccttctttcactgcctccgagatggagagagagttctttcagggctggggtgtactcagtggtagagtgcatagctagcaggttcaaccctgagcattgcaaaaacaacacaacaacagatgtaacaggtcaccatgccccacactgggtctggaatttcagacacaaccttttgacccagtccagacaaccgacatgcagggaacagtgtgaatttctgttcaccgtgtctttgcttttcaaggagcaaagttgtctctcagaagcaaacaaggagagatggaggctctgaggttttcttattggggactttgagctcagcctttctgtggagagaatcatgtattacctcctctcccagatgctggatgaggaagaacaaaaatgcatccccatttgttcagctctgaagaggctctcttgagagcactgtaatatcacatgggtgccccacccccagccccctaggaccctttctaaaccctcccattgcttttcaggggttgcttttgtactgcgacatcttagagtcaacctttgaaaagttcaagcagcccagcaggaaggtggatgctctcgaccatttccagaaatgcttcctgattctgaagctggaccacgggagagtgcacagcgagaagagcggccagcaggaaggaaagggctggaaggccatccgtgtagatctggtcatgtgcccctatgatcgccgggccttcgccctgctcggatggaccggctccagagtaagagctgtctgctactagctttcctggctcaggggaagaaagcttccgctgcggggcagaaggctgagagaactaagggaccatgcccccaagcctctaaactggggcatggtttgggtacatgttcacacgagttagattcatttagattcccaatgtatggttcaccaagccagcagcagtggccttacctggggacaggttagatttataaattcttcactgtatacctaccactacatcagaggctctaggcagttaagctctgacacggatgtttgtaaaacaccctaggtaactgagaggtatctcaggtgagagctactgaaacctaagaagtgtcagggtagtgagtaactcagatggattcgggtcctagacctacagaaggacccaaccctgcctcttggacaccttcctaaagcctataagatagatgggagtggcgccctctgggggcagcagtgcacagctgcagggtggtcgactcaaatgctgctctaagaaactagtgagggttaaaaaaaaaaaaaacaactttctttttcaagtttcaagaggctgaagctgctctgtcccgggttgcgccgctttcaggtaaataacactcctccagccttctctctaacagcggcgctaacctcacagggctctgtggaggactctctgggacagcagtccatccactcctcttagatgtcatgccaggctcctgttaagcgtctgttgccctgtagcctctggggctcaggaaaagactggattccttagttagggttatgatagctgtggcaaaataccacgatcaaagaaacttggagacggaagggtttattttactgacatttctttatcactgttcatcatcaaaggaagtcaggacaggaactcaggtagggcaaggacctggaggcatgagctgatgcagaggccttggaggagtgtggcttactggcttgctctccgtggcttgctcagcctgctttctcatagaaccaccagcccaaagaaggtaccatccacaatagactgggccttctctcattaatcactaattaagaaaagatcctacagatggatcttaccaaggcattttctcaatttaggttttcccctttcagataactcaagcatgtgtcaagttgacacaaagctatcccacacagcacaactctcttggccattctgcagccattttggtttttaatcacctccttcgagccctcgttcagtgatgctcaccatggaagccctgctcagtctggatgcagcactggcttcctatgggcccatagttttcttatttcttgttattataaaccatttgtgtgcccagctagattctgctccggaggaactggcactctgcaggtatttggcaggtgaactgaatttctctctgcaccacagaaacactcttggccttggccgaggagttcaggaatgtttctcactcccaaatcacacagggcagggaaccgggagtagcccatcattgactgcatataaccaacccccattacacctccagcctctccagttgctgggaaccagtgttagctgtgggaagacactgccagtcaagagctggggtgagctaagcaggacccacaacttcccagaccagcgctaagcaaatctgcttcctcagcaattgttacacaaagctggttccacctacagctgcttctgtaaagggcttctggaggcaatgtctcacccagtctcagaaactttccagcagagaggaaatgaattcttactgctagagggtgcgactgtcccaatgttttgcctaatcccagggggaaagacaaagttctggacctgggaagtttccaggtttctctcaggaaaccagcagcagtatttgtgattcactgtccttgtttctagtgtttgctggtcacttgtcctaggcttcagatttgctccctgaaacctcagggtattcttttgatcatgatagatgtcattccggggcaggtgactcttgacagaatctcagattgagtggacatcaaagaagaaaggaccttaacgttcactccctccaccttgggacaaagcaaggttcagagaagctacgtagtaaggacacatagataggcataatatctgggccaagatctccccactcctcaccctctattataataatgatatttgaaacttaaaacgatttaggtcacattttcctctggaccaggtattattctagaaacaacgctcctactgtccatttatccactcaacagatattcacacatcacctgccgcctgttgggcagtgattgacaagggtccaagccaatcagcttcttgttcacattgagtttctgttctagtacagggagcccagagctcagccacccgggagctttgccctgaggaagaaagtcaccccaagaatttatgttagagacagcagtttcaaacacccaagggcttcggatagctctaaacaccatgtaccagaaataatctggactggagggtaatttgttttaattctctttgtagcagtttgagagagacttgcggcgctatgccacacacgagaggaagatgatgctggacaaccacgccctgtatgacaggactaaggtagtgttcccttctggggatgggtgactgacctttacctgtaagccctccctttgaacagattttctaaaacaatattcattacacttatttattttttttacattggggaaaatggttgcatgtagaggtcaggggagccagttctttcctatcacataggttctagggatggaactccgggcctcaggtttggcagcaagtaccttcacctgctggtcccacttatcccatccctacccccaacccaaactgattttagtgtctaggtttgcttctttttgctgcaaatgttctgttctctgtggatcacagttgaaaggagctggaaacattgcttcaacccctactgggcccagggtgcaactccaggcttctacttcagagagtgaagtagcagggctctagaaccagcacataggtgagcagagctgagctggccgtgttcctggtgtttacggtcttttactccaaagaaaatcagggattcctgtaaatcataaatgtcacaggaataaccatccagtgtaggggcaatcaccttctgagggggtcatcaatgggtgtctcccacagtagagcgacacaggtgcccagaggtggatgggaagccatcaagccccagtcactaaccatgggggacttgagtgtcagcagcatctcattaaagccacgcctcagaaaagtggcaagttaccatgtggctggctgatgaagaatgaacaattctatcgtgaaatccatgaacaaaaaggtctcctgttcttcaagtggtcaagggcaccaaattaggcttggagggaaaagaaggtataaaatcaccaaaagcaagaactgatctccttgcctcctaggggtttattatagtttaaaagaaatggatatgcattggatatctaacacttaacctagaactttaaatagactgacagcaaggcctctctgggacttttgacttcatcagactgaagtgtgattcaaatttcaatatattttattgcggggggggggtggggagggagacagagacagaaacacagagagagagacaaagagagattcagagannnnnnnnnnnnnnnnnnnnnnnnnnnnnnnnnnnnnnnnnnnnnnnnnnnnnnnnnnnnnnnnnnnnnnnnnnnnnnnnnnnnnnnnnnnnnnnnnnnnnnnnnnnnnnnnnnnnnnnnnnnnnnnnnnnnnnnnnnnnnnnnnnnnnnnnnnnnnnnnnnnnnnnnnnnnnnnnnnnnnnnnnnnnnnnnnnnnnnnnnnnnnnnnnnnnnnnnnnnnnnnnnnnnnnnnnnnnnnnnnnnnnnnnnnnnnnnnnnnnnnnnnnnnnnnnnnnnnnnnnnnnnnnnnnnnnnnnnnnnnnnnnnnnnnnnnnnnnnnnnnnnnnnnnnnnnnnnnnnnnnnnnnnnnnnnnnnnnnnnnnnnnnnnnnnnnnnnnnnnnnnnnnnnnnnnnnnnnnnnnnnnnnnnnnnnnnnnnnnnnnnnnnnnnnnnnnnnnnnnnnnnnnnnnnnnnnnnnnnnnnnnnnnnnnnnnnnnnnnnnnnnnnnnnnnnnnnnnnnnnnnnnnnnnnnnnnnnnnnnnnnnnnnnnnnnnnnnnnnnnnnnnnnnnnnnnnnnnnnnnnnnnnnnnnnnnnnnnnnnnnnnnnnnnnnnnnnnnnnnnnnnnnnnnnnnnnnnnnnnnnnnnnnnnnnnnnnnnnnnnnnnnnnnnnnnnnnnnnnnnnnnnnnnnnnnnnnnnnnnnnnnnnnnnnnnnnnnnnnnnnncccaggaaattgtaagtggctcagtgagaaaccctgtctcaaaaaagtgaggagggggaaatgttagaggaaggcatccactgttgacttctaccctccatatgtaacacgctcatgcacatatacccccacacatatgcgtacacatgcataaacatgcactcacatacacacacaaaggagaatagagactcagggaaaaaatatccacgtgtcatttgctaacaggggaagactgtcacgatttcacctttggatgggaaagtgtcaaaactacagaaagccttggtcagttggtggttggnnnnnnnnnnnnnnnnnnnnnnnnnnnnnnnnnnnnnnnnnnnnnnnnnnnnnnnnnnnnnnnnnnnnnnnnnnnnnnnnnnnnnnnnnnnnnnnnnnnnnnnnnnnnnnnnnnnnnnnnnnnnnnnnnnnnnnnnnnnnnnnnnnnnnnnnnnnnnnnnnnnnnnnnnnnnnnnnnnnnnnnnnnnnnnnnnnnnnnnnnnnnnnnnnnnnnnnnnnnnnnnnnnnnnnnnnnnnnnnnnnnnnnnnnnnnnnnnnnnnnnnnnnnnnnnnnnnnnnnnnnnnnnnnnnnnnnnnnnnnnnctggctgactggctggctggctgattggctggctggctggctggctggctggctggttggctggctggctgactggctggctagctggctggctggctggttggttggttgaaattaagggctcactctacagcccaagctcttgcctctgcatgccaagtactgggattccaggtcaccacaccttgacttctgaccaaagcagggtgggatgctttagccaccactcattctaacaagacagttcaacaagtctgcactgaggtgccaaaggaaaatgcctgagagtgtgtttctccttgtgcttccagagggtgtttcttgaagcagaaagtgaagaagagatctttgcccatctgggactggactacattgaaccatgggaaagaaatgcctaagacggagttgttgacatttttcttttcggtttagacaagctgtgctctgtgttagtaaaagatggcttgggaaagtctgggattctttgacctcagaggatgctggcagcaagtggatcataagtatactatgcagagagaatattctaaggcaactttgaagtcttgataaaccaggatgcagccatggttcacattcttgggccatctgtcctactgttgcatagaattcatagtcttttgtctgctttgtttgaataaaaatggtcttgtcattgcagcatcatctagagaagcgcatcaatgcccacctgactcctgtgtgtctgaatctctgtgtattgccaataaaaataggaaacagaagcatgaagttttctttgctttgttcagttattttatttctaaacacaaatgggaacgtggaagagtaaaagcttgcggttgattctgaagggatgcatgggtgtaattagtacatcagaggttcccaagaggaccctgggccccctcagaggtcctgggaggcagggtgctgattcctagctgtatccactctgctctgagctggttcctttcgcacccagccctgcaatgtatcagggaagtgttctcattgctctctcttggatgcaaaagcaatttcctaaaccatacaggaaagacttccttttcctcctggagctcttaaagagagcgtaggtttcatctcagggaacccatgggaggaactcagtctctgcaacagccctcacctaatcattcttacttcccatgtcctccagtggggcacaggacagattctatgccttgaagggacctaaaggccacctattgaagcaatatcactgtcttcagcctgctgtagagctggaggcaaactgatgagtgtcagctgttcccaggggatgagggctggaaggaagttgtgccgaggaaggaaagtgatgccccatgagaagcgaggtccctcaccacagggaccctcgtaggattctcctaggaggacaagaggaatccgatgtcactagttactgtgcttttccccatagagggttaaccagcctgacccagctgcctcttctccaagaaacgctttgccatttcttaaggcctggtcaaaaaaccagggtggccttgggttgcaacaggacaatccggtctgccccaaaagattcgattgtgtcatactactgctcctctaggaagagacaatccatctgggactgtcagtcacttggccaagaggccaccccccagtaaggtcctttcacctaaaactaaggttttgggaggaataactaactgtccttctaagaagatggtgtacttcccccgagccccgaaaaaaccaccccttctgtgaagttgcttatagaactgttattgcaaagctttgccaagcccacctgctttgtgaaatttactcaaataagcttaacttttccttttcttaaaaaaaaaatctctttttcatacttttggatataggccagagcctaggctgtctctgatgctctgggctttagtgcttttttctctgaagccatatccttccacttaccaagtgaagtgactgcttgtctgacatctgactgcagccctccatgcttaagcaaaaagccccgttcttctctcttcctatatacttcctcttcttccctctcttccatgcatctggcaaaatttaaacctttttttctttcttccttttcttttctttgcttaaatgctaataaagctatcccaaagctgctatctgagctatttttttttaacctttcattattagggccaagaatttgaagaggataaccccaaattccctagtaacatcaacattgcagcagaacaccccaaggctgggctcgggcaatactgggggagatgaggcttcaatctgtagcacaaaaaagcagcccacgcccttgggaagtgagattggcagcatcagtttgaccagagcccaggtctcacgggcatccaggctcaagcccaaagtctggaagcacatgggaccctgaagtgaacgtgtacatggggctgcttgaatccaagctcctcccaataccttaaggggtctaagaacaaaaccctcagggaacccaagggttgtctagcagggtaataggacattctgccaacccttaaggagacaggccttcccactgctggtgattgacagatgcctctccagccactttagctctatccattacacctttagagtcccatgccacagtcactcaaaggggatcgctcagcacctctccatgcaggtatgtgccccagtcatgggatagtgcatcaaaggttcacacatgacctcagcagcctgtcgagtggttgaatggcaaccaactacatggcattggctaaaccagtgctcccagattctccctcatgtccaaacatgggcatgggaatctaaaggtgataagtcttcgtaccaacagaagtcctgaaccttgcaagtttagtgaaaacaatttgaaatgaagattctaagcaattgattgtaaggagaattaaaatgaagaacacaaaaacaaaaacaaaaaaacaaaatagtcatactttattttataagttgcaaggcttgctgatctgtatatttcagtcaggcctcacagctgtcctcggggatcagttttataagtataaaactgaggctctaggtggccaacattctaggctggagctgaaacccatatatgtcaaagccatagtctcttcaagttctcagggagtctaaggtcattacccatcatgcaagagaaatgaggcttcatccctgggcacagctgattgaagatgttcaaatgtgtttatctaagacctgagcccatgaaataacccaaaattgaatttcagaggggctttgaaaggcagctgttaacatgtgatggtcattgggtttacagaaccattccctatagctcaagaaatccaactatttctaaacaaccagaggccccatgcaagaagagttggttctctgggatatcaaggtggctcaaggagaccatggatgtttctagagatgccctgaggcctcagctctcccactgtgaagcatggtgtatttcaaggcagtggctgtgcactagaaggtcacaaggaaactgtctggggaagtgaaggcaaagatcaggcccgaactggtgaagttgtccctagatgtcccttgcatagcaggtgtagctatcccaacccatccctttgctcctgtgttcatctttggtcctcttgatgcctctccctcacaaacatcttttctttatggtacttcaaagcaaatggctcattacaaagaaaagtcattaaaacatgaatatcagttttatattagcttacttctctcagtgttatgataaagtcaacttaagggtggaggtatttattttggttcagtccaagaaaggtgtggcagcaggagtgtggggtagctggccaaacactttatctgtcgtcaggaaggatagtgatgagttctgcatgctcaacttgaattcccagaaccccaggctatggaatgatgctgggccacattcaggtggatcttcttactcagttaaatctttctggaggtgtgtctccttggtgattctcaatcccattgagttgacagtgaagattaaccatccaggactcgagcatcctaaaggttaatatgtaatgtgtaacacagatctctgtacttgtgatttggaacttggttgacacccaaggggaaaaaaatggtgtgcagagtcgaagtgaggagactgccagtgaccactagagttatttttaaatgtcaaaaattcagattacaggccacagagaaggtttagatttccttgtcgactttgtgactctggatggatgataagtaggatgggaagatgtgggaagaactgggtgaagaggattgatatctctagtgtctactaagtggaaattgcttcctttattcctgctgtaatttttccagtggccaaaggaagcacagaacccaaaacaggctcggggagggtagatgagctcatctgacttctcaaagtgctcagcagcacgtctgactagggagtgcctagctcattctcagctgtatgacacaaatcagccacatacttccttgtgtcggggcatggacggctccatgcgagctttatcctgagatattcaaaaggaagaaatggcttctgtcacatgtctttggttaggttttatgcctgtcctaacttgtgccaagctggccttggtcaatgcaccccccaaaaaagccaactctcaaagctttattattttttaaatgataacatttggagcaggtagaggagaaggcaggacactcgggagccaagccgtttcccaaaggcagacttctctcgattcagaaacaggacatacggggctcatctggacacatagtcgactcacctgggtcgccttgctgattaccctgcaaggtctgagatcgaatgaacctgcctgcaaccatcccctaaaggggcaaggcagccagatgtgtcttggatctataaatgaaattgatgttgagtgagaggcagctgactcctcgcctctccaagcatgaaccctgagcacagattccaggttttcagccctgatccagctctgggtctgctccctgatgcggtgacatcattctaggctcaggctgggtacaagccaccaaagtcctcttctcctttctagttcttcaggaggacggtaggtgtccggcaggggctcctcgcttcccgagacagtcttcacatatatgtgcccttcttggctgccccgtgggttcatttcatgtgtgggtgaccgcctaggattcttgagaacacaacagatttttaaaatgatacagtagagactccagcttcccgctaagatgaactcaaacagccatattgacccttgaatgggaacagcaaaattcagaccaaacatttgaaacaatggttggcaagacagtgggcatcgggagagtaaagacactgaaccttgaggggcaggaaatgagtgacagttgcctgagcttgttgtcatcaaggggttttcaggccatgcaactctccctggctaattattgctggcagaccgtctccagcttttaacttttaatctattcgagactatattcagaaagtgtcgttctatgggttttttttttttataaagttggctattgcttttacagccaaccagattctctctgtcttgtaagtgaagctacttatatctaatatgattgttgatctgggtgggctcaaacccactctcttgcttctctttttcacttgtcctgtgtgttcacttcttagtggtcttctcctgctttgtcccctataagctttagaaccttacaatgtttactgaaaatgtgttgcgatttatatcacagatatatttattttaatttaagattgtctatgtgtatagatgttttgcctaaatgcacacgcctggtatccgaggaggccagaagtctgcagatgacctagaattcgaataatacgctgtagtgagctgttatgagggcctggaaactgaatccagctcttcagacaaagcacttatgactgctgagccgttctctagcgccacaattacacgatgatagggatgctaagagtaccaggaatttgtggcggctgacagcttgatgctgctgagtccaggaccacagatataaccatcataacttagctattgttgaatgtcttctactaagttttattatttccatgataggattagacattcgatcagatttattctttagcattctatgtattttattaccactataaaatagggtttttataaaattcctttttctaactgatagcaattgatattaagaaatacatattgcttttgaattttttttcagtgctggaaatcaaacataggcctttgctcatacaaagtgggtactataccgcaaagctaagtcctgtgtattgtttttatatacaataaacatatttgactattttcctaagtccaataatttacctctagattattaagtttttctatgttgacagtcatatatcatctacaaattatgataattttgcttcttccttttcaatgttatatttaatttacatatacttatatttgtgaatatatatttatatatatgctatatttgtttatatttcctttcaatgttacatttttctgtcccattgtgtatgttaggccctaaagttcagtgctgaatgtaagtgatgaacactcttgattcacttctgatcttcaagtcatattcctttgggtgtcccttttcaggttaccatcctgttctagcttggctttgaaagtccatgtcaagggctggggagaaatggtgcttgctagcaagtataaggatctgagtttgaatccccagcccacatcaaagcccagacaaagtacaggcacctgcagccgcagcccccgcccccgcccccgcccccgcccccgccccagccccagccccagccccgccccagccccgccccagccccgccccagccccagccccgccccagccccagccccagccccagccccagccccgccccagccccagccccagccccagccccagccccagccccagccccagcgctctctcagggagttgggtggcagagtcaggagaatccccggaagctggtgggccagcaccagcagaggaaaacggcaaagagacccttcttaagcaaggtgggtgggaagggctgacactgaagttatcctctgacgtcctctcacatacattccatagtataaatacccacacacaagcatgtgcacacatacattgtgcatacattaaacaaacaagtaaaactgctttatcacaagtgacttatcttttaacaaaaccccatttttttcttattaagatagccacatatctgtttgttttgaccattaaataaactatattaagctgatttcctttttctgctgttgctatattttcaggaccgggcacagaacccgatgacttctacatgttaggtcagcactttaccactaagctacatccaacccccgattttctaatggtcaatcagctttgaattcctgtctggtcagtagacacattgaacacctccattgtgcttccacacatttggttgacctccttgccagaaggtctcacctttgcacaagcgcacacttaacccttaccgtgctacactttcagtcactctcagggatcataatcaaacgtgcttacctcagatattttgggattgtcatagagttctgaaatttcacatggtatctcagtctcctaaaatggttaaaaataaatacataaataaataataaataagtgtatgtatgtatgtatgtatgtatgtatgtatgtatgtgaagggccatagctgtaaccattcaaatccttgtgttttaagccactgtgcagatcagaattgccagaagcctttaaaacaaagcaaacacatatataagagcccaccttgagcaaaatgaacagatagatttaagaagcatcagtcctcggctggcatcgggaagaagtgagcaagagcagacatgaaaccagactggccatgagttgataactgggtcctctgtgctctacttccacagtaatgaatgtgtaggtacagcaacccccccccccccccgtgcacttgcagtggtttcaagtgccagccaccaatggggatcttaagatgttaatggaaatttcagaaaccaaaggttttaaatgcccttttgaacagcgtgacaaagccttgagccaccctacctcatcagagcctggattagaagcctggccttctatctccctatgttaatatctaccaatagaacaggcatggttgttcatcaatagagaatgaaatgagaacccagaaaccatttgatacaggtatgaagccttgtcaggtaggatgccaggagtgtatacacatccttttgtatgtaagtcatgctcacttagatacaggagtggacaaggctatggtcttatcatatccctcccatagacacttcatccctctttgtctcttgtcttccctcatgttcttaccatctgacttgcgcccttttcctccctcagtgtagacgacaccccactgcacagagacatgtttgcatggcatcagtcatctccctccattcctatcttttgccaccctgaatgtcatcttattgccagagatttgctcaagcaaccagggagttatgtgaaaatcagctctgccggaatctactgacaaaggacatcacagaacagaaatatttactgtcttgtcctcagaaacaacagaggttctgagttctgacatgctaacgccagacagaggccagtgcacggaggtaccgactcaagctactcattcacacgcaagaagccagttatcacctctacgggctcatcatcgatggttcttcttcgctggatcaaggtaaacagcaaagccaccagcagggctgtggccagcagggatgggattccggctgccagtccaatagagggaccacagtcctgtcagagagaaaactgagtcagaaaagcccagattcttcaagaatagaggttacagcgggtgttgtagcacacacctttaatcccagcattcaggaggcagaggcaagcaaatctctgtgagtttgaggctagcctggtctacaaagcaagtccaggacaaccagggctggttacactgagaaaccctgtctcaacaaaacaaaacaaaatgtaggacatattcagtgattaaaataaacaaacaaaaaaggtgcatgggctctgactgcattggaaaaatgaaatatttcaaaagatatctgtactgtatatgactggtgacttgctctcctaggacctaactatatagtttaagcccatttggactgctgatcatgtgttaaaacaagggacaactgatttgaatagtagccttactgaacagaagcacaaactacccttcagaagaagaaaagccaaggtacagtttggaggcacagttaaatgccataaatgccatgttcacaatcgccttcagcctgaaaaagtcaaagcttttttaaatgtttatttttaatttttttttttagtactgtggagagtggttaatgtagagatttacaactagccaaagtgcagagaacacatgtcggtggagtgctccgttgtgactgggatttctatattttatctcctcttctgaggctcaaggaatgtttcagaagagtggggagaaaaggtagaagggccagaagttgagagacactagggagaaatcagtgtcttacactcaagactggagcatgccacacatgagctcatggcaactgtgttgtctgcacaagatcaagctacgcaacggcctagcagagctcgggctgggcacatgggctcccacagctggctgccgagatgctgcagttaaaggctttcagcagagggagagccgggttctccagaggtttggtccctggtaggtcagccatactccagtggttgacaccaaaactatgcacataagtcagcacgaattggatttaacagttattaaaaaaatttaaaaggagaagaagtttcgagaggtgtggaggggaatttaaggagagctgaagttgagaatggggtatgaatatattgaaatatgttgtgtacatgcacaaaactctaaaagaacaattaaaaagttatattaaaaagaataacctagatagagaaacaaaaagtccgcgttgttagcacatcctatgccatctgttgttattttgaaaacattcatattgcatgcatgaccctgctttcaagcgcccactctggtctgagtggtaacagacatgcttgatagcaccacaaggtttcagggttgcagcattttctggaaacactaaagacgatgtgcaaattcctctaaacaccctacaaatgcaacactagcggggtgtgatttttacaaaagcgtgaaaacccgtgtcacaaatacatggaatgaggactgtttgcagaatgtcatttcacacataaaaccaaacatttcacacaaacagaccaagacgtagaatgctcttgtagaattctctccatcccttacttgtgaccaccatcccgaagtctatccctgtagatgctccttatttggtttccaacacacagatgcaaacatagccattgactcttctatccctggctgctttcctccatgctctgtgaatttgcctgagtatgtgtgtgtgtgtttgcttgcttgcattttatttatttattcattcatttatttattcaacgtgcatgtatgtgcaccttgtgcatgcaggagccttcagaggtcacaagagagcataagactctcaagagctagg

SEQ ID NO: 140 - DNA, 2004 bp, Mus musculus
attctggagacaccacctgatggtacagacagagctagactgtctgcttccatggatccactgcaagcagtccacctgggtcctcggaagaaaagacccaggcagctgggcaccccagtggcttccacgccttatgacatccgatttcgagacttggtcctcttcattttggaaaagaagatgggaacaactcgaagagccttcctcatggagctggcccgaaggaaagggttcagggtggaaaatgagctcagtgattcggtcacccacattgtggcagagaacaactcagggtcagacgtcctggagtggctccagctgcagaacatcaaagccagctccgagctcgaactcttggacatctcctggctcatcgaatgcatgggagctgggaagccagtggagatgatggggagacatcagcttgttgtgaatagaaactcctccccgagtcctgtcccaggctcccagaatgttccagcacctgctgtgaagaagatctcccaatatgcttgccagcgaagaaccacattaaacaattacaaccaactattcacggatgcccttgatatcctggctgaaaatgatgagcttagagagaatgaaggttcttgcctggcattcatgggagcgtcctctgtactgaaatctctgccattccccatcaccagcatgaaagacacagaggggattccttgcctaggggacaaggtgaagagtatcatagagggaattattgaagatggagaaagttctgaagctaaagctgtgttaaatgatgagcgatataaatccttcaaactctttacctctgtgtttggtgtgggactgaagacagctgagaaatggttcaggatgggtttcagaactctcagcaaaatacaatcagacaaaagcctgaggttcacaaaaatgcagaaagcaggattcctctactacgaagacctcgttagctgtgtgaacaggccagaagcccaggctgtcagcatgctagttaaggaggcggttgtgacatttcttccagatgccttggtcaccatgactggggggttccgcaggggtaagatgactggacatgatgtagactttctaattaccagcccagaagccacagaggatgaagagcagcagctcttgcataaagtgacacacttttggaagcagcaggggttgcttttgtactgcgacatcttagagtcaacctttgaaaagttcaagcagcccagcaggaaggtggatgctctcgaccatttccagaaatgcttcctgattctaaaactggaccacgggagagtgcacagcgagaagagcggccagcaggaaggaaagggctggaaggccatccgtgtagatctggtcatgtgcccctatgagtgcgcctgtgccctgcttggatggaccggctccagacagtttgagagagaccttcggcgctatgccacacacgagaggaagatgatgctggacaaccacgccctgtatgacaggactaaggggaagactgtcacgatttcacctttggatgggaaagtgtcaaaactacagaaagccttgagggtgtttcttgaagcagaaagtgaagaagagatctttgcccatctgggactggactacattgaaccatgggaaagaaatgcctaagacggagttgttgacatttttcttttcggtttagacaagctgtgctctgtgttagtaaaagatggcttgggaaagtctgggattctttgacctcagaggatgctggcagcaagtggatcataagtatactatgcagagagaatattctaaggcaactttgaagtcttgataaaccaggatgcagccatggttcacaggtcttgggccatctggcctactgttgcatagaattcatagtcttttgtctgctttgtttgaataaaaatggtgttgtcattgcagcatcatctagagaagcgcatcaatgcccacctgactcctgtgtgtctgaatctctgtgtattgccaataaaaataggaaac

SEQ ID NO: 141 - DNA, 1590 bp, Mus musculus
atggatccactgcaagcagtccacctgggtcctcggaagaaaagacccaggcagctgggcaccccagtggcttccacgccttatgacatccgatttcgagacttggtcctcttcattttggaaaagaagatgggaacaactcgaagagccttcctcatggagctggcccgaaggaaagggttcagggtggaaaatgagctcagtgattcggtcacccacattgtggcagagaacaactcagggtcagacgtcctggagtggctccagctgcagaacatcaaagccagctccgagctcgaactcttggacatctcctggctcatcgaatgcatgggagctgggaagccagtggagatgatggggagacatcagcttgttgtgaatagaaactcctccccgagtcctgtcccaggctcccagaatgttccagcacctgctgtgaagaagatctcccaatatgcttgccagcgaagaaccacattaaacaattacaaccaactattcacggatgcccttgatatcctggctgaaaatgatgagcttagagagaatgaaggttcttgcctggcattcatgggagcgtcctctgtactgaaatctctgccattccccatcaccagcatgaaagacacagaggggattccttgcctaggggacaaggtgaagagtatcatagagggaattattgaagatggagaaagttctgaagctaaagctgtgttaaatgatgagcgatataaatccttcaaactctttacctctgtgtttggtgtgggactgaagacagctgagaaatggttcaggatgggtttcagaactctcagcaaaatacaatcagacaaaagcctgaggttcacaaaaatgcagaaagcaggattcctctactacgaagacctcgttagctgtgtgaacaggccagaagcccaggctgtcagcatgctagttaaggaggcggttgtgacatttcttccagatgccttggtcaccatgactggggggttccgcaggggtaagatgactggacatgatgtagactttctaattaccagcccagaagccacagaggatgaagagcagcagctcttgcataaagtgacacacttttggaagcagcaggggttgcttttgtactgcgacatcttagagtcaacctttgaaaagttcaagcagcccagcaggaaggtggatgctctcgaccatttccagaaatgcttcctgattctaaaactggaccacgggagagtgcacagcgagaagagcggccagcaggaaggaaagggctggaaggccatccgtgtagatctggtcatgtgcccctatgagtgcgcctgtgccctgcttggatggaccggctccagacagtttgagagagaccttcggcgctatgccacacacgagaggaagatgatgctggacaaccacgccctgtatgacaggactaaggggaagactgtcacgatttcacctttggatgggaaagtgtcaaaactacagaaagccttgagggtgtttcttgaagcagaaagtgaagaagagatctttgcccatctgggactggactacattgaaccatgggaaagaaatgcctaa

SEQ ID NO: 142 - DNA, 53714 bp, Homo sapiens
tttgggattcagattctattagtgtgcaatggagcctgttcactgatattttaaaaactcaggtagtttattgtgtagccagggttgtgaaccaaagttctacacagagaacaaatatttatgtaacaatgtattcatgtaacaggcaaactgggtttttgtttgtttgtttttgctttgtatccattgctctgggctgaatgtttgtttcatccacaaattcacatgtttttgccttaatcccccatttgagattaggtgtatttggagttatacctttgggagtaattaggacatgagtgtggagccctcctgaacgggattagtgcccttaaaggaggaaacacgagagagatgatctcgttccccaccatgtgaggatacagcaagaaggtggccatctgcaaaccagagctagtgccctcaccaggaaacttttcagctggcaccttgatgttggatttcccagactctagaatggagagaaataaacttctctggtaattttgttacagcatcctgaagtgactaagacaccctggtgatctgggagactccaatgtgtggaatttacctagttttcctctaagagctgccagcctcctcttggattttcctggcactcttccccttctctccctgtgccctcctcctaagttatctaaggcaaacctcttcctccagtagaagttctttctgttggacactcttctgccctttctaatagagctgagatttactagtagtacataggtttacttccgctgagaataagtaatctgctctctcagaagctttggaaaggagctaggccctttttcaccaagttaaaacatttcagttaaatataatcacaccatttagcacctaattataaactattacctccacaatttaaaaatattgaatatgagattttgttatttttaaaaagtaaacaattactcacagagctttataaaaaaagattactatgttgaaagtgagtccctacttccccctacccccatcaaattattctctctgagaaacacacgtttaaaataaatctcaaattcgttgcattgagagctgagtttggtaccaaattcacgatgtgacattgtttctgctgggccgttgaacccctttttcctcccaggtggtgatgaaagactttcacttcctggcaaagaataagagagggttttggctgcatccccagcaaaaccagctttagataaatggtttggcacaaacacttgtgggcctgagctctccccttctatgcattaggggtgtgtcactgacagaattctcactggtctctctggatggaagaggaatggtgttcacagcctatactttgggctgtcatctatgtacaaagacatgtgctaagccctctaagacatacaaagaaggttacactctaaatgggaagacgagccatacttgtctacataaaggaaggtggtcaggggcagaaggtaattgaaacagggtaagtatcaacaatgtgttattaaggtgagttcccaggaagccagccctgagatgggaatttgtgtgcagaagtctattggggatgcccttgggatcatcatctatgggagcatgaaggaggagattgggcagagaaagagttgaaccactatttgattgtagtacagatctcagccaatctaataggatgctctagagttaggctggcccttcagagttgtcaccccttgaaatgagatgacctgacctttgtaaccttcccccgatcattgaccaataagtggaggggtctgtccttaggcaagtgtctctctttgtcagtgagccatcagctctgccattgtcagtagcaaaaggaatggtgactccatcctgaaggggtctctgggcagctcaccacagcatccactacagagggagatctgtgaccttgaagataaatgtgtttttggttgttgctgttttgcttttttttctttgagatggagtcttgctctgttgctcaggctggagtacagcagtgtgatctcggctcagtgcaaggtctgcctcccaggttcaagtgattctcctgcctcagcctcctgagtagctgagattacaggtgtgtgccactatgctcagctaatttttgtatttttagtagagacagggtttcaccatgtaggtcaggctggtctcaaactcctgacctcagttgatcctcctgcctcggcctcccaaagtgctgggattacaggtgtgagccactgtgcctgggccaaggataaatgtttatagcacgagggaaaaaggtacattagtaaggcactgggagtaactggggaatctgaagcgtattgttatgatcagtctctacttgctattcatttcactctgataagaccatctcaatcccctagtgttataaacactacaaatactactatagcataaaatgtcctccataagatccagtaaagaatagctgaaatatttagctgactcttttcaaaccataaaggtcaaacacatttcaagtttagtttaattctattttacagttttggttttataacccaaaactattgttttccaattcactgtctaaataattgtgagattctgtctgtctctctctttatttatttatttatgaaatcagatctggctctgttgcccaggctggagtgcaatggcacagtcatggctcattatagcctcaaccttctgggttcaagcaatcctcctgcttcagccttctgagtagctgcgaagacaggcgtgcaccaccacactcaactaatttttttacttttatttttgtagagatggagtcctgttttgttgcccaggctggtctcaaactcctggtctcaaatgatcctcctacctcagcctctcaaaatgctgggattataggcatgagcctggcctcaatttttttttaaggtagtcttttttttttccagtagtttttggggaacaagtggtgtttggttacatggataagttgtttaggtgtgatttctgagactttgatgtacccatcctctctccttttacaatgatttctttatgatgtgcctccttggtctggcacatttatgcctgtttccatcgctaccatcattagtttctttcagatctttgctaaaatgtcacctcctcaataaagcctaattggataatcttagactgccatcccaaccctggcatacgctgtcccctttatttctctctacagcatttatcaccatctggcctgcttgagattcttgaataattttatttattgtctgtttccttctagtaacagacaagtatgtaaatcccatgaggcaggggttgttttattcactctgtattattaatgcctagaagtgcctggcacatagtaggcacacagtcaatatgcattgaatgaatgaatggtcccagctgaggcttccacggttctcttctggccatttgcaatagtgacccagctggagtagcagcttcagctctctgcaccttccaggaatcccgttttggaccacgggatatacacatcactgcagggctgccttctgtggccctgcctcgggcctgccactgtcctgctcagaagctcccatgacttcttagtgccaactcaggctctgggtggtctctgaggtctgctccaaacctaacttctctccttttctcccatctgctcaaatccttccagccctcctggcccccgacaggctccctctcatgtgaatgcccttcctgccaccctttcctgccctcctctgaattcctccagcagatgagtgtaagggggcaagttaaacatcttccagggccttctgaagaatgtgaggataaatggtaaagcatttcacaaagcctaacatctttagagatgactattattgccagtatgtcatgatagtattattgtatcataaacttctcaattcagtaatagatgtctggaaggttgaagctaaagcatcaagccacattctccagtttaccagtaataaagctgatcttgtgactctggtcacagtggtgtgctggagtcagctgctgccagctcacaagaacccatggctaaatgttctggaactctgcgagccgactgctaaacattcacatgcaccccactgccaactgacccatgcttgttttgcagtcagttcataagctgcaggagagaaagatgtgtttaactgcttaccttagagacgttatcagtcaagaaaaagaattaaaaggatctggtgacagaagtgaaggaacagtttggggagtgatgatgagtagttctgtttcaggcattttgaataatatttttcagtggaatgtaaacgggcctggtgctgaagagagagaaatgggctagagataaagatttggaagttatgggatattggcaggactggaggattttacccccggatacccaggagccatggccccaaccactgatccacagcacaacgtctatcatctcactcaggctctgttctcattctctccagtggccccaagtcatatcttattataattgtctcctgattccttcccttctttctccctcctcaattcaccccattcattattgcctgattaatttccctaaggcaccattttgatcaccttctgtgtttgcttaaacaccttcagcagctcctaactctttgcaaataaaatcccaactgtcctattcaaatttgtccttgaggcaaatccctgtactttctcccctccatgcctgatattcatgctgtcacccataattttgtatacagttaagtttaataaacattttggaataaagactagaagtcacaaataagctgctgttgtccatcagttccattgttctaactatcacttctcatgttgtagatgaaggtgaacccctgttataactaaaatatagaaatttcttgtacttgttaggcacccaacatatatagctaccaaatgcttcttaatggcaagaaacaaattttccaaggtttatttttcattcaagacactctacacatgctcctggcaaggcagttctaagctccagaagacacttgctgccaagaaccaaacacagctgttcaggcaacagaggaagctggtgctcggtgaaaaaccaaaccaaaacaaaaccctgcccgcacatttgaggatggcacaggtcccagatctacaccttgaaacgaatagaagatacaagatatttgatataaaagaaaatgaaagtgccggaaacagaagttttctctctcaaactgacttcctccaacgtgcacagagaataacaacaggactcctaaggataaaaatagtgtttgctgatgggaagagggctacttctccactgaaccatggaaaacctaaaatcctccccattgtttcctgccccatacacttgtactcaataaagatctctaagaatgatcatgtggagactaaatattacccaaaatggaaaaaatttaaaaacaatcccgaactaaggggagaagtggctgcctgggagcatcagcatggaaaccagtgagcagctgtgttctttgtttcctcatagccatcatcacctgaacaggcaggagcattggtcacatctgccagcatcatgggagtggcagcatgaaagggaggacagaacagtggcccagctcccatgtggaccaggcaggcagttgtcatgctatcttattcatcacttacaatgtgaagaagttggcactatgactgctattttacatgttggaaactgcgaaccccccatggggtaagggaatggcccaagctcatacatctggtaagtagcaggtggttcaggcttgtgtagctcctgaggcaccaatacttccagttgcattcaaaagggtgctgtaggtgttctacaaaacaaacaaagaaaaggtaagcatgttgagaatacagtgggcgaacacagtttattacaaacctttaatgttctaacacacattgtatagagtttctctggtttccctacacttaattcactgcagaatttttgttttgcctggaacacttcatgggaccagtgttcccataaatcattgcaggacacccctctggtctcattagagtcttaggtctgttttatttttttgtcttgttttgttttcttttttgagacagggtctcactctgttacccaggctggagagcagtggcatggacagggctctttgcagccccgatctactgggctcaagtgatcctcctgtgtcagctcttcctaagcgggctggcaccacttttggaagagtctagggaaagcaaaagaccattgggaaggattgtgacaggattacctacaaagtatatgggaacacagggaagggaagggggaacaaggagaaacctgcactattacaatagcaatggacagttcttggaacttgcatgccagtggtctttgaagtgctttagtcctcatagccacctgtaagatagaaatcattctaacccccattgcagagataagggaaataaagcaaagaaaggttaggttttgaattcaggtagtctggctcctaacacctgtattctatttgttcatattgaagagtcttaaatggagcagaattctccaccaagtagcataaacaaataaacttttgttaagacactgagatttggagattattgaccaatctagtagatcaaggagagtgctcaacatctgatgcaaagagcttcagaaaatcatagtatagtaagaagaaatcaattcctgctattggcagcaatgccaaagagcataagagaactctgtatagtgttttattattttcaaggcacttcatgagcacgatttaatttagttcctgagaaggcgatgagacatctgtgctctcagaccttatttcacacctcccttcaccacaggggattggtttaacagacattaattgctgaaaaagcaaaaagaggacattgaggtaactcagagaaagaaactgcaagaagcacactacaccactgggctggagcaacaaagggatggagctgggattgttgaaaactggaagtttggagcagggctcccatggagctggaacacagatctttaataaggaagtgctgcctgtcgtccctggtgccatagaatttcatagggaaacctctgcagagctggggctcagacttttgaggagatgtcacctaagtggtattgatacctctgaagggtacagtaagactgggtctggttgtgcagaaaagaaaaaaagaaaaagaaaaaagctaaagactagaaccaatcactgctgtctgagtagagaaccattactgcgaagaccctgacctttgtagcagcaagcaaacaaaaaaggtcacctctttcctcttatctagactttcagtctccctctggtatcaccattggcagagcctgacataaagtcagctggcaaatgagaaagagaatttgctcagtcccagcctcaacctcatggaatccatcagaaaaaaggtagatttgcagctgagagatgatagcctgataaccagacaggcatcagtacatttgaaatttttgttggtaatgttttcaataccagtgactcaaagcaaattaaaatgtgacattgtttaatatgatattttgatgatttagtagtttcacaaaacatatatatccgatttcagattgaactggaatgtctctaaaaacaaaacataaattactacgaactgacatttattgaaagtgctacctttgtgtcaagcactctgcccagcaggttatgtgggctatctcagtcctcattttacagatggggtaaagctgaggcttaaagaagttaagcaacttgctttgaagcttcagagcaatagagacagaatttttatgggcagcctgacgaagcctgagctgttagccacatctcagtactacctccccattccctttactgcttaggtggtgcacctttactattaggtggctataccttgggaacgaacacaacaatcccagactcttgctagaatcatttacttaactccctgctgcagcaccatttggtagctaagactgcattctaacatgaagcattcagctcttcagtaaccaaacacataatagtgagggtcaaaatagactctcatcttccagttgatctctagcaaacagtcatagcatccgggaatttcagggctgcattataggcccttaccagatgtctgaattcccttctgttacagctcaataaacagttatccagcatctgtttgaatacttttcatgacttgtaacacacaactgtataaagctgctctctgtatatttttagacagctgagttactaaacaggtcttacttgcggagaactggaatctattactctacaatttccacctgaagatttctgattttgctttcttgagcaacacagagtgctttacccatgccttaaggcagctgtcacatgactcttcccctaatacggttgtgaggtgctcacgtgttttggagatagcaaaagtctcaaataatatggcacagacggccagccatggtggctcacacctgtaatcccagcactctgagaggccgaggtgggccgatcacctgaggtcaggagttcaagaccagcctgaccaacatggtgaaaccccatctctactaaaaatacaaaaattagccaggcgtggtggcgtgcgcctgtaatcccagctattcaggaggctgaggtagcaggatcgcttgaacccaggaggtggaggttgcagtgagctgagattgtgtcactgcactctagcctgggcaataagagcgaaactccatctccaaaaaaaaaaaaaaggacaaagggtgagcagagctcagattggttattggagaagacaatacagaggaaggctccttggtggttaagagtagtcttttaaaatcagacagatctgagtccaaatcctagctcaatcatttctcagttgtgaaaattcagtagctctgtgaccttgggcaaattgtttagccaaatgagaaaggtaggaccacctgacagtggtattgtgaggatcctgtcagctaaggctggtaggtgcttgccttggccgtgtagtagctgctcaggaaatgagatctatagagtgtattggtgaaagacaaatttaattttgcacataaagttatgaaaatgtctccttatggcagtggttatcatctaaaagtcataccatcccactgaagaagacctattttagggtttataacagactactctctggacaaccttaatccacttaaaaaactaatatatgcatacagcatttggaatccaaagaactgaattcaagatatggcttggccccttattctgtgatcttgaataactgagccttggttctcttgcttataaaatgtacctatgtaagtgaacaggtggtaatacccaccatgaaatactatggagcagttagaagcaacagagcaattagaatacggatctggaaaacatagttccaagtgaaataaaaaggtgattggcaaaatgagaaatgtaacaatgccatttatgtaaagtcaaaacaaccacaagcagaatataacacccatgcaaataacagacatccagtacagtgtaatgattgtctacaaaaggaggagaatgcaagtgagttgggaggtttaaaggggatcaataaataaagaccacagaagggcctcagtacatttagaaataaataacatgcaaacaatgatgcttccctaccttcctcacgaggttactctgaggagctaatgagattgtgcgtatgaaaacaaaagttaattgactgtcttcattatgatctccatattggacaaatgaactgaacagagataaaaattccccatcacactttggcaggaagctgttgccagggcagcacctgtgaagccctggcctggcttcagagtctgctggtgagatgacatcaaaacccttcgtgtaggagggtggcagtctccctcccttctggagacaccaccagatgggccagccagaggcagcagcagcctcttcccatggatccaccacgagcgtcccacttgagccctcggaagaagagaccccggcagacgggtgccttgatggcctcctctcctcaagacatcaaatttcaagatttggtcgtcttcattttggagaagaaaatgggaaccacccgcagagcgttcctcatggagctggcccgcaggaaagggttcagggttgaaaatgagctcaggtaggacagcatcgatcttgctttgtaaataagcagaggctttgtgaacagcttcttgggaacccaaggaacctgtgttttcttccacatgtggaagaggtgatcttcccactgggagaacagcagatttgaaatcaaagaacaactagttaaggaaaacgagataagtggggactgaatacaattatattgaaactagttgacaccaaaagatgagataaattttttgttttttgcttttcactcctatgagatgtgttatttagggatgataagcagaacactaattggaaaatttaatgctgaaccactcaattctattcttgaccaatttgaacaaagtatcactgggttcaacaaaaaagttttggctactttgatgcagaaagatgatttggttgcttggttcttacctatacatctgggcgtgctaaggcagctagcatctgtggtgggcgaggatgactagccagcttaccacaggcacccagatgtggccttgaccacatttttccaaagagtggtcctagtggggttcttagaaagagagatgctaggtaaagatgtattcactgttaagacagctctgtccagggatgacagacatcacactgagtgagatgtaatcagagcccaggcaaggaggcgatagaagcatttggaccacctagattggttcactcactaatccactcaccttgaacagcaattattcttgttgtttttctaacttctgtgtaagctcttcactgatctcaaatagatgaagagaaaacaagcaaaatccagaaacaaatggtattagaaccttgacataagtgatggttctggattaaactgttaaggggcttgcaatgaaggagtaatgatttatgcagttgaccgctttgactgtgcaagaaataaattgaccacaaattttcaggcaaaactataaaaattttatgtgaaaggacattttgattgtataaatagtctttgatatttgaaaataaaactgacaagcatgtcatgcagaagaaatgtcagcttccaagtgttgaggagacatatttcaaaagtcagttttcagatatgttaatgttcgcaacaccctgattcatatgacattgacttttcattcattttttgctaaaatgccccattcagaaattcctgaatttcctatggcccttcttccacctgatttctctttgcaaggtctccttttctctcttgctgcctctttgtaacctcctacagccactctgaatctcattttctaacatcctttccaagaaaatcctagatttcatctaactgttaagcctgcctgatattacagacttacatagaaggctagagttggagaagacaggaagattatataggtaaagaagccaaaaaaatagatttttttttttttttttttgagacagagtcttgctctgttgcccgggttggagtgcagtggcacaatctcggctcactgcaacctccgcctcccaggtgcaagtgattctcctgcctcagcctcccaagtagctgggactacggacacgcgccaccacaatcagctaatttttgtgtttttagtagagacggggtttcactatgttgaccaggatggtctctatctcctgactttgtaatccgcctgccttggcctcccaaagtgctgggattacaggcatgagccaccacgtctggccaaaaatagattttttggaaaagaaattaaaagccttagcaaatatggaactgcttttcatggtaaagaaatttgacaagggttaggcaggaaggaaagaaccagaagcaccacttactggaaagctctccattgaaacgtccaagcttccagcaaggacccgctgatttattatagacacagcaatgaatacatacaaggcggctgaggcaggcactcagggagatgatgggaggtaagtttcttctgttggcaggacagctgaagaggcagctacatgccccagatgcctgctgccagggaccaagcccagctgctcaggcggcggaggaagctcactggtgcatggtgagcaaactgccgctgtgcatgtgatgatggcaaagttcccaggctggtagctcagaagacacattaaatacaaatgtgctctatggcgcaaaaataaaccacaggaagtagaagtcctaggtctcaaacggaatttctgtgcatagatatatagactttaattggatagagaaataaaaattattgtaggggacaaatctctagatacgaaatttagaaacctcaaatcctggctctgagcctccccagccatggggtatgggacaaggtcccctctctcccgactgattttaatatcctgataaatggcctatctgatgtgatcaccaaatgagataatgcatgtcaatgtgctttgataaattaaaacagttagacaaatgtaaagtgtaattattttcttgtgaattgctggatccattgacctttacagcaaaaccctaaggaatgggctctccctccacaatatgaacaaggtcaaatgatatcaacaaatagaacaaagacaggaaagaaacccgtcaacatgttataactggttttttgggagtgggggttggtagggagagattatggctgtttttattttctgggttttccagtttttttttttttttttttttttttttttttgagacggagtctcgctctgtcccaggctggagtgcagtggcacgatctcggctcactgcaacctccacctcccaggttcaagcgatactcctgcctaagcctcctgaacagctgggactacaggcacgcgtcagcacgcccagataatcttttttatttttaatagagttggggtttcacgatgttggccaggatggtctcgatctcttgacctcgtgatccgcccgccttggcctcccaaaatgctgggattacaagcgtgagcaccgtgcctggcctccaatatattttttacaataagcatatatatatgtatgtgtgtgtgtgtgtgtatatatatatatatatatatatatataagcatatatatgtgtgtgtgtgtgcatatatatatatatatatattttttttttttgaggcagggtcttgttctgtcacgcaggctggagtgcagtggtgccatctcggctcactgcaacctccgtctcccagactcaacggatcctctcacctcagcctcccaagtagctgggactacagatgcgggccatgcccggctaatttttgtagagatggggttccgccatgttgcccaggctggttttggactcctagctcctgccttcacctcccaaaggattacaggtgtgagccaccgtgcccaggctacaataagcatgtactttaaaaataaaaataacaaagaaagctgttttttcagctgataggcaacagttttcattgttcctaacacattctttggctgtcagaaggattaaattagagaagaaacctgattcctgctttacttgggcctgaacacacaaattagaaatggtgtacctcaaagtgttgcactgtctggagctatttcattctgcaacatgcatgcaacataattgggtggagctttgctaacatttatgctatattgcaaaatacgtgccattcaatgtgccataggaagctggtcttaaaacgtagataagggaaagtattaaaacccttgaggcatttttgcatatttatgaaaagaatactgaattttattccatggctaacttcctaaattttagagcaatttgccacccgggtcaagctggagaaggatcagaacctactgcttgtcactttcttatttcatcctgagttccaatacgtggagctattttaaaatttcattctgttatcaaccctcctccataaacacattagtgtcactcgagtccatgtgaagagaccaccaaacaggcattgtgtgagcaacaaggctgtttatttcacctgggtgcaagcgagctgagtctgaaaagagagtcagcaaagggtggtgggattatcattagttcttacaggttttgggataggcggtggagttaggagcaatgttttgtgggcagggggcggatctcaacaaagtacattcttaaaggtggggagaattacaaagaaccttcttaagggtgggggagattacaaaatacattcgttagggtgaggcagaaacaaatcacaatggtggaatgtcatcagttaaggctattttcacttcttttgtgtatcttcagttgcttcaggccatctggatgtatacgtgcaggtcacaggggatatgatggcctggcctgggctcagaggcctgacaattagttaagcttactctctgtgtcttgacccaaatcattgatgctgaggaagaaaatgcacgaccaggaaggttggctctccacctttgcatctacctagccgtttaacacttgccaagttccattgttcaagcagcttgacacccaccagaggatactgtcatccttcctagacttccatagtttatctacaaggatgccactggaaggcattgtcttcagtgaaagcaagatgcagcatcatgtcatcaccaataaagggctttgttagtacctactctgtgcagtatttgtcaggttgtggagacacaaaatagtggaagacatgagtcctgcaaacaaggagtttacagtcagacaggaaagtcaggaattgtacctttgtcatcacctggaattaaaaaagtagcatagcatatattccaagtttgaacaagttttctttaaaaaaaaaaaaaagttagcatttgcctgctcattttttacttttagtcttctagtattattttggtctagttttatctaaactggctgcttgccctttccattcagtcattatataatgtttgacatgtggattctgtctcactcattatcccaaaaccatcgcctccaaaagtccctggcaatctcatggtagtaaaatgcattatttttttccacctgaatgttggtaaagactctctccttgactaaactgtagcatggcttctagcagttaaggccatgtccctaggatggccccctttaaaatgcctgcctgagaaagttcatcactgccaggagaatgtcctgtttattctagccaaaggcaggcaacagggagctggcccgtgaaccctctcttaaagcagttactttagaaagttgcaatgataaatcctttctctgtccctttgagatgtaaatcttctaaccatccagaactgtcttccaaggatctgaaaaaagcaacccttcaaagaggtaactccgactttcagattctgtgggagggagggcctaacttcagaggaccttcctctaatttacaccacaaaagtttgcttctcctccaggaaagctccaattaacaaacccagatggcctagtcacagggaccaacccccctactacccctcaggggcacacccttcccctagcagcacatcccagttttttaaaagtctcatgccttttgttcccataaacactggggcctctttcctattgccatcattatgactgaatataaccatccttcccactttaactagtgtccagctttgttaatctttggcaatgttctattctacacttcaaatttatggtgtctgaaatcaaaatattcaaagtcattgtttgcaaaataaacagaacatcagtcgaaggaggtcagtttcctgctctagaaaataaaagttgaactggccactctccaggccaggcccagaatccaaacacagattccctggttttctttacagtttttcttgctctttccctaccaccttgagtgccttctccctttacctctctgcttcccagaccttagactcctgaaagcccccagagagaagctttcctccctagaatgctggtgggagtcactgcctagggtgggctcccagcttttccttttgatgagcaaaggctcttaatctcatccaattacccctctctgactccacaagccacgtgtagacctcagctacagacttagacaattttctttcacataggaggcctcaagaaatatttgctcagagaatgatttatctggtgaatataaaaccagcccaaggaacttgtgtttaccaagagtaatttttgtaatgaattttttttctgcaatgcatgagtattaattttgtaatcagcaacataataaatattttatttttataaattcaagagcatgagcatgagatataagcttttttcttgctctgatccaaattactttgtatttcaaaatttgcggctttaaattaacaaaaaatttcttaatcccatttaaggtgggccaaaaaaaatcgaggcaagatcgtctcagtcataagtacagcagggctggagacagaaacctgtccttagtggtgctaggtgctagtaagagtttgcaataaaaccaaacaaaactgcatgatctttctgttccaaggatactgaaacagatcagttgctaagtgaaattggtagaagggtttttaaactgtaaacaggtcagtttaactgtaaatgactatttaagtcactgtttacaaaataagtcctatatcagatgggaagaatcaggaatgacctctccctgggaagaagacagcaggtgaccatccatgaggatccagaaagtcagacagagggtgggaaggagtctatacccaggcaaataaaaatagctgccactttcctcctggagggtttttctaattatacttcatgagaggcaggatcaactaggaaaagaaagacaggaagaacagggaaattattgcctgagggaaaaaatgcagaactgaagtctgtgagttaattccataacccagggcttttcagacatctgagtgccacagtcacgattcttgtaatatcttttaccacatcttttattataatatatacgtaatctgtttattttgtttgtttatttgtttggggggagacagggccttgctctatcacccaggctggagtgcagtggcacgatctcagctcactacaatctccacctcctgggttcaagcgattctcgtgcctcagcctcccgagtggctgggattacaggcacgtgccaccacacccagctaatttttgtatttttagtagagacggggtttcaccatgttagccaggctgatcttgaactcttgacctcaagtgattcgcccacctgggcctcccagagtgctgggattataggcataagccaccacacctggccagtgtgtttcttttaattgtccctaaactgactcatttaaaataaaattagccttgttctaaggaataatatccataaaacctatgatctgagatgcataatttaaaatacagatataaataaacacataagccttttaaatgttcaattgtgtacctcctaaaattatgtcacgtacctgcagagaaacgagtaccatgttggaaaacacagctgtcattgaggccaaaggctcgagtgggagtcaaatctaggctggggcagttcaatagaaaagatctttctctacagtggtgtttctcaaagtggagttcttgggctgtggggtggttttaaaacataggtcctcctgtggagagggaggggcaatttccccgtcctttgcatctgagagtgctggtgactgattcaaccagtaaggtacagtggaaatgagactgtgtgactttccctgggacacaatctctgggaccccagagcctcatgtaagacattggcgcctcctcttagaccacataaagttgcttgggtccccagtccctagttgcactgagcccagctttccagccatcctcaccaaggtggcagaatgtagaaccacggggaacatcagcacctcagcagaagaatacagggcagagagatcacccagccaagcctgcctgaagtgctgacccacgaaattgtgagatataataaaatagttgcctttttaagtcattacattttgggatcactggttatgcaacagtagataacgaaaacagactgactatatcagaatcaccaatggagcttgtcaaaatgcatattcctgggcctcaggtgcaattctccaggaattctgaagtctcataatgggacccagtaatctgaattttaacctagcttcctggatgtctctggtagacactagagtttgagagacattcctttagagctattcattcattcattcatctatccagtctaccgtcatctttttaccattactataaatctggccatgtgctgggctccaggcataacccagagaccatgccactgtccctgctctcagggacaccaaggaccaagctgggcacctgacagtcaagcactagttgaaggaggagaccctgaatcttcttccctgtaggagactgaggtaccaatgccagttctctcagaattgctataatttgttcaagacctcccaaacttagtccaaagcactaacaatcggtcatggccaagaaattaggagaagattgaattcactgatattttggaaatagccatctcagcagaaccttgggatctctgaggttgaggttggctgccggagggtttctgtcaccttttattataagaaggaagccaaggtctctgtgggcaaggcagaaacaacttcagcctcaatcacagattcatttgcccttgaaaatgacattcatgtatattttcccccaagtagaaaagtgaccatagatagttcattacagaaaatgagaaaataaagaaaaacatttcaaacacacaaacaaagctcccctcaggcatctaaccacagtctagcagaacgttaagaggttgcttgagtcaggcacacctgggtttgaacctcggcttcatgtaagctcccccaggcttggttttctcctctgtgattacattgcctactgtgctaggctgttgtgaggattaagtaagaatatgtgcacatgtgtgtatgtcattatcattatctttgctaatagtcacaagtatttctttctagtctgattccctttatatgccagtatttattgttggttacttaatagtgccttgagccccatcccatctgtactccccagcattctaatgtccccatcagaggcagggctgtgtccagaggaatcctaggtggagagatggtggcgatggagcagcagggtaggagtggatggtgacaggccagaatttggacgatgagtccagggctcccccttgacacgtccatctccctcagaggtttagggaaaacccagagcccagagagcctgacagcctccctgtggctgctccgtcttgatgtgtggctatggcaactgttctttcaagttttctggggcagttctacatgtcctgtagtctagtttagtccatataatattgtacataaaatagcaaaacacaaattctatgtggcagcagcaaggcaatacgtttactgctgttatataggaggtgctattccatctgtatttctgcccttgggaggaaatcgattttcttattattatgatacccatccagatgttactccctctgcaacaagaggaagtgagcagctccctccttttccaaagaacacaaagtcatggatggccaagcacatagactttgatgagaacagccataggatcaaatccctgctccacctactaattattcgctgggtgaaatttttaacatttccaaggctatctcttccctttttttttttttttttttttttttttgagatggagtttcgctctgtcgcccaggctggagtgtagtggcacaatctcaactcactgcaacctccgcctcccaggttcaagtgattcttctgcctcagcctcccgagtagctgggactacaggcgcgttccaccacgcccagctaattttttgtatttttagtagagacagggtttcaccgtgttagccaggatggtcttgatctcctgacctcatgatctgcccccctcagcctcccaaagtgctgggattacaggcatgagccaccgcgcccagcctctcttcccatttttagatggggatgatcatatctatctcatggcattattgataattaaatgaagtgatgtataaagtgtgcctaccagagtgtctagcatatagtaatattctaatattgttaacatttccagtattggagtgttcagagcagagagaaaaccactgtaccagcaaatagacaaacagctgccacaagatagtgataagaaagtatcagcagagcacactagaggccatgggtctccttagtaatactgctcggtaagggctcggagctgaaagtgaacaacacacagagactgtgaattgcctgtgaggggctgatggcaaccccgacacgaggaagcacatcacagcccagatctagctggccacatgcagaggatcagccgaactcaggcaacacaagacgatgggaaatacagtctgggccacaacagagattctctcaacaaaatttcttaaattatttgtggcaaaggaccagttttcaaaaaatgtgttgaagaccaatgcttcttttttttttttttaagccacaataaaactattttggtgatgtcaaattacaattaaagtttctaaatgctgacttacaatttctgaacttaccttgttgggaactagtggcaaccaatactgagctctgagtagcattggcttaagaggttttgtttgactttttggtttttgtgtgtgcttaagattattattgctcttttgttttgtttgctagttgcttattgaacaggaagtgggagtttaaatcagagccttccttcatatgacgtacagcctgtcatccacaaatttgtttgtattaattaagaaatgcatatggttctcacccaacaatgtgagcgcagacattctcacactgtctcagagaatcccaggagaagaggcagtagggggagtggtaagagtgtaggtggttaggggtcccagggttcctctttaacatacccttctccctctcagggttaggtaaaactctatttattgtaataatattataataaataataatgtatcataagtataataatataataataatttttccctccaaaaggcagaaatatagatggaaaatatagatggaataacacttcctattaatccttgatccaaagaatccttcaggaattttattataaataaattttgaaataatatggatctacaatagggaagtggttatccatcttcctttaattcttgtagaatgttgctttgccatgacttatttctgtttaggcacatcctgccatccagatggtctcagctctgaccccagcccacacctctctctgagcaccaacctcagatcccaactgtcaaccagatattttaatttggatctcctgctgtccttcaaatgcggcatgcctgaaataaacttcagttccaccgctccaccccttcccccaaagagacgcaacttcctaaatctgatttctaccaaaagtgccattactttactgtgattaatatgctggagtaatatttgactccctccctgaattcatctttcataggtgagctgatgcagatgtctaccatatttctcctctgcttttctgtgccagactgggttaaaatcatctcacacttacacaatcatttcatcttcctaagtagttccgcaaccctccctaccccattacgctcccctccaaatcactgtatgtaccagactcgtcttttaaaataacactgtagtgctatcaatgttctgctcacaaaagccttcactggctccacaaccccagaaaataagatcaaacctcctcaacaggcttctaagaccttctagaatgtagttgtccctacgaattcagccacatctacaattacttcccaatataaactctccactccaacccaggccattctcctccctgtccttctggcccctgacccttttcttccaggagaaccctaagttctgccttttaggtgtgtcattcaggactagacacagtcccagctctgccaccaaccagctgcctctcccagcttacaccatgtttttttccttctctgaacatggcagatcttcatgcctcatgtcttgtcataattcacatcataagccatctgtttcatgtaacatactagtgtctagtaacttcctttttcttctttggtacccaacctcctcctactaccatcaccgccaccactatcacaaggaatctagggttgtgcatataatagcaaatttaaaaatacctcatgaatcagattctatcaaaaaaagaagatggagaaagaggaaatcaaggaaacaaaataggaggagaaagagaaaatattgctatgttttctcttcgatgcttgggtatgctgtgtgctcatgctattgctcagatttatagactatttgaactgaaaggatcttaaaaatcactgggtccaataatataatgctgaatgtgaagacttattaaaaactagaaataacatatctggcccagaaaaaacaataaaagaaagatgagtatcatttaccagctgtgtgacttttagaatgtcacttgacctctctgttcctcagtttcctcatttttgaagtgtgaatgatgtaacacttattgaggagctaaatgagatgatgtaggtaaagcacatggccaatgccttaaacatggtaagtgcttagtacctgttaagaaaaagatccctgtccatgcttcgaaaacatgtaaatcaaaatttcttgaaggctggttataaataattaatttattgttaataataaactgtgagatcatttaatggggtgtttctatggtctgaatatttgtgtcaccccaaaattcataaattgaaacctaatccccaaagcgatgatattagaaggtggggcctttgggaggtgagtaggttatgagggctccacctagtgaatgagaaattaatgtccttaaaaaagaggcccgagagagctgccttccccttctgctatgtgaggacacacagtgggtgccatctatgaagaatgggccttcactggacaccatatctgccgaccccttgatcatgggctttccagcctccagaactgtgagcaataagtttctgttgtttataaattactcagtctaaggtattttgttatagcagcctaaatggattaagacagttgcttaatccatgtaagcatagctacatctgtacctatttctatgtctactttggatcataatataaaacgtatttctaactgtgggtcactgtcaaacaagtttgaaggccattggattattaaagtcctccactagtaaaaatggagcagcatgccaaaacctcatgtggaatgctaggtgctactttaagagcagttttaccttccatcttttctggaccttggttttccatcaacgcctcagtcctgctaatgttgtctttattgttcgtgcatctgacatgtaacccggaccactgttgccatactaattaatgtagagagaattcccttgcatggaggcctaaattctccacacctatggttaggtctagcatgtgtctttctccatcagatggaatgctcagaaaccttgaggaaagaggagagcttctgattttgaaagatgtttcagctggtaactctgtcttgcattttgcagtgattctgtcacccacatcgtagcagagaacaactcgggttcggatgttctggagtggcttcaagcacagaaagtacaagtcagctcacaaccagagctcctcgatgtctcctggctgatcgaatgcataagagcagggaaaccggtggaaatgacaggaaaacaccagcttgttgtaagtgtcatgggtgtgattttcactgttctttgcttgatggttaagaacataggcttaggatcaacggagctggggtaaaccctaaattctctgcttactacctgtgtgaccttgggcaagtcacttagctttactgagcttcagtctcttcctttataatatgacataacgataatgccagcctcacaaaatggtcatgaagattagaacaacacacatgtaaagcgctgaacacaatgtgttgactatagcaggcatctaacgagtggtcgctattttcccgaacacatttatacacaaatctttcaaaatatttaagccttgatattctagcagccagaaaagcaggagattcctttttttctctcactgtgatcattcagaaaacaaaacaaaacaaaacaaacaaaacaaaaagttaagctctcaattccaaatatttgagcaattgtgctaaaatctttgggaagagggcttggaccataactacagaagttcatagaaaacgaagatgatatttaattgataggtcttttcatttttttttctgatttcaaaaataatacgtgttgataatagcaagttcaaatattagagatgtatataacataaattttgagtctcctataattttatcctccaactacagacaactacttccaaattttttccgtacatatctgttattactattaatttttattgaaaatggatgcttatgcatttgtttaggtgagaagagactattcagatagcaccaacccaggccccccgaagactccaccaattgctgtacaaaagatctcccagtatgcgtgtcagagaagaaccactttaaacaactgtaaccagatattcacggtaacgggactttacatcaacacccagggcaaacgaagggcttgcagcttctttctgtggaccgcaaattaaattataaatttttctgaaaacctgggaaagttttcctcccacctacctgcagccctagcctgatctctgatccttctatccttcttctttctatcgagactgggtctccttccttcctggaaatagacaaatacatttaggttatattctttagagacagcggattactatttacagatagttgtcattaatgggcgcaacacttgtcaaaagcaaatattctgaaaaaacaaatactggaattagtccaaaacatagtaagagcaaattacatagaaatggtaacaatacatcaacagcttttgctgggaaaccaaaaaattgagcaaacctagattccagcctttctgatattcactagtttgggcaagtcaatttctctctctgagcctgtctcctcatctattcaaaaagaaattggatggatcatatctaaagctccactcagccctcagattggtaattgtgttttgaatggccctaaaacccacaactgcttgtctgctagcctagagtcagtggttagctggatgaaacatgtagtagtagatcaatacagagcttctcatttctagacttccagctccatgtctgtgttggaaagactaggaaattgtagctactggatatgctgagcatgagatcacacagctacagctgcttcctcccctgctagaaatacaaacgtgccctaccttaaataatcctggctctgggtctgtgtgacctacgactacactcattcattcaacaagcctgtgttaagtgctgtgtttcatggggctgctcagtgatcaaggcagaattctagccacaggctagtgggaagatagtacagaaggagggattatgctgagtcatgactagcaagatgctgtgagcaccaaagcattttttagttaaatcatctgtgaatgtttaatagcagtgtactccaagtttccgcataatgcactctggtacctgtcttttcaattcaactctactccatgacaccagagaggcatacaagggtatgggagaccccatcctgacctagaaggaaacacgcaagtggtattccaatatttaaaggagagcaagaggcgtttgtgagtgaccactggctcaggggcttggaagcaaatctcctgcttatctggttttatcctgcaggatgcctttgatatactggctgaaaactgtgagtttagagaaaatgaagactcctgtgtgacatttatgagagcagcttctgtattgaaatctctgccattcacaatcatcagtatgaaggacacagaaggaattccctgcctggggtccaaggtgaagggtatcatagaggtaagggtgaaatgggatttgtcccacttcccaataggtaggtgggaacgggggagagagggatgtagctaacagattttcctgtcaactatgtagatgtggtgtacatcacaaattttcctttatacatattcctctctctctcctctgtctctctctctctctctctctgtttatttttatacacatacacacacacatacacatatatatatgttaggggttgtgaatatcctagtcacatggcaccaaaatacgttagtggtggcaggtgtcagagttaccgatagtgaatccgttcgggtctgcagcaaccccaattattgcttccgcagaagaaagaattcgactggggggcataaggcagaaaaagagactgaggcaagtttcagagcaggagtggaagtttattaaaaagctttagagcaggaaagaaaggaaagtacacttggaagagacccaagtgggcaacttggaggacaagtgcagcgtttgaccttttgacttggggtatatgttggcatacttctggggtcctgcgtcacttttcccatgattcttcccttagggtgagccacccgcatgcacagtgccctccttgtgcttgggaggggagcatgtgcagtgtgtctactggagttgtatgcatgctcacctgaggcattcttcccttttccggtggaatgctccggaaagtcatactctgccattttgtctcttaatgtgcatgctcatgcccactcgcccaattcctgagattttaatggaagctgctgattaccaatttcaagtgtttttatctattgggaaattgcctctccctggcgccagttgtgactaatcattttatagggtgacaactgccagaccatcacggaattgcctctctctagcactggctgcaaccaattatcattttagagagacagtgtgataactcctggaccatcacctgatggtcgcctgacattcctggtttggaggggggagccctctcctgccctgctcatgcctgactagctacctactctaacatataaatagatacagacgtgttatttataatccataccctaatattatcacagctggagctacatggaaccagctagtagaagcagaactctcccatactgttattaatcacagtgaaagactcaagtggcctaaatcttgacagcagggaaatggtctgatttccctcagttccacctgggggcgccaccttagagcagtggtgcgtttgacatgaagtggaggtggttctacacctctccagggagagcgccagaggttgtgcttatttactgaacggtgtttagggattccccagcaaagcaagttggtcatctggtagtaagtttctgtatagtcaagtgcaaggtatattattcaaggacaattatcccaactctactcagaggaagggggctctgagctagacatcacaagggcttgaatgtagattggctttttggtgggtccaaaattaaccttgtcaatggaaaagtcttcttatttcagtaaggtcatattcattgaagagaaaattatcaccaatatttggacatacatttttcagtgaatattttggtttgggattctgtagatctggatcctaaccatttgtatctttgttcctaaggatcgtaaaggggtccttggatatatgatgagctagcattttcaagattgtagggaaatgtcttgttttctccagatcaattagggaaatacccctgcatgtgatgcatgcacatttcatgagaaaccaaactactaggtccatgaatttgagagtcttagacagtaattgtccaacatcactaatttaaaatatttttcaactgtccattaggagattattgaagatggagaaagttctgaagttaaagctgtgttaaatgatgaacgatatcaatccttcaaagtaagtgattttacatatatttattgaaaatggtttttcagttaatcttattacttattctggctggttgtattagtcagcttgggctgcaataacaaaatacagagatggcgtggcttaaacaacagaaatttattttctcaccattctggatcaagatgtcagcagggtcagtttctggtgagggttctctttctggcttcttcctgtgtcctcacatgctcccctgctcacatggtgagagagagacagagagaacaagcaatctttctggtgtcacaaagacactaatcctgggccgggcaccatagctcatgcctgtaatccaagcactttgggaggccaaggcgggtgcacttgaagccaggaattcgaccagcttggccaacatggtgaaaccccatcattttacaaaaatacaaaaattaggtgtggtgaggcatgcctgtaattccagctacttgggagattgagacatgagaatcacttgagtctgggaggcagaggttgcagtgagctgagatcacgccactgtactccagcctgggtgatagagtgagactgtctcaaaaacaagacaaacaaaaagacactaatcccatcatgagagccccactctcatgacctcaaaggccctgtcttaaatacggtcatactggggattaggacttcaacatacaaatgggttgggagggggaattccgtccatagctttggtctaggaagaaaatgcctaaataaattcaggtgcccagattattgccatgctgtcgtgatgtacaaattgccttaccctccaagagtctgtcactcatgggtacaaacatcatgggacatgaggaccatgggggggttggtggggacaggacggaactgctcttaaagagcagatttgtgtctgaaaatctccttactgcatcttcatttacttggaagcagggtttattacctcccaattttccctaccttagagttgcaagtggaagggacttccaccagttccttcaaagcaaaagtgatgtacaggcctaaaatatggccatgagcaggagcacaggcttggagtgtaaacagaccagggtttaagtttgggctgtgccacttcccacctgtatgatggtggagaaactatataacctacatgagcatctcttttcaaaatgtgagggtacctatgcagagcatgagtgtcggtgagagacccagcaaaagggagagccctatagagctagcgtatcactcatggacagcacaggcaggccgtcaattagactataccttagccctgcacaggtgccagaacctgcttgttacttctgtttcattttgtaatgccacatgtcaagaaaggactcacctgaaataaaaaatgcccttaaaaataaccatcacccacctgctcgttatattcaggagaaactaggtcaaagatttgcttatactttttcttcattgcctgagacctagaaagggtcatgactcggatgttataatgattatcttagagactgatggcatgcctttccctccattttagctctttacttctgtatttggagtggggctgaagacttctgagaagtggttcaggatgggtttcagaactctgagtaaagtaaggtcggacaaaagcctgaaatttacacgaatgcagaaagcaggtaaattgtctctcctaaaagtcattgttgctatgggctggtcgggtcgtggtggagctctaagtcagttacactgcaactccaatctgggagagctgggacacttctttgatgtccattgatgcttggatctaaatcctagctccagcagtttccagctgtgtgatcttgagcaagttggttaaaacctttgaaccttagttacctaatctatgaaagagagataacattgatacttagctgagaagtcaatcagttaatgcaggcaatgcctcagcactgtgtctgacacagagcaaaggcgccctccactgtggctgtttgtggtccttcacccaaatgtcaagccaggttgtgctgctgatctggtccttactgactcttccggacattgggtcctggctgtctccctgggtaagagttgtgggtgaagagtcaaagacagaagggttggctgctaagaatacttgaacagagttgttgcctggcacaaatgtgaagatgccctagaaactgtaaaacaccaggaaaatagaagggaactggtggaaatctaggcacagggttggtatacccaaccaggactctttagcctaagacaagaccgtggtgggacatgagtgctgtcatcacccacctgaaagcctggcagggcctctcagaggttgaaggtagcctggtcacttccatttatgaggctcccagtaagttttttaaaaatgaaggaatggcaatacagtgtgaaaaaaactgtgtgtttaaaaaaatgtttacttttaacaagcaataaaaatacaatacagttgtgattcaaaaaggagtcacagccatagtccctactcattttttgtaaagttgctaatctttgaaagattgctaataatacaatgccacataggaaataaaagagtctaagaaaaaaagatccagtatttatattccaggaccctgaaagcacacgtttaataaggatgatttacaccagttctcaagatgccattcaaaagaaatttaaataagtattaaacataagtagcaagtaaatggtttggaatgatgagtaaagactctcaatgcttagagagaaattgggaggcaatatagtgtttcatttggatgaaacccttatcaaatgacgtccagtgctctcaggatctaagggcttccaattccctagctttgtaaactggatttttgttcttcctgttgagcttttccaaccctttgaatgaaacagctttattcatttagtcaatcagtgatttccatctaactgtttaatgctaccagttctatgcagaaatcaaggaatgccctcccattatacttatacccccacaagtagttataggcaccccttggagcagcactacaatgaatggaattgccaatgggaatagcttagaatactgtgaagggtaagctaattgaacatattgaaaggacagttcatggtcagatggataacctgatccagttttactcatatttgcacttgattgcagttccctgaggcttgagcgtgcacatgccacgtttgccttgaaaagtcagtttatgaactatagcagcacatatttaaccttatactgtgtgataagtttcctgtaataagttagtcgccttgccataccaaaaaggaaagccaattaaattactttcatggatgtcaacaaatcatcatagtcttacatgttcattcctgatagctgcacatcttcttaaagaaatagttgtgaatcctgacttttggatcgtgtatatcactgcataagcacaggtgtttgtggttacccagtgagttgtactttgaatattagtcatgatgacagtttctgtattacagcctaatagagcattgcttcttagatcaaactcctcatgctcacaaaaatggccatgttgcaataatttttagaaatgtggctttttaataaaaataaaaaataagtatcatattgaaataaagaaagtagtgttccacaagtggcgtggtttggtattggacacagtttataggtgtattcatatgaataccattttctcttggtcttgccagcatgtttccgtgactgtccccattagagataacatgggaaatttggcagggtgtgcaagccaaatggccaccctgctgcctcccttccacaatcccagggtgagaaacaaggaccaatagatttactcttgtcatttcagagggccagtggcaggtgaaatcgcaaagaagtagacttaggcttttcaaaagaaagaactggcacaacagagtttacaattaggaaacaggctcctctggaggtatcagagttccccattattagagtcaagcaaagtttgaatggccccctcttggagaccctagataggagagcagcgatgctgaagcatgatttgatgtccctcaggctctatggatctaatcaccaggctcatctcctcaccaatacttcaccccaatccttggagataagcctcccttctcctttcctctttctttccaaatctccctccacactgctctgtgggaaccaccaagttagcttttcatcataacaactctgaactttcattaattcatgctggtcaggcaaagaagcaacaagctaaaccacctaagatatttcctgccttgcttcagacacacatctactctgctcctattcttgactttaattttttaatggatccatcaccttccaactctaaatctcctcatcccaaatctttatgcgttaccttttaaaaaacagtaggacacagcctattgatcaagaaggctggttcttcagtaggaagtcagatctgaacagtttggattccagagggatgtgaaatattgtctccttctcaggaaattgtaagcctctaggttagaaagcaaagaaccactgttaccctgaaaaattcacaaccaggagaaccacatggactattctgtctctgtgggaatggagtttggtgttgatgcctgtagtcatgttagctctatcgtggggacagaatccccttctactgagggctggttgtttcacacacgtgtcactctctccattgacctgtcaaatggcctctcaggatttctgtattatgaagaccttgtcagctgtgtgaccagggcagaagcagaggccgtcagtgtgctggttaaagaggctgtctgggcatttcttccggatgctttcgtcaccatgacaggagggttccggaggtaaataacttgggtggctttgcctcctctgcccgaatacttcagtggctccctgacttggacaggcatctgaaacggcacaaaaggctgtgatctggtgccagcttctttctacagctttatctcctgcctctcacatttcatttcagcaaccccaaatggcttgtcatcccctgcacattcagagctgtttcttgcctgttgctttgcttactcagacttttctgctttgactgccattcctcaaattgtcgcttggctgacttcccctcattctttaacactcaatttagatggcaccttctccagaaagccttccttgactccctctttctccatgctggattagtgcccctcttccatgctccctgagtacctgcaaagcccttgatccacatagttacagtgatttgttcctgtgtgtggtttctccactaagtttgtagagcttagttctcagcaagactagttcatgatgcctagcacaaagtaggtgctcaagaaatcttggttgagtcaataaatgactgactgaatgaattcatgaatgagtgaacgcttcacaaggatgtatgttgttgttggatattgaggcctgcatttcagaaagggatttctttcctcccacagcctcctctacctctttctccagccctctcacctggtggcttttggccatcctaacaaaataggtttggggcaaggaagaaagtaagagaagatcaaatctaagataatgcctttactccatgtcataattccaagagcgctaccttgtattatgtgaatacaattcttagtttgcttgttgtcatgcttgtctccatgtgtgtatgtgtgggtgcatgtaggtttgtgtgagtgtgtagaataaataatttttttgttattttttgccttgatatacataatcagatacatgctatgtatgactttttctgtgtcataaatttattttgtaaggaacagcgatgtgtaaccaaggatattttgtttcttaaaaaaaagtcaagaaccttctatgttgcaaatcttaagcatagggcatagaaacaaaggtgattttttaaaaatgaagactaatatctaattgatttccattttatactgcttttgaaaattaggggtaagaagatggggcatgatgtagattttttaattaccagcccaggatcaacagaggatgaagagcaacttttacagaaagtgatgaacttatgggaaaagaaggtgagaagaaagatgaaaaatacatgcacacgcaaacattatgttaacacttgaattttgcacattacttgccttataattgtgtaatgaccatctaatcaattctcaattatttgtggcagcttatacaaagccatatgacctacaataagactttcctgttttgggtcctagagtacatgttatgaatatgtcctgtatcttgtttattatacttaccctattgccaacagggccaagggtggctatgcatttgtgtttgacatgcagaggcattaaagcacccaatcaaagtgaaaagtatgcactatgaagacctgggaaatgtaagctggaaagctgcaagcttgggtgagggggcaggactgcaaagactgggataaaatcagtctaagaggtgttgatagtgcctcgatagattcgaggcacttcgtgctgagatggaatgaaggaaactaatgagggcaagctgagccctgcagaggtcatggctcagaagcccccatacattgcagagatcagacttgtgacaggcctattgcctggtggaggaaaccaaagtaagctaagctaaccctgcagccagagccacatgcaagccctgactcctgtccaactctagtgagagcctcacttcctagagagaccagagggtcctacccttgggacctgtagataggtctggctgggctggtgtttctcctcacagcttcctccttcctgagtagtttgcatctgtttggtgtggaccaagcttactgatatcccagaaaaggaaaacctcagataaagtgaaaataaaagctagaaacacaaccctagggccaggggcactggaagtgaagactcaactttagaaccagatccaaactgacacgagtttgaatactgggcgtcgagtcttcccagaaggagttggagggaattagaagcgaagggcagggaagggatcctggctagagagcctcacactcagccttgcaaccctcctcagaaggcacctgagactaaatttggacggagccttcctgtgggaggtcaagctgagtgcatctccctcctgccccacagctctcttcctgagaactggccgctctgtaccctggggaggatgggaaggatggagaggtggggaaatgcctcctcctagtcaggagtttctcagtgtccagtaggaaaaataaaagaacatgctgatgtcaatattcagtcaaccagtgggtattgatggggaagccagagcccagagggctgccctgtagatagccggggctggagatctagaggtggcatcaggggttgtgtgcatgtttgacaactgtggcctgctgcagacaaccttctgaatatgcagacaggagcattacgttcaaggatgcattctcaaacaccttgcaaaattcaagacaaaacccaataaagaatggcccatttctctcttacccaccaagtgactgtttactgttaggaatccagctttgtgggctttttttttttttttaagggaaggtgtgttattacaaatttggctttcatgtgagacttgttcatatgttttatatctcctttttcaaatttacataattgaaatttacacaaaaggctgctattctgtactagtttcagcaagtttccttaaaaagtggaattgtattttccggagctggtgattcgaggttaactacggcaacatctaccacctcctccagaggttcttcctaacattagtgcttcccccttcaaatggtgttttttcttcaaggcgttgaagggtgaagagttccctctattgaggtcaacaaaataaaaagtatctttttgaattgagataatgtcttgtgcaggtttgtagaagaaagacaaagcatgattcctaacaataatcaatttaccaatgatgctcaaagtgtggtccctggtccgggaacaccagcattgcctgggaacctgtcagaaatgccctccctgcccctcctgcatcactctggggacagagccctgcaaactgagctttagcaaaccttccaattgcttctgatgatagcgcttttaaacatctaacctaaagagtacatggtaacaaatcacacatcccagtagcttgatgacattatttgagggttacttgctgtttttgttgccagatttagtggttgctagcacgtttctctctcctgtccccacatctgccctgtgccatcaggaactcccaccaagaatggcaactcgattgggcacatcttagaatcacttgtccactttctggataggcaactttaagtgaaacatgtgtcattaactttatcccactttctccaaggcaggtggactaacactctcatgagaaagagtctcccaagtgctacctagaaatagcaagtcatcttgccccaaagttagactcagcctccagccacaacgcttttggctggttaaacctggtcatcagtataatatgaagggacactgtctttgtccatttaccttgctataaaggaacacctgaggctcggtaatttataaagaaaagacgtttacttggcccatggttctgcaggatgtataagaagcacgacaccaagcatctgcttctggtgcggcctcagggggcttacactcatggcagaaggcaaggaagagctggcaggtgccgaggtcacagggtgagagagaaagcaagacagagtggggaggggccaggctctttgtaacccccagctttcacgggagctaacaaagtgagaactcactcattaccatgaggatgaggacggcacaagtcattcatgagagatcttcccctatgacccaaagacctcccattaggccccacctccaacattggggatcaaatttctacgtgagatttagggggacaaacatccaaactatagcagacactaactcaaagctgctccccagaaacaatatgattttttaagttttattatttatttatttctgagacagggtcttgctctgtctcccaggctagtgtgcactggtgtgattacagcttactgaagcctcaacctcccaggctccagggatccttccacctcagcctcctgagtagctgggactatagacacgtgccatcatacctggctaattttaaaattttatgtagaaatgaggtcttattatgtcacccaggctggtctcaaattcctgcagcgtggctttttgtttatggttggtttgtttttaaaggactgaggagagcccagagcactagctgaggttcagaagtggagagggagattttcttgcagttttgccattaagtggctttgcttcagcctctctcatcgctaaattccttttccgtaaagggaagataatgcaaccactttcttagtgttttctcctagtgtttgcaggtgggcctttaatgcaaggccaaacacatgtccatgttctgctcgaatctgaaaagatttcattaagaatccagtgttaaatcatagatcttcttcatcagggccttttcctgatgccattctgtttcttttcagggattacttttatattatgaccttgtggagtcaacatttgaaaagctcaggttgcctagcaggaaggttgatgctttggatcattttcaaaagtgctttctgattttcaaattgcctcgtcaaagagtggacagtgaccagtccagctggcaggaaggaaagacctggaaggccatccgtgtggatttagttctgtgcccctacgagcgtcgtgcctttgccctgttgggatggactggctcccgggtaagtgctacatggacccatgggatgatgttagctttctgaaagacgtaggccgagtctacctgggcccaggggagagatgacggcaacaggggctgggtgacaggggaggggccagtacccagaaacctctaactcaaggcatcctgtccacacatggccaagtatgacagattaatttagaacagttattcccagtgtgtggtccccaacaccagcagcagcaaccttacccaggaacaggttagacatggaaattcttcaccccactccaaacctatggaatcaaatcagcatctctggggatttcagcccagaaatttgtttggaaaaggcttctaggtgtttctgatgcagctcaagtaggagaaccactgaagtacagaaaccagcaaggggattgaaataggaaacaattaataaagtggagaggcaactcacagattgggaaaaaatatctgcacatcatacatcacataagggccattatccagcatatacaaggaaaccaaaagactcaataacaagaaaacaaataatcctatttaaaaatgggcaaaggacttgaatagatatttctcaaaagaagacatataaatggcaagcagatattgccatcttgcttaacatctctaatcatcagagaaatgcaaattaaaaccacaataagatgttatctcacatccgtcagattggctattatcaaaaacatgaaagacagcaggtgttagtgaggctgtggagaaaagggaaccctcttgtattgttggtggtgttgtaaattacacattttggaaaatagtatggaagttcctcaaaaaactaaaaacagggctaccatatgatccagcaatcttacttctgggtatatagccaaaggaaatgaactcagtatgtcaaagagaggtctgcactcccgtgttcattgcagcatgatacaccatagccaagatattatataaaaacaacctaagcatccacagcagatgaatggatttttaaaatgtagtatatgcacagtggagtatgacacagcctttcgaaaacaggacattctgtcatttgagacaacatggttgaacctagaggacattatgttaagtggaataagtcaggcacagagagacaaatactgtatgatctcgtttctgtatatgtagaatctaaaacagtcaaactcgtagaagtacagaatagaatgtagaatggtggttagcagaggctgggggatgaggacagaaaatggacagggaaaagggtcaacaagtacaaagttccagtcagacaggtggaataaactctgttctattgcacagtatggtgactatagttaataaaagtgtatatttcaaagtagctaaaagagaggatttttaatgttcttaccacaaagaaatggtagatgtttgaggtgatggacatgctaattagtctgattttatcattctgcaatgtatatagatgtatcaaaataccatattataacccacaaatgcatacaattattatatgttaattaaaaataaaatcaagctataaaatttttctgaaagagcacaagttgagttcatcccagacctggttgcaagctcctgctctgcttcttgctgttgggtgatcttggacaagttccctatatcctgtaaaactcaattttcccgtcaggaaaatgaggacgatgaccttagctacttccctgagttgcagagacattaggtgacatgatgttctcaaagcctcagcaccaagccagcacgtggccagtactggataagtagtagcttccatatcctgtcactcacaggagaggacacctgtgatttgagtcccattcgcatgtgttccaccctcccaactaaacacctcaccctgtttctcctgttttcccaggtagctggttgttgctttgagtgaaatgggttcgtagagggttttttatacagatgaatgacacaacacaaattaattgttctcagccgtgggttaaatgtcaggtgtctttgctttggactggaattaattcagcacagcatcttagcactgggatttcttactctaatcacaaatgttgactgacaactaaatgcttttttcattcctaaaaaaaggggaagaaaagaaaaaatataccataaatgcaacttgtctgatagacataaatctttgggaacacatagttgattgagaaaggggaacgttccagaaagaagtccttggttatgcaatgtcatgccagttaagcatcactggctgaagtggttgacatttgcccattttatttttaagatggacatgttttcaacacattctagtctgtttcctcagagtactcagaaattgttgctgttggttctgcaaggcactggcagagcactaagctcttttgctttttagctgggtgactttaaacaaataaaggacttctgattgcaaagtccatctcctcaaccatcccgggtgagctttcctaaaatagcaaattgttccttaccactagagggcaccagtatcccaggcttgctccctactcccacatgaagaggacaaaatttctagattgtgtttctctcaggaaaactagtctccatgacaattcgttgccctcctttcccaaggtgttcctgtcctctgtcttaggcttcatgtattgctcccttcagtctcagagcccattcctgactgtgggagatgtcatccaggagcagttgacttagacgatcagtttcatggcatctcagtgtgaaaggatgttaaagccagagggagtcttaatcatgtccttcctccatcctttcattcactcaaccaagactcagggagtctggatgacttgacaggagatgcacagccaggtagggacaaagtccaggctggaacgggttccctgactcctccatcctcttttacaataacaatattccaaatcatgtaacacccaccaaactagtatttatccagcatttactctggaccaggcattatcctggtagaacgctcacgctattcatttattcattcaataaaacatttgctatacatcttctacatgcgaggcactatttgagggaatacagttgtggacagaacaaaccaggttcctgctctcacagagcttacattctagtgtgttcatgggagcacggacttctgtcaccagagaatttggccctgggggaggaaaatcactttgagaatgtttagtggagttacatatttcactagagggatgtagccacctaatactgaagacattctagacgtgttaataatttattttaactatctcctatccagcagtttgagagagacctccggcgctatgccacacatgagcggaagatgattctggataaccatgctttatatgacaagaccaaggtacagttctcttcctaaaaggggctactttgatcctcatccccaaggctggcccccgagctcttttcatggactgattttagtatccaggtatggtttcctttgtcatgcgtgttctatttccagttcatcatagttgagggcagcaagaaagatttccacagactcgcagtttccacccggcccagaatgcaattcgagagattttggctgaaacatgatgagctaattgggcttccagaacaagtccagcagtgaacattaactgggtttggtatatcctcggtgttggcaatgagtaactccaaagtaaaccagggatccccagaaatcacaaatactacttgtgtacccctcaaatgcagggggcagtggcattttgagtggccatgtaggccattaacaacagtctcctgcaagaaagagagcaacagagctgccctgagacataaatgagcatccagctagtctcattgactacccatgtcactcatttggtgtgctagtcttactgtggtcatgatccaattcatccctcagcaaaacgatagatgcctgtagaagttagaagagttaaatatccaactgttaaatccacagttctaagggctactcttcttacagatatcaaggacaccaaaataggctccatggggaagaaaactcaaaataactagaagtaatggtagtggccaggcgcagtggctcacgtctgtaatcccagcactttgggaggccgaggcgggtggatcacttgaggtcaggagttcaagatcagccaacatggtgaaaccccatctctactaaaaatacaaaaaataaccaggtgtggcggctcgcacacacccagctacttgggaggctgaggcaggagaatcacttgaacccgggaggcagaggctgcagtgagccgagatcacaccactgcactccagcctgggcaacagagtgagactctgtgtcaggaaaaaaaaaaaaaaaaaaagtaatgatcatttccctctaggagcttgtagtctaaatgagatgtattcagttagagttgtctcagttacaaatgttagaaatcaaatctaaagtggcataaacaaaaaagggaacttgggttatatactgcaatgtcgaagcgttcaggggcagccgaatatgggtgctcaggcaggcttccctcagtattgcctttattctcaggcaggtttccccataagtcccactcttccagctacttcaacagagaagagcctgtttcctaatagttcccccaagaatcctacctgatgctcattggccaggcctgggtcatgtgcctatccctgaacccattactgtggctctgattggccagacttgggtcatgtgctgcttcttggaattgggagcagctgcacctaaccctcctggactgagagtcaagaggagtggtttcccatagaaaaatccaggtgctgctcacagaagagggggctgtggatgctggcaggaaagcctcggatgctaagcatgtgggtgaaggcagattcacatagtacaatgaaggaacacttacaaattaatacattctaaatagttcaatgtaagcaagtaccttctatgtgcctagcaccgtgctatgtacaagaagggatggaggagaagagctgcttggtcttaaagagatcacagagtgggatcctgctggggttagaggcaagcatggaaagctaaggaaaacccaacacatacaagtatcctataattaccagcagtacaaaattataactgcatgttagaattacccagtgcgttcagatagattgattataagatctctcctgagcttctgatttcactggactggggtatggctcaagcttcaatgtttattttttaaactccatcaggttgttctaataaacagctgtggttcagaactacagcccgtaggaaaaatatccaaatggcttttgctgaatatgttaaagctgttatgattttactttaattcatttagtaccatgttttggaaagtcagttaaaatgactttttatactcagaagcagggaattatgtttgggctgtaattcattctgacaaggcaattttataagtaacactttcactgtgtccacaccatggtgcttatgaaaaatatctgaatgcacatatttcttgttatgttttcagaggatattcctcaaagcagaaagtgaagaagaaatttttgcgcatctgggattggattatattgaaccgtgggaaagaaatgcctaggaaagtgttgtcaacatttttttcctattcttttcaagttaaataaattatgcttcatattagtaaaagatgccataggagagtttggggttatttaggtcttattgaaatgcagattgctactagaaataaataactttggaaacatgggaaggtgccactggtaatgggtaaggttctaataggccatgtttatgactgttgcatagaattcacaatgcatttttcaagagaaatgatgttgtcactggtggctcattcagggaagctcatcaaagcccactttgttcgcagtgtagctgaaatactgtctatctctaataaaaacaggaggaaacaagatgatggaatctgtttttcttcactcaaatattataaactattttaaaacacaagtgtaaccaagtggaagaataaagagcttacagtttgtcttaaggggacaaacaggtttaattagaagatgcagagattccagaggggatttgggtccgttctggagcttgtggaggaggggtgctgcctctggactggctcagctcggctcagtgcctgctccttcccggccatcatacagctggttccctaagcatcccagcacaggaccacataaaggatgtattctccctgccatcgtgctgaaggaaagacaatgtcctaaaccatcaaagaaatatctccctcttttttccatcttggagcttctgtctacaccttatggctcagtctctctcaggaagtcagtctctcttggcttcttatctgagggcacccaagggaagggagggagccctggctgagggaaattttggaactcccaggctccagacccattctttcctcctgcctcctccaggaggcatagaccctttgccttgaagggagttaacaggtcatctgttccagctgcttccgtgtcttcagcctgctaaagagctgggaggcccatgacgaccgttttcccttccttccagtccctctgggaagaggatattgggagatacaataccttttggctattgtgactaatgctgctgtgaacattggcctacaagtatctgtttgagtccctgctttcaatccttttggtagggacctagtaataaaattgctagattcaatggctattctatactatgtttaactctttgtggaaccactgtactgttttccataacaactgcaccgtattacattcttaaccaacagtgcgcaagcgttccaatttctccacatcctcaacacttgttatcttctgcattatctgttttataatagctgtcttaatgggtgtgaagtggcgggtgaaaacttttgcccatcctggaacccaaagacagtccaggctgaaactaacacactgaaagggcctcagatggtgtgtgtgcctgtcacatcttgagttgatggctaaaaaaagctggggacaacaagagggtggacagcagccacccccactggcctcaaatcccaaaatccacaaagtattctagtcttttctgctgcccagtgtttcccagttatgacattcaagattattctaggtagtaagtagatgaatattttcatactgatataatcaataaatatttattgggtgcttaccatgtcagtcatttttctaggcacagggcatagaaaagataacaaaactgtcaaaaatctctgcctgtatgattataagcataaagcttatgttctagaaaggtgtttatttgtgttcgaaaggtgttaagaaaatggttccttattgatggtagtgatataaagcttcctttttggaataggtttatttatataagaaaagcgactcaaggtcagggaaatcatttaggaaatattaccagtgaaatgggggagtggcaagaatgaggagagagggacgcaggtggctgacatttgggaaatgtgcaggtggccttgtcgccttcactgagcaactccccagccctgttctctggaggtccccaccacacaatagccccaggaggtccatgccagaggagtttccccatcagagaacctcacagattctaaatgctactttccttatttgaaaaggcctgttggagattccacaaatgccatgtcttttttttcttttttgctgtaagccagaatttttatcagttctggacatgttttttttttttttttttttttttttttgccgtaggccagaatttttttcaattattgtggtgactagttaccagaactcagccttcgcctgtgcctcctactttggcagcagagcgccctctgatggctgacagaagaatccttggaggcaagcacagtatgatatagcagatcaagtaggaagcagattatctgttaaaaacattggaactatatgtaagaagccatggatcaccgatgctctatttgttcacttttttcccagccttttaaatctgtgttttatttggggtagtttttattgctgtatcttcaagtttactaatcttttcttctgcaatgtctagtttcattaaacctctccagtattttatctcacacattatagttttcatctttagatgtatgatttagtttttaaaaactatcttccatgcttctatttaacatattcaatttttcctctagcttattaaatacatggaatatagtgtaactgtttcaatgtccttgtctactaatgatatcatctgtgtcaattttgagtcagtttctattaactgagtattctcctcattatgggtcacattttcctccctctttgcaagcttggtaattttatattggattctagacattgtgaacattgtgaattttttcctggatatttttgtattcctgttaatattcttaaactttgttccaggatgtggttaatttacttggaaacagtttgatgtgtcctcatcttgcttttgagctttgttaggcaggactcatcttacttttgagctttgttaggcagcactaacgtagtctaatccagggttaatattcttccccactactgaggcaatacttttctcagtgttctgcctgatgcctggtgaattatggtgttttctactctggctgtttgggaacaggcacggtttgtggcctcccactgagaggcctggcccattagagcttagggtattgttccctctaatccctttgtgtggttctttctccagccttgggtagttttctcacatgcatatgctgatcaatggaataatcaagaggtctcctctgtctctgtgcaactctttctccagtactctgccctgcaaattctattcaccttggcctccatggacttccagctctatctcactaacagcatgtgcaaaagccatgtggtgcaaggaccatggtgtcagagaaaaggcccacgtggcaggagggccatggcataaaatgagcagagagaaagctcttgcagctggaggttcccacgtgtctgagttgcagagagaaagcctatgtttgtggacagaccatggcatctgaagggcagagaggaggcctaagtggttggggaatagaaactagaagaggtgggacacaagactaggctttccccagctctcaaaacaaagacccatatccttaccttggctttcataagtgggtaatccctggccaggtgagtcaacagtaatcactgtttgactcttcatgacaaaatcagtcacatttatggtagaattttgtcaacatggtttgttctcgctcacaatcaaatctttcaaatcattttagcctggaaatgaaagtctatgataaactgattctctttcattataaatcagattttaagccccaggttacactcaccctgtcctccagaggcccccttcagttttagaaatagttctacagcctattggacaaactcggccaacttccaaaatgttccccagtctcacctgtccagttttagtatttttcaccccttaacttattggagttcaggtagcctctctataggatggaggagagaggtttttttctgagttttacttggaggtacagcactttaatgtatgccctgacataaccagacatttcagccatttggaattctcagaggattgaagtgctatgcccatttctccttctcctctaacttcaggtaaaggaaaaagaagaagagtatagattcttatcttatttgagcccgagagagatagttttatgtctttgagcttagaggcaaagcacctgtataaaagctttcctgatattatttccttggatggagattcacattcaattgggtagagaaacgtttccacaaacacccagtttagcattttcattatgcccccaacattgtcttaggacctggcagattgtctgacattggaaggaagccagtgcacatttgttaaatcaattcacgcattaagcaataattctcatcaagatggtgggagggcaaaggttatatgacttcacaatctttcaaaaattagttatcactttttggtcttcaattaacatcgcaatgttgcagggaaaaacgccttaagcaaaactaataattgttatttcttggcaaaataaagaagaagtgagtatctgtctccaccagcaaagtcaggaactgagaagaatcatagagggtatagaaggctgtgctgatgggagtgaggaacaggcaggcagaaggagtgctttgcagggtttggggaaaatcaaagtagaatgtttggactggatggatgtaactttatagataaaccaattcaaacaccagatgatacaggaggaaatgagacccacacacatcgtgcaacctgactaaggtcacttaacttaccagcagccctgggttagggaagcagagcttctgactttgggtctcatcattttgcttaccacacagagctgccctccatgaaagactgaatgtcttctagcctggcagagaaagtgccaatatcgggaatatccctgggataatcttggttccagggacagagccaatgttctctaatataggcaaagaaaagccacaaacattttgtaggttcataagaatggccattttacttttcacttcattccaacataagttcttgtgtatcatagcagaagtaaatgacagaaatgctgaacctttctagtttaatagaaacaatgtttaaatattctaagccgtggattataagtagaattaaaataagtgatccaaaacacaagtcatccctcactttatagctacatggcttagtcacatgcatatttcaatccagccttacaaccaccccatgggctaaaaggatggaggatgagaactgctgtctccactttacaagtacagaactgaggctctggatgatcaacaatcggcccaagggctgacacctataagtatcaaagccaaggccacggctgagttctcagtaaatccaaggtccttcatgacatgtaggaggaagtacaagcaccaggatgactgggaatgtctgtttaaaaatggctaaatctgcttgtttaaggtaattagatccagaggacttggcacaaaactgagtttcaaaaggggctttgaagagcaggtattgacatgtggcagagattgggttcatagaacatgttcttggttattcagggaagaggggcatgtttctgagtaatcagaagccctgtgtgagaaaggaatattttctaggatatctgtgtggctcatggagctgctggatgaacttaagatgccctggacccaggccttcccactgggaggcctggcctgctagagggcaatggctatacatgggggaaccaggctgcctggaagcctcctcatgggagtgaaagtgaaagcctgtcccaagctggctgaatggcaggcacgttgctccttggcccattcctgtggtcctgtctccatccccttgggtcctcttgatttttctttctgccaaacagctttcccctagatatccaaggacttggttcttttctccaagtagacttggttctactccacagagtagatacagccctcatttctaataatcttttggaaaaactcttgccttccccgcggccccccatctttactttcaacacacacacagtccgtcgcagaactgccctccttaaatactctctgattacagacacaagtaggagcaatgaatgatgtgtctcctaggccaggtgtgtggtagggtagctgacacatgttagaaggaagtctgcccaaagacacagaggaaatgaaactcatattgaaggcaaaagaagagtacagaagaaaaaaaaaaaatggctggggatggattggaaaatgggaagaggagttactgggataagagaaagctggagggtggcctctcctggagtaatccacccaaaataaggcaacctggttatagtttgcccaataggctcaatgggccaacaccacttgaagtagcctctccttttccatttggcctccttggagacagtcctcagcaagctgaagcggcaatgctatgcgtgggcttaagggctcttgtttaatctgaagcctttaaaaaataaaataaaagaagttgtaactttaacaactatccctaaagcacaaaagttaaagttatttgaggaactgccatcagaggtatcataatgtcttactttaaaaattaagcaaaatgtttcattgtaaagacaaagtgttgttttaatatgaaacatgaatttccatcaacattaacatctttaaggttaaatgtaacaccaccagtctctgtatttggaattcggaacttgtaagaaactgccttttcctgattcatatgaggacacgatcacacctagattggaagattcacatactaccagcaacacctagaatcatctttagataacaatttggatcataggccatggagaaagtttgtcctaaatgttcccttgtgtggccctgtgactatggggaacaaatgctggtgattagctgttttatcaggcaagcaatatgggaagaggtaggaagaaggtggtagagagagagaactaacattttgactggcaactaagtagcagacacttccctttatttcttatttaatcttttcaattatgacatgaggcaaatatttcccctcctttaaaaaagcaaaaactgaggcttgaaaatgttaaacaacttctccaaagtcgtacagctgctcagtggtaggtgtgacttaagagtccgtattctttccactgctgtgtgacatgattgagccaggtgcttccctgtggtcagggaatgtgtggctccacatggttcctaccctgagatattcagaaacaattaactgcttcctctcacacatcctgcataagtttcatttgtatcccaacttgcaccaggctgacctcagcaacacttccatgaaagtcagatctgatggcttttttgagaaaaaggatatgaaaaaaaaagatgagaaggcaagacactcagaaaccaagcccctttcccaaaatgacaaagaaaagcaaattcccactgggagcaggaataggatctaaggaccccatctggtgagtcacatgtactaactaaagcacaagatctgagagttggaattaaccatgttggggatgtcccctaaagagacaaatcagccccaaagtgttccagagctgtaaatgaaatttggattgattaagaagcagcttggcatctttcctctccaagtacaaaaccctgggttttcaaccctgttccagtgccaggtctgctgctccttgactgagctgcatcattccaggctcagtctgggcacaagccaccacaatcccctccttctttccatttctatagtaggacggtaacggtcatgcacaggttcctcgcttcctgctacagtcttcacatatatgtgggcctcttgtgctcccatcgtattcttctcatgtgtgggtgatctcctaggattcttaaggaaacaaataggttttttaaaaactacagcagagaattctttcatacaagatggactaacagcaaccacattgaccctcccacctgaaataaccaaaatcagacacaacatttgaagcaatagttttcaagacactagacaacaggcaaggagggacaatggtcctggagagacagaaaacaaatgaggagagacccacaattacctgatcttactgctttgggagagctttcaggccactcaactatcttttgtttattgttaacaaagtttctcattttttgtcttttaactgttaatctatttgtgtatttatatttaaagtgagttttgtaggcatcatatgattggaccttgtttttatagccaatgtgaaatctcttcctgttaattcgggtatctagaccatttacatttaatgtgatcattgatatggttgggtttaaatctaccatcttgctatttgttttctgtttgttctacctgtttgttgtgtctttttaactctttttctactttatttcatatagattttagaagaacctcattaagttccatgaaaaaaattgattgggatttatattgaaattacatctgttatatagatcaacattgtttgacatcgttatgttattaacactttctatccaggagcatagtatgcaacccccattatttaggtattatttaatgggttttttaaccaaagttttattattttccataaaggtattacatatttttgttagatttattccatagcattctacatattttaataccaattaccatcacaaatggtaatttttaaaatcactttttctaattgttgttgatgttgaaagtataaattacttttatatattgatttttgtatccagtaaacttgttaaaatttcttgttaattcaagtaatttttctgtagatttagcttttcttttctttctttctttcttcctttctttcttttttttttctttttttaagatgaagtctcactcttgtcccccaggctggagtgtgatggtgtgatctcagctcactgcaacctctgcctcccaggttcaagtgattctcctgcttcagccccccacgaagtagctgggattacaggcacctgccaccacacctggctaacttttgtgtttttagtagagatggggttcaccatgttggccaggctggtctagaactcctgacctcaggtgatccacctgccttggcctcccaaagtgctgagattacaggcgtgagccaccgcacccagccagatttagcttttctatgtcgacaatcataccatctgcaaataatgacaattttgtttcttccttttcagtgttacactttctaatttttttttttgagatggagtcttgctcttgtcacccggctggagtgcagtggtgcgatctcagctcactgcaacctccacctaccaggttcaagcgattctcttccctcagcctcccgagtagctgggattacagacgaccgccaccacacccagctaattttttgtatttttagtagacacagggtttcaccatgttggccaggctggtctcaaactcctgacctcagatgattcacccgcctcagcctcccaaaatgctgggattacaggcgtgagccactgcaccggacctatactttctaatttttaaaaatcctacttcattgactaggatctaaagtataatattgaatagaagtggtgttagtgaagatccttgttttatttctgatctaaagagaatgctttcaacattttactgttaggtatgatgttagctgtaattttttgaaaaagacatctttcaagtcaaggaagttcccattctatttttaatttgctgagagttcatatcactgttaagtttttttgaactttcttcccctattgagatggtcacatgagttttccattttagtttgtcagtaaaataaattatattaaattgattgtctaatattaaagggagcttgaatttctgttcagccaataaaaatgcactgagaacctcctttgtgcttgagcttcctcttggtcatctcttttctacatgtgctcatactgtgcttcttttggtga

SEQ ID NO: 143 - DNA, 1533 bp, Homo sapiens
atggatccaccacgagcgtcccacttgagccctcggaagaagagaccccggcagacgggtgccttgatggcctcctctcctcaagacatcaaatttcaagatttggtcgtcttcattttggagaagaaaatgggaaccacccgcagagcgttcctcatggagctggcccgcaggaaagggttcagggttgaaaatgagctcagtgattctgtcacccacattgtagcagagaacaactcgggttcggatgttctggagtggcttcaagcacagaaagtacaagtcagctcacaaccagagctcctcgatgtctcctggctgatcgaatgcataggagcagggaaaccggtggaaatgacaggaaaacaccagcttgttgtgagaagagactattcagatagcaccaacccaggccccccgaagactccaccaattgctgtacaaaagatctcccagtatgcgtgtcagagaagaaccactttaaacaactgtaaccagatattcacggatgcctttgatatactggctgaaaactgtgagtttagagaaaatgaagactcctgtgtgacatttatgagagcagcttctgtattgaaatctctgccattcacaatcatcagtatgaaggacacagaaggaattccctgcctggggtccaaggtgaagggtatcatagaggagattattgaagatggagaaagttctgaagttaaagctgtgttaaatgatgaacgatatcaatccttcaaactctttacttctgtatttggagtggggctgaagacttctgagaagtggttcaggatgggtttcagaactctgagtaaagtaaggtcggacaaaagcctgaaatttacacgaatgcagaaagcaggatttctgtattatgaagaccttgtcagctgtgtgaccagggcagaagcagaggccgtcagtgtgctggttaaagaggctgtctgggcatttcttccggatgctttcgtcaccatgacaggagggttccggaggggtaagaagatggggcatgatgtagattttttaattaccagcccaggatcaacagaggatgaagagcaacttttacagaaagtgatgaacttatgggaaaagaagggattacttttatattatgaccttgtggagtcaacatttgaaaagctcaggttgcctagcaggaaggttgatgctttggatcattttcaaaagtgctttctgattttcaaattgcctcgtcaaagagtggacagtgaccagtccagctggcaggaaggaaagacctggaaggccatccgtgtggatttagttctgtgcccctacgagcgtcgtgcctttgccctgttgggatggactggctcccctcggcagtttgagagagacctccggcgctatgccacacatgagcggaagatgattctggataaccatgctttatatgacaagaccaagaggatattcctcaaagcagaaagtgaagaagaaatttttgcgcatctgggattggattatattgaaccgtgggaaagaaatgcctag

SEQ ID NO: 144 - DNA, 1533 bp, Homo sapiens; identical to SEQ ID NO: 143

SEQ ID NO: 145 - DNA, 87977 bp, Mus musculus
  misc_feature (2001)..(2048): "n" at positions 2001 to 2048  can be any base
  misc_feature (6720)..(7498): "n" at positions 6720 to 7498  can be any base
  misc_feature (8834)..(8882): "n" at positions 8834 to 8882  can be any base
  misc_feature (16167)..(16186): "n" at positions 16167 to 16186  can be any base
  misc_feature (24443)..(24580): "n" at positions 24443 to 24580  can be any base
  misc_feature (28778)..(28871): "n" at positions 28778 to 28871  can be any base
  misc_feature (45952)..(46750): "n" at positions 45952 to 46750  can be any base
tttagataattttctgttgtatcacattttccactggtaaatttggagcaaataaaattccacaagatggctccctttgacctaatggggggaaaaatgtttaatttatcatcctttaagagacatggaaatgagtagttgaccttttgtaagcttatgtgagacactctaaaaagtgccccagtgttcttaatggaaactagaggaagccatcgaccccctagtgcgagccccacttttagcctggaaaaaaaaagtggccttttctcccttgtttgtgctgagttttgggtagagtagaaaactaaagtgatagagacctttcataaaaacagataaactgtgtctctcgcttcatcaaatgaaagccagcggctacgtatctcaggtcccggaagccaaggttggcagttaatttgtaaaacatggtttggaaagttcaagttcttctccaaccgagagtgcgccagtgctttatcatgacgttatatgtgaggttatatgtgtttgatagaatttaaacgattttcacttgaattaagaacatccaggacttttgtcaaagtcatgaacttttctgaaaaggacttggagcattgaaaactcattgttgctgtctgttgggagactgcagaacaggcattaaaaccgagcttccctgtgtttggctttctaaagagcagtttctgccctattataaatagacacgccgatttttgtaactgtacaaatgaggaagttgtgaggttccatgaggctcagctgatgacccttgtctcctgggtttgcatgaggaccttgtaggctgaaggtgaaggattataaagccgtccagatagcctgggttgggtgggtacatgttacacattagcctcaatcttgtgcatggtgtgttgtattggcatgactatcatgaggtctgggacaggggaccctgcttcctagccataccatagaataaaactttttagaaatgtagacattccttaggatctaactggaaggccaatgcaggtcgtcaagtggcatttttgtcattgttcagtttattgtctgtagttgttatcatataactgattttccttctgttgacactacagttgtcttgcttatccccgtagaagttgggtgagcaagggtaactttccaaagtactaaagccattaaaagaccatgatgtgacttagggaactcagtttttaaatctaagttatagtactgtaaacatagttttgaaaaaataagagaacatataacaaattaatattttaatagtttttattaaaaagttatttcattttaagtgactatggttgatttttataggtgccgtcaataacaccaacatcagtttcagtactttctggaaaatggccacagagtccatgtggcctaccctaagtgacagcgagtgacaatgagctggcaatcagtaaatcatgctcctctctggagcaaagactagatgctccttaataaggctggggtgtgccaaagtggccttttatatttaaagaagcaaaaggccagtgtatgtcacaacaaactcggtgatggtgctggcctggagcgtgagcagcatcccatctcgttgagacgatgagtaacatgaaaagcatgtatgctgggacctaggaagttcttctcactatcacagtgaacagtcaagtcagagcaccttctcagttccactgggtcagtctgcgtgtaaggacttccaaacaataggatacctctatgaagctctgtgtggcttaacttctttaggtccaaacaaaataaagcctttggcaaacaaactggcccaaacccttttagctaaagtagaatagcgttgtagaaacacccgcatcagagtgcacttgcttaatgttatagatgtacacgtggtttccctccaccacatacagctttaaggttgtattttcaagtatccacttgactgaatttacttgtatgtctacataatttcactgccgaaagtcacaatgagatattgtnnnnnnnnnnnnnnnnnnnnnnnnnnnnnnnnnnnnnnnnnnnnnnnnttacttgggagaaccgaattctaccgtctcttctaacaattacaaactatcagcacttcgggaattatctgtgtggatcagtcttgtggaaaccgttgctgtattttaaagatagaaatctcatttgtgctgcatctcccttccatcacactcctctggactacacgtaatggtcttctacagcaagagggcagaagacaatgcttctcaacttcggttttccgccttaaatgatgaagtgtgaaaagccacttatgtttaagggagctacttaagaagtggccagtgttgatggtccaaatcagaaagcatgctaattgtaactgcgtgcctctcctcagtggctgtgagtgggtggctagtatggaggttagagaggaaacacagccttgttgtgtgatcatggcttacctgggggaggagagagccaaggcaccactgactgtcatgtcagcacacatgtgagcctcttgcctccaattccattgtctttcttatataaaatctaccatctttcttgttttttgattctagcctagggattcactctgatgcccagcctagcctgaaactcataaactcatatgtagcctaggctgctagtcctgggattacaagggtgagagctacagtgcctggttccaccattttctattacgtgtcacagaacaggtactcagtgttgccttctaattgggaagcaatctttattttattctctctctctttctttctccccgccccgtgtgtgtgtgtacctgtgtgtgatggtgtgcatgcatatgtataaaggccagaggtcaaaatggagaatctcccttatagttccaggccagagtctgcccctgactggctcaattggctgtcaatctagcctcactgctcttttgtgcccacctccccagcactggaactacagttgccttactgggctttctctgagggttcctgggattaaactcaggtcctcacatttgcctggcaagcgcttactgactgaggtattcctgtagccccttggctgcatttttaacagacttcctcatttccctttgaccctccttcatatcagtttctgcccacagaggggaaaatgtgaagccagggctgcacatctgagtgatttgccttctgtggcttagctgactgggggaggaggggcgtggggaacactaaattggattcctatgctcctgtttaaatcttgtttttcattgtgagttgtaccagcaaagctctgggagataatcatgaaaatgtgtagattggcagctaatttttgaaaaaatgaaaagaatcagagatgaaataggagcgctcagaagtttttatgttctcccaacctgttttgtcaaattgttacacaaacctagaaggtctctgactagatacaaagacgtcgcatattgctgctctttctcgtggagcatcccttttgaaaactacagagtaattcacagtgatgtgataaatttgcaaaaaaaaaaatggaatcttcagtgtatagatgaaaagacatgtctttcacagaatcatgtgttttattcaagaggtctgtgacctaggcatgtttaataggtgatagtcccgagctcaaccctgtcttccacatgcacatttacttcctgccttccgagaaggactttgagtattaagtggctagtcccaagtctccctgggacagcttcaccagcaagaaagaaaaccaccaggcacatgtaactgtatggccagaatttagttgctgtacaagttctgttatgagaagtttgtcaagtttcaggctattgcaaagaatgagtttatattctagccaaatatgaggggcaccttcctctgtctgacatttggatcttgtctccactgtggtgtgtttatggagttcttagagcaggtaggaaaggcagacactgtcatctgatgactggaagttcagagctcagctctgctatttgttggtggtggccttgggcaggcaacccttgcttcatgactctgctcacagcctcggtcttctcttctgcaaaatggaaatgataaagcagattcctgtgacaaatcaggattggctgccagctcgatgctggactctgaggcaggctgcctgagaaagtgctgggcaaggcaggttgttcacagtctcaggaagctcgttagcagtttagctctcagatgcctcgcatgtaatgggctgcctcagaggtgcctgtactcctccttttcttgctatagaccaggttctcaaggacccttataaacacaaaaagttaatgtacactgtttttaaatctcaggacatttttcaaagcttatggaagtacaatacaggccaggtaacagactaatgtctactgacctccactcctgcctacagcaagctttatatgccatgtgcttagcagttctcctgatagccatattgtctgggtaacttgaaaagaaagatgtttgtggtttctgcctggcctcgagttttttcattttgatttaataaatctaggctcagcttgtgaaaattctgggccaggccctgggttatgacataaagcaccacaggaagaggtgcttgctgaagggagatcggccagcacccctcccttgaggacttgttgaggttctgggctctactaagtcctcctctgggccttgcaagttagacatgggccagcactaaggaagacctggcctggtggcttacctggagacagcaactgcccagggctgttggatgcttctcccaggagccagccaggttccagcctggtggcaatggcctcttcgtggcaagaggaaaggctcctggcctcccaggaagactcccatggtatgtagttttgaatgtgtgcttcctgcccagtccccagagcagtgaggtccttcctgtgcagtcttgaaacctggctcccagcctcctctttcgcgcctcttctctaacgttggtgatgtgttgaatccttctgtctgaatcaagggaatgaaacctgtttgtccctgtttaatcagaagaagagaaaaacagtcaagaaggaagagggtcaggaggggagagagggagacacagaaataaagagatgagaagagaagagagttagatgaagaagacaggagatgcaaagagatcccgagggatggtggggttataaggaaggcctcactgctcactgtcctaaagagccagccttgggcagcctctgtcatgctggcctgcacttatctctgcatctatttccccttgtgcaagattcagaactgcctgctccaaagaaacaataaaagcattcatgtttagaagaactgcccaggtgagagctagtttactgacattgtggcatgctctccggtgggttgcctctatctgagacttgcttgctcttctcatgcaaagtggaccaccacagcatgtttctgtgaccggcttattccatccaatacccctgcccagacctgaagatggtaataatttgctttggtggttaattccctatagtgaatgaaatctccttgttttatttaaggctgagactgtaagataactgagctcaaactatttgtctttttaagtttttaaaatgtattcgatttctctgactctctctctctctctctctctctctctctctttcatacaagcacacatgggggaggcagtgtatgcaagtgtatctatgtatgagtgtgtgtgcatgtggcatgtggaggtcagaggatagcctgtgagaatcagttctcttcttctaccacgtggctcgtagggatcaaactcaggttgccagacttgagggcatcaccattatcttttaagacatctctctggccctttaagtcctacccttccccctcagattccctgtattgctttcacatggcagcagatgtactttgtaggtgttttgtaagcagtgcctggtggtcagcagagtacccaggatggcctagactccttcaggacacttagggatgtcctttgtaaactttgccttaaaagaggccaaatgcatttatcccccactctgcattggtaggttacttctttagtctctaccccaaaagatgcagatctttggttttgggacatttgaggggcttaagaagtctctgcagaattcgtaggacacagtacagactgactccagcccttagcttaaaaattatcaagtacctgaaactgttgttctgaaacaagggaccctgctggcaaccatactagtcacaagtccagagagggtggggttgaaagtgtgcatgcaaatctaagggaggtagactgtgtcacaagggtccatatgccctggctggcagggaagggagtctgtcgctaagtgacccacagagcagccatgtacagaggtgagctactgggatcctgacatgcacctgtgttaccacagtacccactggaacttgctccaagcactgttggtgacctcacttgtctgtccccctgaggcatgacagctggctcctttgtccatgagatgactgtttggagaagggcaggcactcatactcatgggcctgataaaacatttgtttctatttgacttggaagtagcttgggtatattatctgggctatcactgctatcatctagtgaaccaagccttcaatgcatagccattaaaatacaataatggcactgtatagtagttaaattaaacattttagcagtacnnnnnnnnnnnnnnnnnnnnnnnnnnnnnnnnnnnnnnnnnnnnnnnnnnnnnnnnnnnnnnnnnnnnnnnnnnnnnnnnnnnnnnnnnnnnnnnnnnnnnnnnnnnnnnnnnnnnnnnnnnnnnnnnnnnnnnnnnnnnnnnnnnnnnnnnnnnnnnnnnnnnnnnnnnnnnnnnnnnnnnnnnnnnnnnnnnnnnnnnnnnnnnnnnnnnnnnnnnnnnnnnnnnnnnnnnnnnnnnnnnnnnnnnnnnnnnnnnnnnnnnnnnnnnnnnnnnnnnnnnnnnnnnnnnnnnnnnnnnnnnnnnnnnnnnnnnnnnnnnnnnnnnnnnnnnnnnnnnnnnnnnnnnnnnnnnnnnnnnnnnnnnnnnnnnnnnnnnnnnnnnnnnnnnnnnnnnnnnnnnnnnnnnnnnnnnnnnnnnnnnnnnnnnnnnnnnnnnnnnnnnnnnnnnnnnnnnnnnnnnnnnnnnnnnnnnnnnnnnnnnnnnnnnnnnnnnnnnnnnnnnnnnnnnnnnnnnnnnnnnnnnnnnnnnnnnnnnnnnnnnnnnnnnnnnnnnnnnnnnnnnnnnnnnnnnnnnnnnnnnnnnnnnnnnnnnnnnnnnnnnnnnnnnnnnnnnnnnnnnnnnnnnnnnnnnnnnnnnnnnnnnnnnnnnnnnnnnnnnnnnnnnnnnnnnnnnnnnnnnnnnnnnnnnnnnnnnnnnnnnnnnnnnnnnnnnnnnnnnnnnnnnnnnnnnnnnnnnnnnnnnnnnnnnnnnnnnnnnnnnnnnnnnnnnnnnnnnnnnccatccacgtataccataaaatatattaatgataaaaaagatatataaagttttaattatatagataacatcacaaaattacttatatagctatatggcatgtgtatgtatacatatataaaataaatactttcatatattaatataaaactacatgtacatataccatggcttacatgtgttccgtgttatataaaactatgtatataggtgcccttgcctacacagtttcccaaacaactggaatcccccatcaatttccaggtttcttttaaacgtaggcctcaacccatagccccataactgaaccaaagagatggagtacctagaaaaaaaaacaaacaaaggaacctgacttagattcagcagataacctgagtctgctgacagcgatagatgtctagcagaccacggtgagcactttcaatgaagccaccagagtattctactggacatagatttcttatcgagctactgagtgttgcatactaataacataacatctaagggtaccctagtgccccgaggtgtggcccagctaagtccactgcattcatttttctccctctctgtctctaggtccctccctgatatttgtggtagtctgtgtacagtttatggagcactcacctggcccactataaggcagccttttcctatgggtgttttcaattcaaaccaagatgaggagccagccacaggcctgcaaagcaggaggtttgagccctctcctggcttgttctgtgatctctgtctgtgagagaacgctggtggagtctgcagctagagctgaagagtgggggacaaggacagagcgtgtattgcccatctgccaggctggaggtgtattcattattgatggaggtagtgcgttgctgttcagatatgcagcctgcctgggtaaatgagacattcttcagcaaattgcttcgttttttgattgctgattgtacgcgtgtcaccaagctgactcaaggttcatcgatgcatgctcagtaaattagaaagaacataactatggatcagccaagagaatgaattctgtgcctacaatgacccagggccatttaattttctgcttaattttgttgcagtcagtttgcattttgggttattatgcagtaggaaattaacaataaataacaaatttggtcctcctgtgcttgtaatgatatttttataaatctttgtaatgctgttttttaaaggatcaaggtctgtgctaggctgataccccagcaagtatgtgaagaggaaaatgcattattcttgctagatagccttgttgttaaatagcataagcgtctctctctctctctctctctctctctctctnnnnnnnnnnnnnnnnnnnnnnnnnnnnnnnnnnnnnnnnnnnnnnnnntccctccccatatttttggtttaaagtaaaatccatttctctcttctcttctcagataacctgaagacaatggatgtcgatgagggtcaagacatgtcccaagtttcaggtgagaccttgggtgatagttgtatgtccagaagttgtgctagctgtccttggggaagctagcaaggctgccataaaagaaaaggctcagagccacgtgtgtctgtgttcagagaacttgaacataaaaacctcccaagtgagattaggtagtgtgaactctaacagcaattcaacccggattaaggaaatgctgtacttttggagacagttgtaatagatttgtctaccaaacatacagaacacatgccaaaggtggcatttaaaaaataagagatgagagaggaagaggaggccacagcagcaatgaaaagaaagcctagccaacgacggagcccagttcagagtcagagcacttgccacgtgagaacagcaaatcctttctcatcttaccagactgagaaagcgaaacactctggctaatagaaaggtggagctgggttccaggctgtccagtgggcagcactgagggtggcccatccagtagatcctgccctgctcctgcacgcatgagtgtatgatgtccggttctgcctggccctgcatctggacagtacctggaagcagacttcctggacttggagattcagtcagtgtttctgtttcacagcctccaggcagttccccagtcccatgagcctgtcctctctatggcactggccagcctgccatctgtgccttgggcaagctgcctcctcaggtttttgaagagttgttgatttgtttgtaagtttgcattttggtccaggtgcccctgacaggacccgcccttaatatgtggtgttgcctggatcactgggtgacctgaccctctggagatgggcttgtggcaagtcctgtgctctgtcagctctttctttccattgtaaggcttcagacttaaacttcccacaatgcaaagaataatgaatggctacttttaaaaggtgttggtcttatgctctcctagctgaaagtaatgaatgtggtctcttctctatgcaaacaaaccttgttcttgttatacaatctacccacttcagtttaaggaattcatcttaaaaataaactcttacaagtagacagagcatgtaagcacatgctcactgtggtgttgtcattagtacttaaaaaactatggtgtgtgcacagacccgaagcctcggctcttaaaaaggaggaggatatgaatatgcaggtatggaaagaaatctgaagtgtatatcaaaatgggaaagatacaaagtatgattccatgtggaaatataaattgcacacacgtgtgcacacattctgcatgcttccatgaacagttacagtgattctagagtgtagattgacctggacttcccccaaagctgaaggttagaagaaatcctggcgtgctgaggggggaggggaagacattgtttttttcttgtactctgtatagttatttaacttcgttttcttttgtgtttcttaagcaaatctgttaaatgaaaagatgctgtttagcttgttgtatttagcttcccttgccatcgcccaaagcccaggaaaatggtgctaaacataattaaaatagggtgatgatcaggctctgcttttgaaagacctcacctacgggctcaccccttacagcaggattgtttggaatatcacagaaacagggatgtggagaaactccaagggcaagaagaatcccatctgcttgtctttgctgctttgacctcagatgagttctgagtttttatgtttcaagatgcactcagtggtccacacccttgggccacatgccgcctactgtctgacgtcctaataccaaaacattaggctggagatgagaccaacccagatgactatcagtgaaaaaatgggaaaagtgtggtatgtgtctataacagaatattatttagttatgaatgttggaattgatcattaaggacaacatggatagactccaagagcattgagttaagtgaaagagcccaggttctaaaaaccaaaggcaggcacacactctgcttcttctgaatttgttcttataaatgaatggtctgggttggtggatttgccacccacacatattcaagggttgcacactatatgtatgaccgaaatctcaaacatcacactgtacctcataaacatgagcaattattggacgtcaataacaaaatttaaaacaataaagatacaacttcccccagcctcgaaaaccacctctaaaatgttaactatgatgggtagtcagtattttcatttttccatttgatcccaagacttccaaaaactttagtttcttgaacttctttttcttgcccttaacattatgctggatggtgtgtattgtaggttgttctgaaggagaggactgttgagggcagggacagcaacacagcctgaaaaaacccttcactttcattttttgtctgaaaatatttggtctgaaattttctctgtatgcccatagcaaaggaatgacacccctcaccatgatacagccgctgcattctgttcagccttgaacatcctgaacgatgattagagcatcatagagtgtgtcacacttaggaaagaattacatattgcttttgcactcctttaaatttgataacctcccaattcaaagcaatgcttcctcctttgtctgctaagactgggaagaaagtaggaagggttcatgtaggaaggttgacttgttattttgttttgttttgtttttctttttttcttgttttgtttctcttgcatccctggggatggaactcaggactttattcatgcaagacaggccactgagctataatcctagcctgggagttagctttcttcataagaaattgagggatatgttactgagtcatttctttttcataagatgttcaaacctagcagtttcataggattcccccttaacatgtgcaataccttagaaacacattccttactagacccctgtcttcaaggcccttggattcttcttccctgggtgtactctaaatatggactgtgctctaattggtgtcacctacagcatcaatcctagaggttgatggtcattgcagatcatgctcactgacttgagtctacgaattgtggaaagctttctgatagaaactcgcagctgtgtccagccttattacactgtcatctatcaagaccacactaaggtgcttcctttggaggtccttaactcactttctgatggaagctcatttcctggtcttcccttcatcagagttttcaggttactcatgcgtttttgtttgccttctaaagaaagaggcagtctatgggaagaaccttctgggagttgaaagaccaactccacacccatttctgattgcagctgtgggacccaagccaatgctcttgcctcctaaaccatggtgtgtctcctatagcagcaggaactctggccagtgaatctctgaggctcctctggctcatatcacctgaactctgtattttatattttcttaatgctgtttgtaatgtgtttgttggaacgtgcacacaaggagtacaccctgtagacatacataatctgtgtagggaagaggagcctcatatatattaaataacaaaagtattctacctagttaatcatagtaaatcacattgattgagcacttggaactacccaaataacatcctaagcattttctcatttttaccttataaaaacccactgaaggaggatgtagttacctccaagttgcagaaagctaagactcagcctataagaaattgacaggaagtcccatagggagccagacagttatgagcctacttcagccctaggctagaagcaacttactctcctcaagtggtggctctgtagtgaatacatctattaccctggtattactctcccttaagcccctctgtatcttacagatgcatgcctttgggagagatttctagagatttgctgggtagctgggcaaatcataatacacttaagaactcatttacttttagtttccgattaagggcacaatttctttaatttgaccacaaacttctcaaagacatacttgacacacaggcaacaggcaagttaagtataaattggtgtgattataatttcaccagaagtgttgttttctaagtaagtgaaattttgcttgcctcttcagagtcattccatttgacttattaagcatttgctgtcttgctttctccaccctattgcttttgctacctggtaaaggtaccacatagcctatgcctctgtggtgtactacaggttaccaagagtttacttaacaagttggtgttcatgcttgtgattaattttcatcatgacctgctgaactatgcccaaatcatggattctagcctcttgttatacctgaggagagaattctaaagtagtggccatcgctccttcccatcagctctccaattgctttaatcagacctataacccaggttaatcattgtattcataattggggtgtgttggctttacctagcacttgggggtttttttgttttgttttgtttttttaagtaatgattcaactggttagtggggcaaaagccaatatgcacaataacttggtctatcagaaaggttttcatgagatggtaaattttctgcaggaagacctcccagcagtaaaagaatgcaaagatccttggtcatcaagcccccctgcccccagagtggtggatgtctctgcaacagaactcacactgggggcttttaggcaaatcagaggacctcttaaaaaccatcagtgagccgtggtgaggcagggttgaattaatgccacgctcttggctgccatgttaatgccatgttccttcaggtctgattttgtactctatacccctatacacatggggactgacctgttgttcctccttctccctgtgtggtttcatctgctctgagagttcctattgatctgtctgacccacagcgttttagaatcacaatccctactgttttcattacaccgtgtccttcatgtaggaaaagtaccaggatataagatgggaatagaggtgagatggccttttaatgtacaacttcagccagctgtgattcttaagaagtccagctgttactatgaacatcatccttaagatagagttgagttttgtcctttcaaagatggatcagccacacttttaaaactgagtaaccaccatgtgtctttttgcatgcaattaactaatcatgaaatggactgagagtgtggcctgcttttattggctaatcctagatctttatcacacatacccctccctcaagctctagtgtggcatggcatgtccacaggcccagaagtatcatggatgataatatcaaagttattatatggaagaccatcacaacaaaacaagtcaaagcagttccatttccccgtctccaattcccactcaatattaatgccagctggtgaatcacgggtccccatggctccactctccgtctcatgtaccagcctcttaggctatggcgttgtggccaggggccccactcccaatctcatggaggttctttttataattatttcttttttttttttttgaggttatagctgtcattttcctctcccctctgctctttgggggttatttactggcctttcaaaaggcaagtggtgtgggtatctgctaaccagcctgccacttccccacttcaatgtctctacattataaagaatatctgtttaaccagatttctgtgtgcttattgtctttgaatacctccctaacatccccaaactttgaaaaccttcattctgggccatgactctgtatgactgaagctgtcaaattgtttgtataccttctgcatgctcctggatagaggctttccttgcttattgcaaagatgagaagcagagccacaagtcctgccactgttactgtaaatgtcttctatttagggtgagggagacagtgctgactactgctccaagattctagcacaatgtgaacacttttaatcagcctcttgggctttttgtttttctttgggaaattattataatcttaccccatctttaactatttatctcgtatcagctatccaaatatacccaataatgctctttctgaaaatatgccagttgctctaatcaagctaacctgggatagtacattgtgatgtctctttcttagcgattgtaacactattccccaaagcatgtctttggtgcagattctattttaaagattccagtaaagcttgtctcatgtacttattttaatgatcttttctggctcctaaaaaatgttggtgcagttcttgtgagttgatccaattttcataccatgtctgttcgtgttctcagaaaattttactcattggcatgttgtttacataatgctcacaaaagtctgggttagtgtttgttgggaggtcatttcgcctattgggccaagttgccaactcaacgggcacacgtctggtagcctaccttcaggatcttgagccagactttcttttgtaagtagctacaatgagtcagtcagcatagatttagggcctcactggctgtttctcctattcagtttgagcctgtcaatccctttaaatcagctccagaaaggtggacactttcagagctccagccttggtgagaagagagcgttttctaccagcgacagcttcactgtgtcgatctcaatttctccatcctggagctagacaaacttcattctaacccagccaatgattgctagggagatgggattaggaggggagtgagggggtaactggaagtgaaagtggccaaaaagctgtctacacgtgtatgagattatcaaataataacacagaagggaaggaggcagagggaaggaccaaaaaaagctgtatatgcatgtgtgaggttttcaaataatagcaaagaaggaagaacgggagaggaagggagaatgggaaccctactttatgatgtgtaacaaacttttatctttgtatgcttttgagtttgtcaaagcacgagaagagcctcagaaatacagccaccattagcccagcagtaacatttccaaagatgtatacaatgatgatctttaaggatatgtccaaaattgactgaaaggaggttcagtgcaaaattgattatatagactcaaaacaatatatagagtcaaaagaagcaaaacaatgaacctaattccttatttcccctataaataaaattgtagaaataggtttgtatcaacaaattgtattgaggannnnnnnnnnnnnnnnnnnntatatcaatatttatgtagtaatttggtatcaggaatagttaaggccacagatgttgttttgctttttgttgttttccttttgtaaatctttgttctgtcctctgatgtctatttagtgcttagcagtgatattcattcctaggaagagaaatatgtatttgtcctaacagggaagcattaattcagagcaggtaccccttcagtctgccctagtgctgtcaaggtgaagcccaggcagtgaggttttcccagcagctgacaacgcctgccagaaactcaagctctgatttgtgtctgcaggaaaggagagccccccagtcagtgacactccagatgaaggggatgagcccatgcctgtccctgaggacctgtccactacctctggagcacagcagaactccaagagtgatcgaggcatgggtaagtggctcaccctgctgtcctgcaggctgtagcatatgcacagttaggaaatggctgctgtgtaggataaggtaggtgggctcattccctcttgtcctctgaggtcagtcacataacagggtttcctcaagttgggatatgggtgatctgctttaattgatgtgtttatttttaaggtggttttctgttgactacaggtgatcttggtgttactatgtgctgaacaacatggaactgtatgaaatacatttgtattaatttaaaggtcactttaaatcaaggagttcggccagtgttggagcatatagatctcctttgcttagtcctgaaaacaccctgtatgctaggggttcttttcaaaacataaacagatggtcacaacctgcctgtggttctcatcaccaagcgagaggctcattctgggaaacaggagaaattgtcctttgaccatgccacacagggagagcccctacttcacagtcaggctaaggacttagttcttgtggagaaagaggtgggcttgcccagaatttccacagctgctgtggaacctctgcagaatcatcatgctgtaggtgtgatttaaggaaccgaaaaccaggctggttcctggagagcgggaaagatgtgtgtatttcacgtgtcatagatgaataggtcacaagtgctgtgggcaccttgtccctttggccgtgtagtgtgagcagggagcaggcttcgctggcactgctggctggctccctcacgggcctttgcatcctaaatcaagtgctcagttccaggtgcccttggtatgcgcactctgtagaacatgtcattcccagggtcttctctccctgactgtcaccatgtacaattttcagttcaatttcctttcaagatgaagtttagaaagtaatcatttcaaacttgaaaaattaaaatgccttggtaaacgttttgcctgatttggcagtagcagttgacttggccctgaagacaggaggaggctatttgatgtgagcctcagaaacaaagagagcaaagtttttggtggacaactagaagccacaacatcacctgctagaaaaactgagagcaaaagcccagagaacagatagtacatgggaaagggatgagaaaacccaccattggaacacccccagccacactacatggtggccgccttgtcctgtgtgattgttgaaggaaatccacccatttccacatgtaggctatatataggctgtaagtttcataatgtgtagaatataacattaaatagaatggggtaatatctaggaggtattcacaaattacaggaaataaagttgaagcaatacttcaccacactgccttatggagtggctcatgagaatcatggattaaaaaggacaggggaccaggaatcaggagagtttggaataggatcaaagggcaacagggtcaagcaagagtcaccatggaaacagggaggcaggagggcaagtctcagaagggacacatccaagattctggtccctgactgtgaccctcagggcagaacttctcatttctctgagcctccattttcctcatgtgagcgagagcactaccgcatgccccagagtggctttgtgggccagatgaataaagcagaagacagaatggcagacagactaaaagagagagaaagtgtgtgggtgcatcgcaggcacaaatgttcctagggactgttcctagagaaaagggatccatgcggcctcagtagtaagatgaggacagacaacagagcataaggaagagatgagtccattaataaaaaacggacccataaaacacgcaaaattgaaaacagccaggagagagagagaaatgtgttagagaaggacagcgacaagaggagactgactgcagattgagagctcaagcctgtggagtgaccagcagtgaggacgcaacaacctgggtcactcagtggagagaaatgggcctgctactgacagctgtgaccatgccaggagactctgtaccagacaagaacagacagagttagaaaacaagtggtgagagactggaaaccagcccctgactggctagtgggtcattcccaggattagaaaagttggggtttcacacactgctgctttctgtaataatgctgaaaggacaccatagatctatgtataaaaattgggacaatggcagtcagaggcagagtaatacaagcaccattattgggcctccattttcttcaaagtctgaataagaagaaaaaaagatttgaagagctgcttgaagaatttaagtcagacccgaagaagaactttctggaaagcagggatttagtcatcggaacggtctacttaatggcactgtggcttgttcttctgaagttatctctttaataatgagaactctcagctctctgaagtggttgtgtctgaaaccatttgaagctgacgaagcactcaattgacctcttctggcaaacctgagtttaccaagtctcagatgtttgctggaagaagggcagagccgattgcactgacacagaactctagggcctcataaaggccttcctgtgggacagtgtccaggttgatgtctagagagcagatgggcaactataaagaaaagtgatggctcaatactctattcctttgctcagtaatacatcttccttctttctggtgagtttccccctggtttgggtttgctcttgtcacttgtggcctagaagagaacagagctgtgctctccttcccagctggcaagctggggattgtggccaaactgtgataaaatccagagcaccactctgtttgaatgtgaccatagggaagctgggacagagagagaagggaacccagaatgaaaggtggaattccaggctaaatgcacaaacacctagaaaaagccaagccagtatgaggcttggcagagtccaagggaaaagccaatagaaggataggcctgctcaaggctgagctgaaaatgggatgttgctaagcaggggaggctaagtccatgactgagcactggacaatctgtgcagaacccagacagaaggaaatgggattgaactctgagaaggtgcattctaggatatgcacccttcagtctccctttgagtgtatctcaatctgatattcatctgccagatctgagagaggctgaccctgtacagcctctcagtgagtgcttgcacctaacttttactcttcttagcttagatgagaagagagaaaacagatacaaaagaaaatctacatttttcattcttctaggaatcctgaaatagtgaagtgtataaaaatattgatcttggtttttattttgtttggttgtctcctcctcctcctcctcctcttcctcttcctcctcctcttcttcctcctccttcccctcctccccctcctcttcctcctccccctcttcctgttcttttttctcctcctcttcctcctctttccttctcctcctgctctttctcctccttcatttcttcttcttcttcctcctcctcctccttcttctgtattcattacattgactcagccatgagggcagggctgaagcaggaactataagcaatcattttaagttctcattgtatataggcaatgtacatgttactgtgtcacatgagaacatttagaaatatattgtcacatattgacaactaattgtcctgtgccagtgtcctctcccatgtgtatgtgtgggggtagcaataagttttggttggcatacaaaatctgggattcactgtatcatttttaaacatactatggcaccaggcttattcgccccatcactaccatcaactttaggcagtcaaggatgggtcctcaggatatagagcagccatgagattctaggcctaggagaaagaagggctggagggaggtttttaggactgaaagagagactgcaagcctggctggcgagtgggaagctggcttcaagtacggatgtgagcccagttatctaatcagcagccaaaggaagttgtttttatcagtgaaatgcatctcttctgaagcgacagccccacttcagcctagaagcagcattatctggcagcatctgagcagctgcagcaagtgcagggactggaggtgcaagtaggcaggatctccagcctcgggagctgccaccagcactgagttcctcttttctggaggtgactgaagtatgtaggttggctccgtgtgtgccttgatttctctttctcccttccttgccccgcttcagagctgaacgtagcagagcacatctgtcaaattcaatactgttcataatgtaacttactatctctgacctgaaatgcttgtaaaagccactggtactccaccataggcatttctaagtcagctgagaagtattcctttttcatggatttctcaaaacatgagacagtaagcagtggtataaaaactattttcccacccgccctctctttccatcagaggaatgagaattgcaggctgccacccaggtctttggccttctgcatgcatctcccttactctgtcaaccagtaggaatcacaaagatcttcacagaccatcctaacagttggttattcctgaacgttgaagggactctgcatatcacctgtcatcatggattgggcttgggtgtacacagggagaccaagcagcaggaatttaaatccattccttggaggaaacagaaactcaaatgtgtcagtcagcacctgtgtgtgcatgcttgcttctgtgtatgtgggcattatgtgttgtgtgtatgatggatgaatgcatttatgtgcatgctagatgtgtatgtgctagtttatgtgttcctgtgggtggcatgtgcatatatgtgtatatttgtgcacatgtatagtatatgtgcatataaatatgtaatattttatgcatgtgtgtttgatatataaatatgtgtagtgtattagggtatgaatgtgtgaggtatgtaaacaatgtatatgcatatgttgtgctgtgtatttatgatgtgtttgtacatgtaatatatacgtatggtatatggtatgtgctatgtgtagtatatatgtatatctgtatgggatgtgtatttgtcatagtatgtgtgtggtatatctatgatattttatgtatcacagagtatatgggtatggcaagtttatagtgtgtatctgtgatgagtatgagtgtttgtatgatgtgtagcagtgtttgagtagtgtgtctggtatatatttggtatgtgtgacttgtgttatatgtatgtttgtaccatgtgtgtggtatgtatatatgtggcatgtatgtgtgtggcttgtatgtggtatgtgtgatttgtgtaatatatatgtaatattatatatgtctgtgtcttgtgtgtagtgcttatgtatggagtatatatgtggtgtatatatgtttggtatgtgttatatgtgtatggtgtgcagggagcttgtatgtgctgtgtatgtatgtggtattcatgtgtgtagttgaacaatttgtgtagtactatgttgtacacactgtgacatgtgtggtgatatgtatatgtgttatgtgttatgagataaacgtgtggttgttgctttttctacacttacagaaattatgttagggtatatgaaagtacacgctgcatgccgtgggagcatgtatagacattaaaatacaactcacaaaagtcagttctctttgtccaccagtgggttccatggactgaagtctggccattaagctttgcagaaagcacctttaccgactaagctatcttactagctcaaatgtgtggatcttgacagtatgccatggctattttcttggagattctggctttcaactagatgctttagaaatagttagaagccctggttctggtgtgtcctaagatcatcagtgctgcggtgactgccatctctgcacctaggagatgaggggttcgccttacctaagcaatacatgcacattatactctgacatggagttcaccccagccaatatccatgatgttgttaatggcataatattaatgtcaataactcgtgttgtgccaatgacaaaaattacatatcatctcagttgggcagccctttgcctgagattccatttgcaagtgacatggggcagaagcctggacactaagcctgacatgaaatcacaccctgggtcccagagaggacaactccaggtctctgaaagaacttcactaccttcctgtctgaaccatcaactagaactcctgggcataagaggcctaagccagctctgccaggccctggcagagagagaatggagacaaataagctaatgtatggttgggaagaacatggctttccactttgggctagcctcttcctgtacataaaggtcactctacaacccacttagtgccttgtatttgtagactgctgaccatgaaatcctgaaatttctttagtatctgacccaaaacagaaccacttacatgcaaagcacaaccctgccccaacccgtgctgaattcattttagtatttgtgtacatgttgtttggtcagctcccagctttgtttaggatgtctggacctcagagatagaaactcatcccagaaacctttagtggataagatggactcccactgccttggaaaccttgacaactaaagaaagctgtagtgcctgtgttacaacgacacaacgataaactcacaagaatatgaggtttttgtagagaatatattcaaagaataaatagtgtgtcctaactgggctgaggattggggttcacgaggggttcagattcatggagtagctggtatgctcaggagtatgagagggagccaggcctattttaactgtagaatgagttgagcaaagagggaagaatgcttaaaagcaaaagagtagaggcacaagaggaccccagcatcttgatctggggtgtgagcagtggtgcaggcaaggggccaggtgatagctccagctgctttacatagtagagtttgttctcacgatagcaactgttaggagtcttggtctcagagaagggtatttgaacctgtgccaagcagtgtgagtaaggagaagtcagggagagatggggtttgtctactgtcttggtataggtccatgggtatagtgaccaactacagtgattgtggcaacaatgatagtaatccagcgctgattagcatagaatcatgataattctgatccagggaattggctggaatgtagggatggaagaggcagatgttccatctatgcatagagtcagctaggtgagacaagagagggaacccttggaggaacactagcctttaactgtagagaagaggggtagaggggaggagacagtcctgcagttcagatgaaatttctcagaagaattataggatggaagccacagaaaacacatgggacaaaagtgagaaaggtcaaagagaacttagtgagtgcccttagtgaggagaatttgggccagttgtgcatttcccaaaagtagctcaacgagttgcaggcagaaaccagactgccacggaaaccagactgatgatcagggaatgggagggtagccatgagggaggatggacaagtcagatggcatgggaacatgagctgagagttgctggctgaaggggagatttccaggctgatactttaggatgagaatagttaagaagtaggaaggaggccaggcgtggtgacacatgcctttaactgcagaagctggaggatctctcagttggaggccagcctggcctacagagggatttccaggacagccggggctacacagagaaaccctgtcaaaaactaaaattacgggaaataggaaggactggagaaaaatagactaagctaagaagaaacctgggaagcaagcagggnnnnnnnnnnnnnnnnnnnnnnnnnnnnnnnnnnnnnnnnnnnnnnnnnnnnnnnnnnnnnnnnnnnnnnnnnnnnnnnnnnnnnnnnnnnnnnnnnnnnnnnnnnnnnnnnnnnnnnnnnnnnnnnnnnnnnnnnnncccagcagtatggatggaatgatgggtgttgccttattggggatgagaaagggagaggagctatcaagcaagagtttttctaagaggaaacatggcaagatctgatgctcagcacctcaactgttttaggatactgatttcacagtagcacagctgttgttcagggcagggatacagagcctttgtgggaggctgtccctgccacactgaccagtagtgctaccccacccaggtctctgtgatacccacatgtccccatacagctcccaggtgagaagctgactcagatgtcagccacacttccctcagcgttcccacactcgagagctttcgagttcacacaggacatcttcagctgcctaagacttttattgtggtcagtaatgttccagaacccaacatagaaattaaaagtatactatagagaatttggaccaaaaaagatgcccaagccccactctcaaatgtgcagcccttcttccggctttttttctctttgtgtctccaaaaatacaggttaactgtgcaaagcggtttgtttctgtaaataaaacccagcattaatcttatcttcactgtactctgaccactgaaattcaaaaatcgcattgtgctcccttcatttactgagagaaacaaagaggagtccaagattaaaaggccctggaacagatagacaaacgctactttctgtttctgggtttggtcccagtgttattttctgctttgttctctgtgtgttgaaagagtcagtggctcttctgtatgtagagcagtcaactgacattccgttaactttccttctgcatggggtttcagaaagaaatggaaaaaaaaaaaaacaggttttgtgctgtggttgccagttgccacctgtcctcctatctggttaggacatttttctgatttgggaagtataaatataacccagaaaaaaaaaaaaaaaacagcttcccttccttttatgcaaaagtagaaaggtttaagtagagacaccaggctctacccatcacccttcaagtttgcacagaagcagctaagccctgtgcagatgcctgctgggggaggggaagtgagaagcgtccctcctcaggccctgagtggttgagttccagcttctgacctctaccagaggagctcaacagagcacagatctgctcagaatctcaaaccttttgttgggctttatttatttatttatttatttatttatttatctatctatttatttattttgatatgagaaacttagaaataattcaaaatgtatgctcagttggcagggagtcagctgacctcaatagatccattcatgctgccagactgttaatgaacagcttgaagaccaccatggttcgaagtattgacaccacagatacttggccaatgctacaagttagggcttttttcgttttgttttaatttggtttgggatttgagagctggcttgatacaattttcatatcatgacacggaagtgtgggggggtattttttggatagctatttgtgcagtaaaggccaataattggctcccagtggctctctgccattggtatcacaaatgaggcctcctgcagcaactgccctctcccttgtcatgaagagagaggacttgtgttgaatctgtcagctatgttccaccaggatggcaatagacatcatgaggtgactcccctcgctgctccctgaacccatggtgacaatttctcagtaagacttagcaatatgcaaatgtggaagagaatgatcaaaagttcaccttaccatggagggaccccagactcttggaggccctgaagcaccccacttgctggaacgcacttctgtggtaaaaaagccattcatgctacctctgttaggagcaaggtcaaggcaggcatctctggcacaggactggggtgtgtcattggaaggctggctgccaggagagtacttcccctacaggggatgtggctgcaggctgtcgatttccactgaagtcaccaagccaggattccagtgaagcactgaacgtccagcatcttccccatccagcagggtatgaggtgtgatcatgtgatccatggatggcatccaggctgactcctgctgcctggcagggcccaggcaattgtggacattgactttttccaaatgagagaccgttaccctagaagtgaaaccctgctgaaatgagaaaaaggcttttattacagccctgcaggcagccatatgattattgttattattattcttagaacctggcaaatgctgagtgctttcacagtgtctccacactccacttgaacttggtggcaataaaaataagaatcagcagtgaccccggagcatttctcttggcttctgttggcaccccaatgtgtaataatgacaattaagtattgcctggtgtagtgaccacttgtttgagcctagtatgacagttggaactgccttcagtgagatcagggctggggagagaaggctgacttaagtgcaggcaggggtttaaatcctaagtcctaagaagatgatgctggcttgccgtaaagccatgtgtgtttccttacagttttggaagactgttacttctccgtgggtgtttagcctagactttgcacctgttgcgggtttgcgtttctctgtgtgtttcttgtatttcactaactacttttgttattggtgggatgcctcttaagtattcacccttagcttaacccgcactgtgcctacataccacacgcatgcccatactccctgtcatcccctggagagacagacagacagacaggctcacctttagctcaagactttgaagcatgtcaaccaggagcagtccctgtctgggtcaggagtctcagatgagtggtagccattgtttctggaatatagctatgccatgcatgattgcctgttttagtggagcacagtcagcttgaaatgtagtaatctaggtgctagatgcttctgaattccctagagaaaggaattatttttttaaaggaaaaaaatccttcaggtaaaattaatgttaatatattttatttagtcaatatacccaaatagtattacaaatatgtactcactgtagttgttgtcttgttttttgaaaacttgtacttttcccgtggactgagtgtttgagtccagtgtttgatgcttatatcacatctcagtttgggttgaagccagctatttggagggggctgattttttttccagtgctgcactcaaacactgagctgtgggccaagcctttgggcagggatcttgacagttcctgaggaaagcatataattgcattgtagagaatataatgtgaatgcttgctgagttgtatcatctagttcttccatattttcctcagtctcagtcctgtcccgtttgtactgttgagttccacttggcatcagcattttagcaggggccccacatgcatttgcttccaccctaagagcagtaggagcagaaatacaggaacctggaaagcccatcctcttccctgagcccaactgacatgcgtgggacaggggatgcttctggcttttgtttgtatcgcttccgtctattcctatgctctcccgtgtatcactgtgagcctattcattaaatgaaacatcttcaaaacatgacagttgattcataaacaaggcacattacagaagaataccacaggcatctgctcccaccaaacccagcctcagagacacagtatgactgctgtggaaatggtggccactgagtcctgttgctgttccctaaaaaaataacactgctgcaacctgatgaggcagcagggaggaaggggtgttggaaaggacttttaagggagaaatagaggccagcttccctcctgcaagcttaaaatgaagcctgggatttgcctcactacccactgtggttctgaaggcccaggcatagatggctctggcattcccgcctctcccacttcactcccacctgagcccagcttatacccccagccttcgcagacgtctgcacgccactgcccactgcacttcttacagttcaggagacagggtgtgtccctgtgcatgtgactgctgggtttcctgagcacgccaggatccacagagataggatctgtcattgtggctttgaattgttattgtcttatgattctccctccctacctctcccctcacccttcccacccttccaccctagtcttttcattttctctctcagtcttcttnnnnnnnnnnnnnnnnnnnnnnnnnnnnnnnnnnnnnnnnnnnnnnnnnnnnnnnnnnnnnnnnnnnnnnnnnnnnnnnnnnnnnnnnnnnnnntcttctttctcctcctcttcttcctcctcatcttcctcttcctcatcttctttcctccattccttcaaacatttggtcatagatacattgtcatcaaattttggttgcttgcatggatcaaaggaccaatagatgggttgattatattgtactaggccaccctcagcactgctcaagaggcacaggcagctcgtcatggatagcctggctgtcataagtaacctgaagcatctttaggagcctattgtcagtaactagcagagtcaaagccacatttctcaaggcttttgtgttttgtgttttttgtgttttgcttcctgttaaatgagttagttggtcattccctggatcaggatggattgtaatgaactatgtctagctggttgtatcacagaaagcttaccacccagtgtcgatgggtatgcaagcaggacttctgagcgcatgagagtcttgactttgttgactgctccaggctataaaccaagctttactgtagcaaagtttgaagaagtagatttgttttttcctgaattgagaaaaccaaaagaaaatctgcatgattacttgacatagtcctcaaagctgtgtagtcttgacaatactgccattgcgcctacctctaccctggagtgtcatgagcatcacaggtggacatgaacctgttcctttaaagagttacatgtacaccatgtcttgcctctgaatcatcttcagatttggagctaaggggagatgtgttctgagtggctcgagcattctagagctcaagggacaactgaaggtagtattacgaaagacacttgtccaggcaccctgttaggcagaagccaccaagtaagatgagatcacagaatttaccctttgataatatatatacatatatatacagggatagagagtcaagaaaataacaagagaatggtgagcaataaaatatggaagaatatagtttgtggtacaaaccacaaaccattctgttggttttagacacttaaagttcaatatttatgaaatagtcagctaggtgtagtgaagttcatagctgcttttatcaaattctctgatggtagtatgactattctcctgggaaaggcaaaaaattgtcatgggttagaaaatgccatttgagtcaccagtggaccacatgtgtgacagtcccattgatggtatctgctagtctatcatagctgtctgcatctgttcttaacccgctgcatgatcacataggactgagaccacctcagggtgcatttcttcttcaagaatatctatgtttttaagtgatgcattaaagtaagagcttctgtcccaacatggatggaacagacagtgaatatacatcattggctttaatgttaacgcttttctcccatgccccatacccacagaggaaggcaaacacaagcacagcttgtgagcaatatcatgttgctgctgtgtcaaaaggtccctattcccatgaaatacactgtgtaaaaggccacccagacctcatgtggactcagcagtccatttaaaaccatcagcaggcaggtcactcgctgtaggtgctggcagcatggggggccagacatcaagcactgaactaagtctatgcatctgcagaccattgctcctgtctacaacatttcctcagcagccagagctcttccagttggagatgagacaaacactaaatacccttccttctaataattcctttccttggaatataataaagacaaagagtgaaaaactacagtgtatttgccttgcttctcaccattctcactctttagaggtttcttgtccatgtgcatttctcttatatcagtgtggtggcatgtcatagctagccatgaatccagagtgttcacagataatgatctatgggatcatggcttcttaagcacatgctcattgtttataaactcttagagttctgaggacggaaggctgagtaggaaggccacctccctcacagttggtgtactctcagaaatgtgtgaggggtctgcagccacatcccttgttgcctgctgacctgcagctcagaaacagtttgtcagaagtctgaagacactcatagatcttttgcattctggaacctttgacatttggctgaacaatgggatctgctcatcttcttcttgcttggtttaatgtgtctcagctcagtctttggaggtcttttgcaattgccagacacatagacattgtagaataagacaggactcctgcccttaagaggttcttagttacttcttcggaagatggctgaaatatcccttgttgctgttttgataccgtgatactctgtggatagaatgagggaatgatgaagttagcattgctgagctactaagggttctgcattgatccctgatgccctagacaacacagacacctacaagaggaaacagctcattgtccaagcttactggcaaagtcatgttttcaagccattcaaaatccagttctttaaagggatccaaaacaactaatacacttcagttaaaggagtaaaaacatccaactgcccctgcactgttcagttctcttattccagtggaggttattttacaaggagatttctccatcaggtcttgtattgaatttcatttttactttggcaaattaattttctcctgaaatccgtgttttctggagaaaggtttggtaccatgccacataagtgtgtcaaatcactcaagagcagatggtttactatcaatgcacaaagagttcttagaaaggttaagtgaaggggaaccaggtagaaagaaagcttgataataatggtaagtggagaggtggccatggctgttggtacagccctcctggtttgtgttaagtgatgttcccttggtgctgatggagttccttacccattcttcaggctggggaatctctcttgaaagaaataggagctggccagaaaggcagaatgtttcgctataattgagatataaattttagctttgggtttagaaagaatggcataaatcccaagattttccttctgtatgtatgctggggcattaccaaaatgatacccttgcttgatttctcatctgtcactcacacctccacactggtaaatgctggcagaaattgtttgagcttgtcagaaaagttaaggtctgaaactgttgcattcagaggtaccacgcaatctcttcagacccacatgtgtcccaaccaggataggaggtttgctgatcagagatgcccccataattgggctgttagtaataatctcacttcaggaaagaaagcgagaacagggtaggcatgttcagaaagctatctggtacatattctttgaggtaaagcatctttaaaaggtactgcttccccaacactatgcatgaagacttgaagaagagtaaagtgcttttgaagagtatgggtatcaccccacaacaagcagggaccctacttactggaacaataagctggccaccattttgtttcaggaacaaaccaactagaccactataatagatacggatgccgttggcaatgtatctataggtagatatgtaataaaataaatgagataggctggagcagcttcaacgagcggttgtcatgtttaacagccattagtagatgtccagtctctcagtaagatctattcacactctgaaaaatgtgctgccaagtacagggagaggtagcacatgggccatgtgggatagggttgctgtaggaaaccttgcctctgtgctgtagacaggcagattccaagcgcatgcccagggacctggcacaggctgaaagagtggtcactgtatggagttgccagatgccatgcttgcttacctggctagttagcttaagggcttcattttctgatctttggcagaaaatctctcacaggactatggatccaagttttcagattctttaggctgtcactgactttttctttgttgctatccaaagaacaaatacttgttaaatgccattctgaggccaagtagctgccatctagtctaattttgttggggacatacttgccaggcatataatgaggaaaatgggggtgaatgagatgagcttgagtttttctgagggggcaggatattttaaaaaaaaaaacctgcaatgcatacaacaagcaaggagagaaatcagttttgaggagacatatgtaggtctttagatgacatattatgtgtcttcaaatatggtggaaactggcttgccggctttggcttgggagtgactgaaggccattgaaggaaggcttgagtcagggatagtcttcaacaggtatgaacaggcacccaggatatgtaatgttgagagtgacttgggtggctttctcatgatcaagtgatccctagtctaaagcatttgttctgtcacagccttttccaagaaagctgagagcatgactcatccttattaaaaccacttgtggctaggctgaggcaggaggattgtgatttcaaagcagctggggctacacagcaagaccctgtcttgaaaaggagtagagaaactgtcacactgaaattcctgattcttacatgttaacatcttgaatggataaaggtatgactcagtggtagagtacccatctagcttgtgcaaggccctgggttcaatccccactcctgtgaaaacaatgaagagtgggtatgttatggcattgattgaaaataagcaagggacatttgaggaccatccaggtacaatttgagtcaagactctcaaagcaagaaggcctgtgtgtttcagtttataaaggtattcagagagccatagggttggaagaatcaatatgaaataaaaaagccaatttgaaaaggcaaaatgattccccaatgagaaatacttcatcagctacagggagcatgtcatgtagagcatggctgccctggggtggacttggagatggttcctgagtaactgtgctgtggcctcagtctcagaactcagggctgacaccctgggatacttggccaggtggagacatgatgtattctgtactttgtctccttgagcttcaagtctgatccctgctaccggtagtgcaaagacctacgaactttcctcatcaccactggtccagaccctctggctgctgccgtagctttgcaagctatggttagcaccctcctagaaatctagtgtgccaaagcaaaagccgctcccactctctaccctgctctttaaagagtgtgtgctgtgaggggccctgcagctgcactacagaccctcagcaactgaatgctgctcaacgttgccgagaggtgctaaccttgcccacagagagctctgctcactcctgaccgttagaaatgtgtcaccgaagtgtgaaaatacttatgctgttagacttcccatcatttcttttctttcaatccctctcatttgcatgggttactcataaatgtagatcttgggtatgatttgtacaactgccctgctgtcggtctgtaggaaagccttgctggatgggcttgtctctggccttcatctacaagtgctgggtgcaagtgagtcacaggtggtgccacaggcagctggcctggagccgggggtgcaaaacacagagtgatagtcgtttgacacaatttcagctctcaaacctgctttgtaaatgaaaacactgcttttggactaagtcattctctctgattcccaattgttcaattaatctatgtgtgttaacacctctctataacatcatagatagtgcctagtaatgaactctgcgagttcaggctgaggaaccctgaatgatccgccactctgcagctgttcaggagttgtaccctttttgtgatgtggtgaactctttgaggacttcagcactgtattcttaagatactgaaggagtgggttgaactgtagtaacaacaaggattttgctttttaaaaggatgtccctgcatacagcttagcaaccttgattgaactcagcctttcatggttacaccttaaggttgaaacccatttcatttcatcatttcccagaaggggcactcagttcacccatttcctgtttttaatctcaggttgttctgtgcttgttccacatctactctcccagtagcatggctatggaagccagcgtcacactcttgccccacctggcatctatgcattttgcacatagctgccatccgttctaagctatctgtgcacagatctgtggacagggctggctgttcccctggtgtctggtgccatggccactcatggagctcgtcaccccagcactgttgtgccatgtctgacacacaagctctcgtctccctatgtaccacagagtctctttagtatgtcacagaggtggacatggtggttaagaccaaagcttctaaacttgctccatcctatttccagtggacttgaaccactgtgtgtaaagaattttcattgactgtgcttgatacctcctgccccgacagtctttaaagatgtgtgtgtgggggtgggaggtgggggtgtctgtgtgtgtgtgtgtgtgtgtgtgtgtgtgtgtgtacttgcacacgttgttgttggtaatgatgttgagtgagaccagcacatgactggcatgtggtatacaactgagccatgcccacacatctacattcatgtacccaccccttcagcgtgcccttccctggcctcccatgtaaccagagtattgacctgaccctttcaattctgctcaggtttcagatggttaggaccctagggacaggagccatgcttacgtttgttaacccacaggtcctgcggtccaccaaaaataagttgccttgcctgagtaatcctggctctaagctgtcttctctgttctcatactgagtcctgtctcttcctctgttaggctgctggagattagataagaaaccgtctttccccccacccccactacagtctgtaaagcagggtcctcaccctcagagtgggtgtctcagggatttgccaggaaatgcatgagtttcacttcagaactttgcttatctgggttttagctgttgtttctttcccatcctgggacccttttcactgcgaggtgcagttggatgtgaattactgagtgatggggtcgggccagctacagagctactgctcttcttaagagtgtacaagttcttagcatcgttaggccacaagactgtcactttcagcctctggtgtctttggattcttcctagttaagcttctgttgtgtttctgtcgcttaaaagtgacagaagcctccaagttgatgtccaaatatgtttctgtatttgtaaaggatgtgttttacaggggctggagagatggctcagtagttaggacactgactgcttttccagaggtcctgagttcaattcccagcaaccacatggtagctcacaaccatctgtaatgggatctgatgccctcttctggtgtgagtctgaagagagcaatagtgttctcatataacataaaataaataaatcttttaaaaagagagagagagaggaaaggggaaaagaaggatgtgttttacttggaaccctccttggcatcctttggcagcatcagtaatggagacatgaatgtttcatcgctgcagagtgcacctttgcagatttcgtgcagtgcccgtttccgtcaaccgttttaggttgtttaagctttgttgttggagaatgagatggtgtggtgctcactgtgctgtacaacctcgcctcgctttcacggtccgattgcttcataaggttgagagacacaaagaggatgagagtcctggaggctgcagcaggactggcacattgggagagtgtgtgttcctgcaccagcaggtttccattcacgatttcccaggagcttggactggcaggccctaatcttcctgacatcagcccttcccccatcactggcaatgacaagctgtttcagctttgccacctctcccaggccactgtggatgtcaccgcatagcatggctgactatctagtgcagtctctggctgacacaggttaagtggccatgggtcacaagtgatgctatcctggtgatattggttaagctatctatgtgacatggcacacgtaggacagccatatgtcacgtgactacattcagtgatacaagtgcgggcatctacatgaccgttagggtattctggtaacaaatggcacagataagcacaggcaaccagaaccagcacctccacctaagcttgagtgatcagtggggtcccagaggctgtgctggcagagggatggccaagggcatgattgataaggctttgctccaatgttagctgtgttatatcaactgtgtttcttttattatttttgtgtttatttccataaatacctaaattgttagtgagatactaacatttcattgattacagagtttcaatgaccctcttagtcgttctcccccaagacattctgtgttcaaaaatatgatggtttatatatgtgacacatagaaaataccatccagagcgtctggccaagaatgtgcccatcagaagccttgaagacagcatgacaggtgtagggctggccagggtttctagggaaggtggacacaagagtcttgagccctcttctacatagtcctgcccaccagcctccactaggggaatcttccccagcttccattttccagggaaagcctgagccatctgaaattcctttcacaaagaaacacacctggcccatacaggtggacaggtaccttgtgctgtgtatcatctaggacccagtgtaggtaatatctgagtagaaaggtcttgtgtaaagaatgctcagagcacacacgagcacagaagagccttcacccactcagtgcatggccttcccagggctggacataaaaacacacagatgtgtgtacaccacacagtactctaagccaccagtctcacgtcaaagtccctccaaagtttcagatgctagatggcaagacagtaaacaaataggaacagctcttcagagctactagcatagaaagtctccatggacatcagtttgttgtgagagcaacagtggctctgaggtggctgataattctctggagcagtgagacggttgggacagaggcgtgtgacctttaatccctgccttggtgagggtgccttccatttacaccaggccgctctctcgcctcctcagtggggcctgcgggctctgccactagcctgtgacatgttagataaggactttttcttcttggtgtccacactctactagtgggctgcctttgactcaaccctgtgcttgctgattatctccacaaacagagtgccacagactaacacgttagtttggaattttcctcattcttctaggatattctctttcatctgttctcttcattcaaaaaaactgagttgtagaggtttctaaatgtgccctttttaagtattaatatatataaatatattctctgtttcagtagtctacttttgttgcttgtttgcttgattttatctcagtcctaacactagatttttattaaaatgtaaggaaatcttattgtggtttttattctcgctgtttaaatacaagagaaaaagaactgagtggcctaccagaagtatcaagagttcctagattttaggatcaaatagcagatagagtcaaatatgcagggcacagttgagcagcccctctcatcccacaagactaaggtagccgtcatactcttctgtggagagtaggaatacagagctcaaactctcattttatgttcaagaaaagctgtgtaaatacatgtatacatgcctgtgtgtgagaagacacatgtgtgcatgtgtctcttgtatttttgcatctgtataggtctaatggcatgtttgctgttgttccatcttgtgtgtgcatgcctattctgtgacagtatctgtgcatgggcctatatttgtgtgtctgtgtgcatgtgtgtattgtgtgtgacccaagctctctgctaaaccctctgcatcattccctaatcttacttccctttctgtcagttctccataactctttgatttcagttgggctggtgtcttgagcagcttcctcttttcctgcattcctatatttcagtgttcaccctcgttcctcttcacaagctcttaccatacagccaagaggatgtggaaacccagttacaatatgtcacacaacacagtgtcacaatcaccaagcatgtccccacctcctggggatagtgatcaggatgggataggagaggcagggagggacatggacagaatagagaagtttggctctgggaagcccaggacttcctggtgcgtagctgctatgccagatgcatggtgagcaaagtagaccattccatcattttctacaatggcagttggggttcacacatctgccttggggctagggcctccccgtcattgcctcataatcctgcttttcctccaaaatgcctgttctgtttggctcccaacttccctatttctgcctgttgggtgttatggtctcctcccctccttggaagtttctccatcccaaagccagttcctaccacgtgaccagctgaacaagcacctcagacagttcctcttgtctgggaactccagcttccatagggccataggatggctcccagcctattatctcccccagccctgtggatttcagaacactgtctccataactctgagtaggcagaggatcacctacatgcccaatacaggtctcttcccacatacgtgacttctaatgagcccccctaggaacccagggcccatggtccatttctgctggtactccatgatggctcttgggcagtgggtatgtgtgtgctgtatcttatagtactgccaagctaaatgctcctgagccagagacatctttctcctacaatgttctccagtgacaccctgggggttagaagcatatttctagaatggctgcattcctccaatgatgtgtttggcttgttggaaaggccttgtttcaaaatctattagaagcagaaagtttatttaaaacaaaacatgtcaggatttagggaattatctgggaggaactggctatgaggtcccataaacgtggggtgcatccatagcttgctgagtctcactagtaaccctgggcagctctgttgtctgtgagtcttacttctgtctctggtaagattggggagggcagtatttataagggttgctccaggaattaaacaagtaaatgcatggtagatgttcaacacagctccctcacctaacgaaagctcgcaagctactatggggactgtgggggaaccagtagccttgacctagatgctaagtgcttaatacgtctgattttaactgggaagagcacatagcttaaactactcatttctatacatttcccaataaagttctattgaatcatacaatgaaaaaaaacaggaaagaagaaagaaattctctcatttcaaagaaatgctaataaggacaggactttttgcaatggcctggtggtaagaaatggctggtccctactaggaaaaacatggtatttgaaggttcttcccaggagatgtgacattttgatgaaagtgccagtaagctaggggtttctgagtaatgagctgagctcagagaaaggtaatggcacctgcgcaaagggtgccagcatttcctgagtgctgggtgtcttatctggccactcagaccacatggagcccagagacagctatttttctggatttccttgggaggaagctgaaacttggtgatgtcatgtgactcttcagtcccacagaaatgataatgtaggggtaggagggcctgaatagaacttgcttgcctctgtgggcccattttccatggcagtttccaaagcttggaggccagatgttaggaccacagtcatgactaacacctgagagctttgtaatgatggccaaacaatatagaatgtggtcagcatttgtaatgctcagttcctgtaatgggagtctagaacagaaaggaagaagaagaataaaagggagaatgactcttgaagacctctctacaaaaagaaacatccaatgcaaaggctttgttgtgctgaagttagcagtaagttgcccctagacagtgaagggcttggactcccagcatgtcctgccttctcaccatgtgaattagcaacccccaaatctaattctgccaccagctgccattccttggccagaccctcttaacagtggttctcaaccttcctaatgctacaaccgtttaatacagttcctcgtgttgtggtgaccccacccataaaattattttttattgccactgcataactataattgtgctactgttatgaatcacaatgtaaatatctatgttttcaatggtcttaggtggcccacattaaaagggttgctggacacctccacaaaggggtaacaaaacacaggttgagaaccactgctctatagaaatgtgtttctgttcagatatagaggaagctcttgcaggccacatgtaacatcaggttcctgcccccagagccagaattctggagaatgtgtcttagcatggggataagctgatctcatattcagaagagtagcaatgggtccctatctgtactgttctcatcctccatgaaaatgtccctgtaaatatgatctatgtgtgctacacacctgtactgatgcactcttgtcatgactctgtatacacacaaccttgtgctctggtacaccaggccagccaagtacatccatccccatgagcacacacatatcccagccactgacccaagcttgttctcctgtacacatagccagctcttgcagatatcctctctgctcctccccatctgagctggcacctgagaaacaggtgttcctgggaggagcacatggagaaataaccaaagcagagctggggtttcgttgcctcctgtgagtgaagttgtcaaaagcctactgaccactccaatcctgatttctcagcctgagtgtgcgtaagtgcctctccacagacaaaggcacacactgccagccaacacctggacctgtggctgcaaaagctgcaggaaaaccgacatccttcccatcagtcccccttctttgctgagtcactctttgcttggaattctgacaggtgcccgttgggcttctggaagggagggacagcagaggatccaccctctgtgtgtcccaggagagattacattatcttcagccaccctgaagctcggcctaggcttctggaatcggtggggctgacacaaagccagttctggggacagggaatgtacggatagccacaaggagctaagccatctgatgttctcttcacctgagcaccctaggacttagagtgctcagctctgctttgcatgtgttccactcatttcaaggaccagcataccctacacctcacccatgtgagagctgcacgcttctgaactatatttaagaagccaggtcaagtacaatccatgtagtgttttcagccctacattttgccaattgctggttggcattagcaggcagttcaacttgttgctcttggaagtatgttgctgggaaggtcagtctaccagccatgtgtaacctcttcactcagctcacacctagcagtggatggaagctctcattagctggctcataccaatttactctgataacgacgaagcttgtcctgggacccttcccggcttcctcccaagcctctgtacttctctggtgaacacggccacctcttcactttgtggtaggcgcctctgactatgtctcaccagcacttctagggcctgagttttggaagataaacacagaagcctcctggtgtccctcctgacatctgcagttagtgctctggtgcatggcctaattatccagcaagattccagtgtatactctatcctcagtatactggctcatgtgatctagtaaagatgtctctcactgcacagaatttcaaatgaaatgggaaataagtatctcaacttttaactcatacccaagacctcaaatgatgtcaccatactatgagacacaaaacaagcacctttgtaataatgttcccctcctctgcccacaccttgttcaccttactcatcagaatactcccattctctgtttttaaagctttcattattgttttaattttctcatgcttatgtggttcttcttgaatcccaggtcttacaggtgatgtttaggagctttctcatggcaattttgcatactttgtaccacacacatgaagaagtaatgcttttgatgaaaatgtagcacttcttttaaaaaaaaatcaaaaaagcaagaaacttaaaacattcataaaatatctctaagctttttcccccagacaaccagatttaacctcccagctgtgggtctgtaagacccagagcctgacctagttgacatgaactgtgtgtaagagggccaggagagaacagctcagtgtcagaacctgggggaattacaaatggcaccatagtgatgacttgtggcttctcctgtaaatctgaatagaaacattattgttgctctctcctcgtcctctctaaacgaaattctgaacccatctctgtatttctaagtcatacattgctttttctaacctgatttgttctctgtgacaatttagtactgtgtttgtaaaatagagacaaagccaggacagggttggcggtgtgattcagtgggagagcacatgcctcatgtcttcacagccctgggtcctgccctcagcactgaaggtaaaactcaggtgttctacaacaaccagaaaaagggggacattgtgtcctctgcattgtctgacaggtggaactgggagcaagacaaactgatgctgggaacgaccccaacgtccatgtcccccaacagcctaaagcacagggaagatcacctcaaacatactacagatgagatgagtccccaacaaaatcctgaaacagaagaacactgttagggatttcagggctggaacatacaaacatcctctaccctggctccattgtcctgggtgagctgccaagccctcttcctgctgctgttccattttgaggaaggtgacaaacggtagctgggtgtagccaatgtcataggcccataggattctttgtggacaagaagataaagcgttatcttcccagcctgtggctttgtgctgagcacaaagctaactacttgtcctctcaggcccgtggagtattatcatgattcggcacacaaacctgacagaacagatgggattattcccacttggtggataaggaaagtgagctcagatagtcagcgcatgatacagtttccaccaaggaggaaaagcccagcatcagatgcctcccccgacctggacatggtcagctgcttcttccttccatgagatcatagcctctagacttacaaatgtctaagttcaagaacatccagaaccaatggaagccaagggattcatttgattggagagccagtaggcatagactgtagtgatgtatgacactggatgaaattaatgtcaaaaattactttccccactgttgactttgctctaaatatgcttgcgtcctaaaactgcatgtgaacaccaacatgttctgccatgtactctgacacttctcaattactggacatggatttctgaaactatccaactattgtagttattaagtagagagctttctagctgaactgtgtcacagataacctgtacctcctgtgcatgctaccaagtgacactgagtgctagtcagccatggcctctttctgagcatggctatggtcaggtcacatgagcattcagagctgggcatttatctggaataggcttatgtgaagaccaaaggccagaggggggagggtcttctgaagaagcgtctccaggctatgatcatcgggcaggccctgcaactccataatactgtgaggaccaaacacaaagagtccagagagtaggcaatctggttctaggggagagatgatctgggtgtctccatctcagacccagaaagtcacttaagccaggaagacacatgcaaatggtggctgtggggtggagggtggggcattgctctggaacaagaatgtgcatggttaaatggaaaccataacatttgcaaacatgggtaatttgtgagctttggttattgttttagcattttcctaaggtccatccctttatttattgaatagtgtgatttgacaagagatctataatagcagttgccagaagtagaggaattttgacacaagattttcagttctctcacagagcactgtagactgctgggccatatggaagtcagatgtgatcatagagactcaaggaaggtgacagcctcagtctgatagacacgtgtgctgggatgggagcccaaaggccacagcccacagtgcacaaaaaaacctaggcaggtggacaatggtgagcaggaagcacagtcaggaggtaacacagacccagcctgggcttcgcagtggcaggggtatgattggagcacatcagggaaactgaggctccttctcaaagaaactgggatgatcattggactttgtgggtggccatggaggagctctggtggattcattggctagaaccttgtttactgacacacatggagaaataggaaaaaagctaggccttggggagagggtgggtttggagatgggcagctgtctggtgcctgaagggcacaggagtggcaggcaggaggcagcccgggtgcatcctgttctctgggccttggcacagttctgctgcctgctctttctatacttgaatgcctggaggcatgcagagcatcgtagcctacacagaaggacctctgatgtcccaacaggagatggttgaaagagttgggacagcctcacagctcttctgactctgcatctgggtgagtggtggaagtcacttgagtaggtgtaagactgcacaccaatgcacctctccactgtgtccacaggtgggacgtggggcttctttgtatcttagctgtctctttgcaaggctgaaaccacaacgtcttctgtcagtgatgtcatctagctagtgtcctcttcccgtgagaaaaccctgatcagcccaaccaacagggaggtttaagaagaaatgtatctgtctataaaatatactggttctcaaagaggaagtgcttttggcttcaccctacactcctgtagaatatacctatannnnnnnnnnnnnnnnnnnnnnnnnnnnnnnnnnnnnnnnnnnnnnnnnnnnnnnnnnnnnnnnnnnnnnnnnnnnnnnnnnnnnnnnnnnnnnnnnnnnnnnnnnnnnnnnnnnnnnnnnnnnnnnnnnnnnnnnnnnnnnnnnnnnnnnnnnnnnnnnnnnnnnnnnnnnnnnnnnnnnnnnnnnnnnnnnnnnnnnnnnnnnnnnnnnnnnnnnnnnnnnnnnnnnnnnnnnnnnnnnnnnnnnnnnnnnnnnnnnnnnnnnnnnnnnnnnnnnnnnnnnnnnnnnnnnnnnnnnnnnnnnnnnnnnnnnnnnnnnnnnnnnnnnnnnnnnnnnnnnnnnnnnnnnnnnnnnnnnnnnnnnnnnnnnnnnnnnnnnnnnnnnnnnnnnnnnnnnnnnnnnnnnnnnnnnnnnnnnnnnnnnnnnnnnnnnnnnnnnnnnnnnnnnnnnnnnnnnnnnnnnnnnnnnnnnnnnnnnnnnnnnnnnnnnnnnnnnnnnnnnnnnnnnnnnnnnnnnnnnnnnnnnnnnnnnnnnnnnnnnnnnnnnnnnnnnnnnnnnnnnnnnnnnnnnnnnnnnnnnnnnnnnnnnnnnnnnnnnnnnnnnnnnnnnnnnnnnnnnnnnnnnnnnnnnnnnnnnnnnnnnnnnnnnnnnnnnnnnnnnnnnnnnnnnnnnnnnnnnnnnnnnnnnnnnnnnnnnnnnnnnnnnnnnnnnnnnnnnnnnnnnnnnnnnnnnnnnnnnnnnnnnnnnnnnnnnnnnnnnnnnnnnnnnnnnnnnnnnnnnnnnnnnnnnnnnnnnnnngaggccggcagatggatctctgtgcatccaaggcctgccaagtttacatagcaagttctaagacagccagagcttcatagtgtgatcctgtctcaaaaaattttgttttttaatctgtgctatttcataaaacagtggcttaaagctgcaggtagactgtctgagaaaagaggacaaagccaaaaatcgcacggtgctccctaggtcccattgtggggtgagctgcttctgatgggatagtgtatagacagggtatcacagggcaatgagcttgcacctgaagatggctgcaaaagagcaagcagccaggaactgtgtcctgattcagagcttctataagcaatctgggaacattatccaaggtactctcagtgacccctgagcttcccgcctctgtgtgtacatgaagaacaccaggcttagctgtgaggaccacagagcaggcacaactaggcagttgtatttgcaacaccctgcaagttattagctggccacgtgtttgtcattcgggaaactctgttgtaaatgcagtcacccagtgtgaccatattcaggcaagtaaacacatatgcatgggggtgcacacttaagtgtgtgaatgcagtggcaaaacttacacatttcccagtgccttacaaccacccaaaagaaggctgcttgcaaaactctgtcttttgaattatgagggtcatgtaactagctttgactttaattttcgtatttctgtgctaaacaccaaaaactttacttttcacatttacatgctaaacactatgcttaatgcaaagtatagaccttcctgtgagcccaagatcccttactgccaaaacagtgatggtgtctacctcaaagacccacagtgcagcttagaggctgcctgtggaaagcagtttgtgtgcacctgacagacccactgagttgctgctgtgagagactggattttagcatagatcgggggtttgctgtttgccgtaattcctacccacttagaacaccatagaatgttttttctaagtccagccattgtatctgtatcaattccactttactatgccagacagaacttagcaactggtgctatattttgcttttaagcttttggtagatttttggttaaggatgaaaattagcagattgacttgagttatggtagacaaatgattaattcttttgaaagggactcaacatttcatgacccagcatcatggtctttacattaaatagtaaaaatgtaaactccaggcatggcaatgaacacctgtaatccccacagtagcagagggagcaacaggcggcccacccctgagctttctggctagccagtgcagttggattggcaatgtacaaattcagtgagaagccctatctcaaaagatgatgatgggggctggagagatggatcagcggttgagatcactgactgctcttccaggggtcctgagttcaactcccaacaccataatggtggctcacagccatctctagtgggatctgatgtcttcttctggtgtgcctaaagacagctacagtttactcatatacattggatagatagatagatagatagatagatagatagatagatagatagatagatattttttaaaaaaaaagatttgatggtgatgatggtgatggtgataatgtctagagcaattaaagaaacatcagacgttgatgtctccacatatgtatccacacaactgcacatgtactatccacatacataaagtttttcacggggaaaaagggaaggttctgtggccaaacaaatttgagaaacagtaacttaagcaaagtttgataactatgtctttttcctgaagtccatcagcctttttttcctgctgagtcagtagttgatcccagaagtttaatttagccagctactttgtgtatacaattctggctgacattttgggaaagaagtcatgtgagcgtgcacccggtgtgcatgcatgtacatatacacacacagacacgtgtacagagtataacaggtcttaggaattggaactcactaggaacggcctgcgaaagactacaagcacggggcttggtgccattttcaaaggcaactactaagcaatacggaaatctggtagctccttttggagcagcaattccctatccaacaggcagatgggaaatgttttaattttctctggatacaataaagaaaagacaaaaaaaaaaaagcaaatgaagaacgtttgaggggcagactacccatgaggaagcacactgattgtgcagacgtgtgctttcccgtgtgagactgtgatgtggccaagagcacactcagccagtactactgaatggttgctattggttctaggatgttctaggctgttgaggccgtcggagcttgctcacagttcagaggtcctgctctgaggagtgacttttctgtagcttgtctgaagacaacaataacaaattagcagctaactggtggttttacataataacattgccttttgaaagcagcactgtcttctgcactcttgtgtccgtgatgatttgacaacctggctttctttttgccttctctattgcagttgcatatggggctgatggctttagggattttcatgcaataattcccaaatctttctctcgtaagtatatgctttgcttctagaaaacagatgttcatttcatggtcagttccatcacacagacaccaccacttgcatgttctctcatcaacaccttcctttataacttgaaagtgacatggactaaatgtttgccattctatcattaaacacccagcatccagtgtgtcattgatacaataaagtgcaaagacagagggtgagggtgttgtttggtttttgttttgcttctgaggcagggtttccctattattcctggctggcctagactgctctgggatgcccagactcatcttaaatttgcaatgatattcctgtctctgcctctgcccctgcccctaccccctccctctgtccctgccccctcccctccctctgcctctgcctcaccaataaggatcagatagtgagaggattataggggacttttgggatagcatttgaaatgtaaatgaagaaaatacctaataaaaaattggaaaaaagaaagagagagagaaagagagagagagagagaaagaaagaaagaaagaaagaaagaaagaaagaaagaaagaaagaaagaaagaaagaaagagagaaagaaagaaagaaaggtgaagaaagaactaatgtagccacagtgggtgtctcactgggaggctgctcagcagggtcctgattaaaactgtgatcaacaactttgtggtccatgcttcctgtcagcatcaaacaaaccaacatcttttcagataacttgtgcaattttgtgtgacaggaaaaaaaaaaaaggtgcaccctttttcccttgctctggagtgctaacctcagaacagagaagaaaaactcatgggtttccagcccattcttctgtggtggctcgccacgtaagcatgcaccatgttagcgtgcatgcagcctaccagctctcctcggagctgctgtgccgaaaactatatggtaatttcatctcttaatacattgaaagttgaaaatgataactatatttgagcaaccataaggagtattttcaagaatagagaaggcttttttttaatgcaaataaaatcaatgcaaaagagttacaggttgttagaccccttaggtcttaagccttcagaccttgtatcaataaaatgtttaatcttatgaagcagcagcagaaagcagagtgtattggcatcactttgagaagagctttgtctgtgtgtcttgcttcagatcaaaccaaagcacactctaccaccaaattacaccctaagaccagcttgctgacatcttactactctaatcttaatattgagatgtcagccgcgttaggtttatgatgtcctgttatcagatattacttgggaagtacagtacttagcagtatccatctcaggatgctcctggtcaaaggccagatagacttccctctccagaatattagaagtttgctaagatatttctcctattaattatttcttcagttcaatgtgaaggtaagaatttgagatttccttcttcatgtaagcatgtatgttcacataacatatttttatgtgtgagctgtgagtgtgccagggcaggaagtcatgttaattttgagcctgccaatcacagttttgaaatgttttggtaagtcaagtgcacataaaggtaagacagcacattctaagacacattttcattaagcctgaggaatgggcaaagcccagcattacctactgaccaagcagatgggtgaggttttcaggatgggaaaaaatgacagtgggagatgttctgaaacatgataaatgttttcatgtttttcatgtctatctgcttataaagattagttcatagtaatactatctctttttctttctctcttcccctcagttgtatctttctggaacaaatggttggttgagcctcaagtctccgcccaacaacaaccaaactgttctgggccaatatcgccaccttgtggtcatgcttgagaactgacctacaggcttccttctggaagttaaaacaaacttttggcctcctctgccatctttatcccattttgagtccctagataccccccaaaaattaaatatgccttaaaattcttctttcttaataagttttcattttctgatctatttccatctctgacttcattgtatttgaaggctaaacatcaaataagattatttctaaaataggcttgattaggtagaaaccctattattttaactatttttaaatgatattaagtcatgcaatttgttctaaataatgcttacaatttgttctggatttgagacaaggtgccatgtagttcgggatagcttcaagtttcccagggagttaatggaggatggcctggttcctcctaaccccttgtctctgcctcccaccacactgctggctcctttagaggaaataaaaaacactagtctgcacatacatatgtgtctcaggtcttcacctattaccacaaataaatgaaaatgtacaaatataccttatatattttaataactttgcttattagctacagttattataaagatctttacacttgcatctgcctttttccatttaaaatattgaacatttcctttacctgacataaaaccaggctggaatgacaacttcagaatttttttttccaatgggaaaataacattgtacattctgaaatgctacttttccagtaaatattaagatgcaagggaaataacaatgtagacatcaaatctgtgacccagaggctaccctgcatattacacctctgcattaaaaatgctcagttgctcacaagggcacacttggcagccaagccaggcctcccagttcctgctggcctgagttccttcacttctccagagtctttcattctaaccttttcctagatgctagaggccttgccacactcgggtcaggaggggcattctcttaggacagcagggtgactatgctggtatacctctaaaatacataatgagagggttttttgttttctccattttaagtaacaactgagaagtaaggtagcttttataaggggtttgaaaataccatgttaacataagccatgttttgtaaacactcaaattggcctcgcccattatctgtcagtatctggaagagtaggttgaacccagagctttggggggacagggggaatattcacaagactccattcatgttttatatttaatcagctcagtgaagcacttcatcaagctccctgttgttctcagtagtagactagggacagagcttacacaatatgtgtgagtctattccttatatgtagcatttcactgaaggaataccacagctaaacagttctagaaagagtcccttgttgtcatggacaacctttttggttgaatagaaatctgtcagattccttatttagcaagcacccactttgcatttatccccagagatatgagggcctttcccatgtttgtatagaaacccttcacatagcaggaatcttaagttccccatgctgacagtataacctgttttttgccaaatcatcttctctctggtcactcatctccgttagacatcacagaccttccaagtcaaaacatggctggcagtgtctgcatcacagccataagtcccagctcagcaagatgtgtgcacagcctgctgtgtccccactacttacggtccttggccacacccacaggcatctgcagacacagtatcttctttctgaaaaacataaactttcagtctttaactttctgattactgatcatccttcccgtactatctattgactctctctctctctcactcgctcgctcgctcgctctctcgctcttacacacacacacacacacaatcatatataattaaagctccagtataaatcaggccaagtagcttggacttcatactctatgtccttggcagctatccacctatttttccacatacatttcttacccccattgtatctgattcccacactgaccctgggacaacttgtgagcaaccctcatgcctcccgagttacctttctcctttaatgctatcacagctggtggcagcaccatcttctaaggcagaaatgccaaagccctgccttcaggtgccctagtcaccctagtgataggccctcgggggctttcaggaatccagtagcctagaaagcagcacccatcacctgattcataacctgcttcctcctgactctccactctccctcattttgcaagcagcctgctagaggagagctgctcctggtatgagaagcctgaatgttactgcccatgcaccctgctgtcctggccttctctgcgaaacacccacataggcattagtgacttgtgccaagaaatccccccagaggattgcacatgaactctgctgtttttattcatacagaaaaatgcttacaactggcatgagcttctctgccctgcatgcagtgtgctcaggaaagcaggatcacagcctcctttacctcagtggagtcaggaacatgctaaggggatggatcatcccaacacatgttcttccacaaggtgatttttacccagctgtggatgcttcctgtttatacactttgctgcagttctgtgtcttagctgtcatggctaaaaacttgccacatgagctatgatcctcttcatggaatcttttactacagagagagagagagacagagacagagagagagagagagagacagagacagagagagagagagagagagagagagagagagagagagagagagagagaatattgaaaaataaccagaggttgagatttttgtagttttactgtgctgacgtagtctatgatctgttgctataacaaagattccacagactagttagcatataaacaatgtaagttcgtttagcttgtaattgtggaggataagaagctgagtgtggtgtctacatctggtaagggacttaagtggcgagatgggacattgctctagcacaggcctgtcttcctcttattcagctttgcgttgctaagtgaaaacccaaagcaaggggttcccagaggaacgtgtatctggttaggctctagaggttccaggcaacccagcagggaaggctttggtgagagtggccaatgatagtgatgggagcatgtgtcagagccaatcacacatcaaaagttgggaagtagaaagtgaccaaccgggacaatatagtcccacagtctttttgaggggacatcactagccatctaaggacttcccaccaggtcccacctcagaacagactctcaccctgagtgagcctttgggaagtgtttttccaaaccatagccatgtgagtgcagatactggtgaatttgaatctacccaaagataacctaagaatcgctactccagagtccagtgtcattaatcaccgctctgtgaaccgcagacctttcccctcttgccacatggataggatctggcctctgagggaagtaaggactgctgatttgcaaagtttcggatcagagacttgtagggaaaagcttttagagaattccccattacagaatttctcagtgttgtcctggacatgtgcggaattcagcctcagagttcattctcacttccaggacctcagagcccatgctccggtttgtacgtctcatcccattactaagccagtaagtcttttctgcaaagagctaacaggataatattggcagtaagtaggcactggagacctctgtgtggagacctcccagatctagagctagcaggttgctagctctgtgaccatagcaagttctttgactgaacctctaccactacaaaatataggatggtaatggtgtggcccttttgagttgttgtgaggttaaatggcaagtgccattaaagtaccagagggtctaggacaaggtaagtacagtaagcactgttgggatcaggcagagccttggtggatgtcacttgctgtgccccagtccactgctcctttcctcagtcctctcagctgccccaggctggccatggctatgaaagctcctgtatttacagatgaggaatgaggcacagagaagtcagatgacctgcataaaatcactgcgcctttaaataaaggtgccacccctccaggccagccatttttctcttggtgtcagaacctcaaatgtcccagtcaagagaaatttgggaaataagattctctctcaggctgtgaagcaggtgggctcctttaactcaatattctccattgtaaagtaaccttaggttcccctccagggtcgatttaaacacacagctgaattcaccccaaaatttgggaaccagaaggattggggaaacccagaagagcacacttcagacatcctctatggccatgtcctggctgctgctctggggaccaaactttgagaatccttgaccaaaagtgctcaaattattatgtcaaatagaggctggagatccagatcaatggttaatagtaattgactgtcttgcagaggacccagatttagttctaagcacccacatttggcgcttcacaaaagcctgtagctctagtcccacaaagctgcacacagtgtgcatacatagaagcagacactcccacatacacacaaacgaaaagcaaatgcctgcttcttaattatgtcacagtcacctcactggttattttacttagagcagcatacctccctaactcttatgcacctagaaaaaacactgagaaattatggctacagtttccactgccattgcatgtgggattcaccactgtaccattagtgttttgggagcatgtttatgcaatgtgttgtattttcttttcaaatgagtaggcaaataacaaaactacatgacttgtgctgggactacagcagagtcaatagcggtgtttgtttgttaacctacaagcatcttcttctttgaaagactgttacctgttgcactcataaactattccagctcacctcttagcaaatgaaggagatgtgaggacacctccaccttagggcacaggctggggtatgctgctataagataaaaaagaaagccaattgctaagaaaacggaacttggacaagggagttggaatcagaggtccaaacagcaaagagctgttccaaatttgttgtgcatatgcgtaagaaaatactcacccgttcagacccgcatctgtccctgcatccctaagtgcatcccgtaggtaccatccacactctctggaagcttggtgcatgcaccagtcagactgcccgccctgaggtacaggctcaaaactgcttagaagctccaactgtctatttgatgccttgttgctgctgtgttgctatcttgtgacttatttttgcagtgacactgagtggcctcctgtgttgtctctttcagccagtaatgttaaagtagagactcagagtgatgaagagaatgggcgtgcctgtgaaatgaatggggaagaatgtgcagaggatttacgaatgcttgatgcctcgggagagaaaatgaatggctcccacagggaccaaggcagctcggctttgtcaggagttggaggcattcgacttcctaacggaaaactaaagtgtgatatctgtgggatcgtttgcatcgggcccaatgtgctcatggttcacaaaagaagtcatactggtaaggcctgggagttttcccttgagtgtctcctgaggtcctgtgggggctgaaggagcaaaatgtactgtcaagggctggggatgcaagttagtattgtagagcacctacctagcacacacagtccctaagttcaaagtgcagaaggagggtgggaaaaggaatgtggtcttgaagcatgttccccatagactagcagggcggcacttgcttataaatagctcccaagttgtactgaggcacagctttcttattctagggcagtgtctgaaaggtcttctcagcatgtacctaatcaaccctgtgaacgaaagagaaggctaacagcatgtgtgtgtcagcttctgagactctgatagtatactcgctagaaaaaaagaaaaaaaaaatcccagccacagtgctgactctcatgtccaatccttcacaagacgagatcaaaagctagagacacaccaaaactgacttcacaaatttctcattgagaaactacagagaatacttgttttaatcttgttaacacttgggattctctattctgaggcattagtgaatcattagtgaggcattagcctagcagcaaaatggtcttttcggaaagggtgtaggtcagcataaagtggttcaccctccagtctgagtctctgagtcagctagccatattgccacaagttttcatcacagagcagtaggggactttctgtcaaactcctattacggtagaaggtttgcacaggctttaagagaataagagaatgcaatagtctattcaaaactaagaaaatgttcaagagccatgcctacccctgccactggcactgtgggaagcctaaccagcttcagtcggctcttctactcctgttccacatgtatatgaacagtcaactccttgttcaacctaactgttactccaccaccactaaggacactaaagaggcttcctagaaacatcagtggtgttcaggacaagtgtttgcatggtataaggtttctttgagaaaaaaactaaagagaaacattactcttctttccatagaagtttcttgaaaggtagatattataacctggcaaattcacctaactcttatagccacagaaagctcacatgtaaaacgtatagagcctgggctatcactacccatacactggcttctttggggcctgagaaggctggcatctgctagtgcagtgtccaggagggagaacaacacgcacagatgaatgatagcgagttttactagactatctcaagaagctgaggaagatggcttggaaaggacaaccttgtctgtttcttacacgggactcaacaagcgtgcgttatccaaaaaggaatcaggagctagaacaggtatagagcagtagtgtcatcaccaaggaatgaaggcgtttccaaggttgggttttatatatggacagaagcagtttctaaaattatatattccacgtatagtatatgtacaaatgatttataagatgatacttaaataaatgtttgtcttcaacaaaagtttagctctaaagttaggcaaatttggcttttctgaaaggagcctttagttctcaagtgactcgtagaaatagacctggcatacccagccctgagaaaaccaaatgtgaaggtaaccttgctcttgccttctgtgaggcagtggaaattaacatggagaaccctgtgacagatgctcaaccagtctagggcctgtagcaaaccattgctgatagagagcaaacctctgactgtacagtaaaaatccccttagatatttgacaaatgaatcaaattctcgtgtagtaaattgctaacatatgactgcctgccttgacttaaaaaaaaagaagaaaaattacatgtaatgattaaacctgctatcaacagatctgggagggtacctgatatttgctacatactttcctcaacaaatagtgactaagtatcatacctaccccaatatgctaagttcttcaattatggaacagataacttacagaaagaggaaacaggaagagactacacacacgcacgcgtgcactcatagacaaagtttggtcattgccaactccacagtatatctccgtatatgtgaatatacaaatccccaggtagaagtaaaaaccccatttagccaactaggtttgaatagctagacagagcagatgggctttctcttccaggtctgggtggaatgtgtcagcaaagttttgggctctgcattcctacaataacagcaggttatgagaacactgcccacccctgtgaaaggcgctgggaatcacttggaatcttgagaacatgcagggcctaattcagactctgggagaatctggagagccagcattcctatgaagtcctcggaacgctgggcatggaagctagagcacaataagcccccggggacatgctgctgaggacaggacaataagcagagccatctctgtggcctatgaggagctgatgtaggatgtgctgccccagtggacagctaggatgtgcaccagagcctctctctcttcttcccattgcccatgacccagtcaaccagcctcatgacttgcagcccctttctagtaaacaaagatctcaggggcatagcccagcttctactcctctcactgggtggcattccactgccgccattttctaaatggcttgtgggcaccggtgtgtcacttccccttgggtgctcagttggtttcatgtttgattcaagtgtcacaaccccagcgtagccaccaacagctcagggtgcatctgaggatcaccctggggtggtagggagctgcagaagggcagcggggcccacctgtaacatcattattctgaatagcaaagactaggaagtggcctgagcagaacaaagaggctggcttcctgtggtctcctgcctagcaggtgctgccacaggcgtggtagttacacatctattcttgtatgccaggctttttttaaaatctaccttctgcagacaggccttcggatgttctaccaggtctttttctttttttaaagaagatattctttattacccaagtaacaggtcgcaaacgttgtgacagaataaaaagtgtggagttcctgggatggaaattaaattcaaaatttgcagtatctaatgtctcatcccagttaaatgtaggtggatacaagcttaaaggaccttaacttagctacaggctgttgtcctccaggaaacaggtcatggccactgtcaacagaagcagacatgggcactgtcccatgatcttcgaacacacccccttatgtgtaacacctgcactgagtgaaataccatatgatccattttagaaatgtggtctttaagcctccccaccatgggctgtacattcatggcccacacaatcaattggaaatcagtagatttacagtagctctgccttaccttgctttgtagcaaggcttgagacaccaggcaagcagtccccatggagagattttgactcaagtgagaaggcaggttttagtccccaaagaatgcccaccttcccttcctgtagaagaacaatgtgctttgaattatcaaattcaaagaaattgaaagaaattgataattcaaaggcattattagtcctgtctgcctcccaatggccagaacactagctcgaatcacatcagggagacacctggagcgcctcccagctcagaaaggggtcactcagctgctaagcacgtgacttggcccacttggatcaccaggagtgtcttctgaagctgtcccgtgtgctttcccatgcagcctgagggcccagccctctctgaggagcagctacagtgttaggcacgttccacttccccagccggatcttcctgcatacactgcttacttttcttgtttccgctcctccagttggagctgaacactttgtgaacacagtgtccgctgagtgtgcacttgggtttcccaggcgaggtgatggttagtgaggcttctaaatgctaacacctacagttatcgttctccatcctccttgacgttaaacagtgtcgtcacgttcacctgggtctaatccagacaggaatttggggaaacgttgaatacttactggttagtatcaagagccctctgactggccattaaatatcattgtaaattaattctaacttttgtgtttgcaatgcccagtgaaaaagacctagaggtaattcggaaattcaggcaccagtatgcacattaaagcttaacctggcacagcttttaacagtaccacctgtgataaaaaaaactctctgctgcccctccatttccgtgttggagaaatgttaattgggtatttttaacacattgttcacccttaagagaaatgtgtctcgggacatgggtttcatacataatggtcttttaaatgaagcatctgtccttcaaaggcagcgtttataaggcacataatggacacaccattcctgagagttaaaggctaagttagtgtccacccagcaggacagtcacacactctttactcacaagtagctcctgcaaccatctccaaagccagggtgtaagccaaagctcttgggcacatagtgcaggaaccctgggctgtctcagtcacaaaccaagaaacctccttggaaacgccctcaatggcagcaagatctgtacctggaacatgacttgtctactgtggacacaaaaatgaattcgaaggatctctgagttgtgaggaaagggaaaggcaggaagtctcaggcaactccgagcgcgggagccaggggttccctctggaggacaggtcacggctgtcctgtccctgaacttctcttttattcagtctttctccagtctctccctctcacgctcacactttctctgtctgtctctctcctgatttgcctgcttagggacagacaggtaatggagaagaaattgaaagggaaaatacagggaaaatgtaaatgaaaagaagttattataactgttataatgaagtgcctttcatttaaatataagaatgtaacgctgaaatgaacttgtgatcctgaaatgcatttttaatgagtttcctttttattttgctgcttcagtggcatattttaaagaccctttgaaaaaagccacattaaaaaccccaccaaatgccacaacacgcaaaattggatattggtttattccaaaactgctgatcaggaagagtgactcttcatcacaaaatgttgcagtcactttatttaaatgagtttgaatttgcattgtgatgtgccattctgatttagggaaaaaaaattagattttcagatcaaattgacccagccagtgaagcgttaagcagctggcaggtttagtctgaaagcctcatgttctatcaaacctgcagccggtggaagtcaccaagcccatgggaaacaactttctcgaggccgcgctcctgagcagctctctctcagtgcttaccatgctaccctcttcccttcttgcccaggtgaacggcctttccagtgcaaccagtgtggggcctcctttacccagaaaggcaacctcctgcggcacatcaagctgcactcgggtgagaagcccttcaaatgccatctttgcaactatgcctgccgccggagggacgccctcaccggccacctgaggacgcactccggtatgttcactgagcatggcagggatgccatgtagggaccccgatcatgtgttccatgttcccagccactgcccttccaatccacccagtccacagccctctggggtgttggcctcctatgtggtaatcccttattcctactgaaccagaggaaatggggggggggggtgcacacatggaaaccctgcctccttggtgtgttttagaagagctttccctcccaccatgtcaggtaagtgggtatttttctgaagtatactgctcatgcccttaaccttccatacacatccttttacacctattgctgtgtcactcatatcactggcttatgtggaatatattgactagcagtaataaacgtaattattttcgttgcagagagataggttggtcagaatataaccctgtcagcccagggcacactgccccagccagagagtaacttccaggctggaaaccagcagaggctttgatgggactaatcagtctagagttgtcagcaaactgcagacaggaaaatttccctgtaaggatggtccagatactctagagtctcagaagaccatttatataaatgctggacagttgtcagaatgttcccaacctgtcacacagactcatctttagttatcatacatcttctgcctcctgggtggcatcttatccagtagccctataagcctccaggtctgagatataggaaataaaaactatatgctatgtttgcttgcaatctagtatttgtaacatgcatatgtcgcttccattctgcactgtcgtgtggtgtcacgtgctacactggctttaggagctctaggttgaggggccttgcccctgccctcctagagtgccctgtcataacaagctgtcactctgtccttgctcagtgacagaagaaaggtcctcagctcatcttcccaaacaagatctcaagttatccatctcttcgccccatatttcctaagcccctcaacagcgtcctatgtgtgtgtggcatggtagagtcccgagggtcctgcaggagcagaaagaaaagacagtctgtcctgcctggaggatccatagagattcccacagcaggagggctacagggcggggccagctcaagctaagtttgctttagaggaactctaaaccaatgagagcagaggttattgcagcacacattttaacaggtggtatccagagctgggctttctggttagtggtcacctccaggtgggcagatgtagagaagaaaagaagctaaggctatgtgtcatctcccctgtactctacttccctacctgactggcagtaagcagtcaggagactcctaaaagtgtgcagcagaaagttgtgacttgggcgagtttcttggcactgccaagaaaggtggtgccctccgttgaggagctgtcctctcaggcagcatgtgggtcagaggacgtgtcaggagacagacacctccctgtcttaggtaggacactacctcagatctgggaggcgttttctacaaggaatgaggagagccaaaggcttcctgggatggaggtaactctgtctgtgtgtagctgctccacaaggtgaaggcactgcaaggcagggagtgacatacagacctgggtaggtggcaggtgacttaggagaaagtcacagagacacagtaggcaggtaccatgcactcagattggcagcaagcacgacttcccaagccaatggaaaattccaagacccacttttaggctgataccagtcacagcactatcaccctttaattactggtttacagtataaatctttcctgcatgcccatccttcaacttaagatagcaagataacatcttgtgaaatcagtgctgagttttgcgttttgcctacatgcttgatcattgcatttaaggcatggtggtatcctcctctcggtggggctaatgatttgaataattatttaaaacagacagagggctcctgacagttatttctgccacagagtcaccaatctctggtaaagatgtccaccagagacctggggcattggtgactcgattgtctgaaaatgtacttaacaaacacagctctgggagaaaagaaacactgtgtttccttcttcaaaacaattttaccagaatgacaggacttcagcctttgtctgcaaagtccagggtgttatattttcttaatgaatggccacgcccacattccattagaagctaggggcaaccatagctttccctagcatcctgtggtggtctgacgttctagactctactgtgatgatggaatttgtgctggtatcagggttggtactcttttgaaaactacaaactttgttagagtcagtttggttctcgtgttctagcattaaagtcaatcatatactaagaaaaatcaggtaccataccatttatatagggaggcaatttgattcacgaaatcactaaaattaaatttttttcgggaaagggcatgtattaatttctgtaaccatagaatataaatgtgcaaccatatgtaatattcgttccatatttcatcatttgtggtacatcactgtctctagacaaaaattctatataactggagagacggcccagcagttggagcactggctgctcttccagaggagccacatttgattctagcacccacgtggtgattcataacaatctgtaaagccagttccagggactccaactccctcttacagcctttgtgggcagacaccaggcaagcaagtggtacacagacatacaggcaggaaaaaaacccatacccgtgaaattaagtaaaataaaaatctgttctggagtctatagatgaagctttggtttccttgagagcatcttcatagcatctggtcacttaggaaagagacttaagtcacactgaattaccagttatcaagcattcctgtttggatggctttatatcatacttagcatgagaaatgcaatgtgatgttgaggtgaaactctatattccacataaagtaattggagaccatcttctctaaaaaagggtctttattgaagtctttaaaaaccgatattatatggaccctttcctattcttctaaaatacctctcaaaaaaaccaggaaggactaaactcttgtagaaccacattgccacacataaaagccactggccatacttaagttttagtaaattaaaattaaacaaaattaaaatgttagtcctaacattaatctagccaaacttagaaactccatgtaactggtagctaccatagtaaataatacagtgaatgccaagctgaacagatatgcaaagaacacttagagtgctcaagtcgttagcatgagttctaatggccaaggctgatctgggagtttcatcatctcatattctttggggatagaatagaggcttttcatatgctcttcctatgcaaaacacattgtatatcctccaggtatatgaaaatgaatttggcttatccatatcccttttcattttgtgtttatatattgtatattcttaatattcttaagtgggatagtatgtactatagtgtaaaatatatttgtattatatagaaagatacaatttagaaatactcatttctttaaagccttttcctgccatgatttcttagagacttgcgcaacctcattttgcctcctgaattttcaccttattcattagaggttgtcacagtaaggggtcagcctggggagaggcccaccctgacagtgaatctgtactctcctcatgtttctgtccacactggaacatggagatagtttactttttaccattaaaggagacccttgagtccgtgtcataggttaagatgaaattcatgaattcttggtacactcaatgagtcacctgggcattaacatttttaaaattcattaattttgactaagtccataatagtcatagctcagtagagagtacattatttttttatcttttttttttggttataaatgtattgattgcatccccattacccagaaggccaatatttaattggagtcttaaactcaattgtgttttctgcagttggtaagcctcacaaatgtggatattgtggccggagctataaacagcgaagctctttagaggagcataaagagcgatgccacaactacttggaaagcatgggccttccgggcatgtacccaggtaagcactgaggccctgctgagctgcacccctccccctcccagcgcctgggccaggatggggctctgtggcctgtttcagccacaggaggaactttttgtcttgtagcaatgcatctacactagggacaaaccgtgcttctctacttcccaagttctcagttgaccagtcatacataacctgtcttaagacctccttaacagcagtgacccttttaagagtctgtgttgtggggtattttgtcgttgttgtttgcgttgtttggtgtgttttttttccccagggggtggtgggtgggattcaaaccaagaattggctaaagctatagctaagtgatgaatgagcttgcctggtgtgcaagaggccctgagtttgatctccagcaccacaagtgagaaaataaaataaccaagttagagtagtgtcgttcgtgatttcttctttgtgtttaaatatccaaataaaatgtgagtcttttaaaaaaaacactaattactcatgaaggtcttcaaaaaaagaactgttaagctagaactaaacattgatttagactgagctttgagtatccacagttggagagagcagaacttgttaggagacctggttggcactggttctgagcctgaggaagagtgttgaatgtatattgagtactacattgtggtgagaatcagtttctaatttgtcctgcctggtgtctgttgattcagagcactgcagtgatggcttcatgctccagttctttctcaagaagtgagaaattactcttgcaagaagcagcaatctgacctcagcatgcccaaagaggcatttaattacattgggttcttcctgcctctgcctcagggcacattaagatacactagatgattatagttgcccccaagccagtgctagccagcttccatcactgtaatgggtgtctgagacaaccggtaataataggaaggaaattctgttttggaactttggaggtttcaaaccatggtcaattggctcaattgctttggccaggtcatgctgggagcacaggtacactgaaatctcctgccagagagaccctaataagccagggagaaagagagaaagaaaaggttagggacccatgctccttgttgagagcatgtcccaatgatttaaggacttcccccaagaccccagccctcaaggttcccagcatcttttccttggttcatcctagagccaaggcctcccacatgtgggcctgtgggggaccctgcagttgcaaactgtggttgcctaggtcatgtcttacttcactatttcacccctgaaacccctgccttatacatatacactgagtgctggcttagggaatatggcattgaggctccatcctgccaataaacatgtacattctcatttgtctcctgaccctgaccctccatctccctcaggtcacctcattactcccacggacctagttaggttgggtccattagttgaaaactgcctaactcaagagatgtaagctcaagagatgtaaaagtaaggtttgtttttctgaatatgattttctttagtaaaaaggttaaggatacctgttacatttcacctatatctgcataggataaggaactatctcctgagcctcacatgcaccaaggacagaggaaaaagtactgggctcagaggtgtggtatgatgtcacctgagagatggagcacctgagagaagggaagatatgtaaattagcttgataaatcacatgtatgaatgacttctagaattagattttatgactttctgtatttcctcctattaatcagagtgggctgaatgttgagctatttaacaagacaccctcataattcactgttaacagaatatgccagcagtagtatttgactagaaatgcaggttttaaagtgacgatataaaaaatgcataaggattgtgtgggcatgcagggtacagaatacccaagtggcagaaactaccaggtcatcctgggcaagggggagatgtagaagatgatggagtgaatgaaggctgagccattgtgaatatccatttattgtaaaaaaaaatctatcagaaaaaaatatatttaaatattgacaagactaggattatgtgaagatgtagctatgggtcaaggaactctttgaggagcatgaagataaactagatagaaccagataaacctatggtaaatcaatggcctgagaagggaaacacacaaggcaggaacagtatgggaagagctgtttaaaaagtagaagctgatcactttacactctaagctcctggggaatgaaggaattatatattttagaagtccctgccttgcaaactaggtgtcaggatagaagagactatgcaggagacaaacttgtatcttcttcacttatgggcagggagagttggtatagaaaagcagatggaatgagctaacctgtatgtctgtgtttaccttaatggctgctcggcttcctaccctgtgtgattgctgtgtggtcattagacatgtgctgtgtggttggggactgctccctatagagttgtgactttagaccctttgttcatttctggaccagatgatatttggttctcattgttgttgttaaatttggttaaggcaatcttgacaaagaccctccaaagtaacacagttaattcactgtggtccaaccttgtgtggtagacagcagcttgttattttggtcttagggataatgtgggttgaacaggtggaggatggggtcctagcaggtggctagtcattggcattgctgtagctggttctgccaggggctgcaggatgagaaatcggctcttattggcacttgacaaatgtgcagttaacactgaatacagcaagatcttgaagtgcaagcatttctaaactagcctctctaactgtctttgactttagtcattaaggaagaaactaaccacaacgagatggcagaagacctgtgcaagataggagcagagaggtcccttgtcctggacaggctggcaagcaatgtcgccaaacgtaagagctctatgcctcagaaatttcttggtaagagttaaatgtttgctgtctcttaacctagaattatgtgggtgttctagacaaaaattatttgaaagtagaagaaaacaaaaaaaaaatctcccttttggaaaaaaaaaaagcttattatttcttaaatactgtaaattttttctaataatattattcaaactgatagaccttttaccaggaattagatagggtgtcatagcatttggagcctttggtatgatgtttctgtggccgctctgacatggttacatcaactctttctcccctccaaggacagtgagggctaataagaaccaaacagagatgagccccctcagaagacagcggaagggtacagctagacttgctgttctgatcactgaatccttacctgtccttgatactatgcggaataatgcagagggaatgagttgttcatgaggcactgttgcctgccagctaaggcggacactgtaaggacaaggaagtagctgagacagatgcctgaatggcatcactagcctcaaaggcaagctttaggtcagaacagagatgctcgtaaactctatgggggcaacatgggggaaatgacccaaccttcccaagcctgggttccattctttatgtgtctcataaggcaaccggaagcataaaatgcccccacagatataaaaaaaatttagaagccctcagtaggaagatcagctactatcattgtcaagaaaagaaaccttatgtccaagaaaaaaaaaataaggtgtttgagaagctgaggtggactttgagaaaggggcaggacctcagcagcatgccatacagtgaaggggtcatggagtctaggcagacaaggaaaattactttgctggtgttgggatctagagcaggactagtgggtatttcccagctttgcgcaagtactcactggaaagcagtgagtaaagctgtcccatgatgctctgactataacagtactggtcattgagggccaaactgggcagcatcatctcatttggaatcacagagaaagcaggggtatgctcccaatgggagcagaagctgagcacataaagatgacatgggtcaaaattatctggacatgggagatggcaggagaatggggagtaattgaaagaatgctttggtgtagaaggaatggaggtcacggtagggctggtgaaggaaactgtgacttcccttgcttagtgtgccatttgcagaaaagacaaagccacgtctggaaaataagagttcagggtttgatgtaattgcttttaagaatgctaccctggtaaggctaccccatggaagctgtgctacaaaggatgtgcaaataaaacgttggtgacacacacacacctttacagagcacctacactgaggcagaaagacagaggtcaggttctaggagttgataagaaggaggggaagaaagaccactagaaaacaaaacagaaaccacttattagaaatattgttcatagacttgtctctctgtgtatgagcttttgaaccaaaagaatgaaggagacttcatatcctgatcaaagaaagaggcaatcttggtcaaggagccagctcttggatggctggggctttagaaagtatgaggtgcagggccctatcttctccctgaggagtgcacagaagacagggaccatgatgaactatctgggagactggcagagatgaagcagcaaatgtgttcaagggttgtgaagagtaactgacctcaggaggcagggtgtgacttcctctttccaattaggaacctgaagagtgccacatgccttagtaatgagcatcggcagtgccctgaagcttcaggagacttccagccaaacagagcatctgaaactttgtcatggctctcctgggtgaatgggcattgtcttgattcacacgctctatgtgaaagggatctacaaaactagtgaagcaatgctgagaggggaaagcgatctccaggggagaggttaaacacaagaggaagtggccttgtgggaacaggaggaccaggatagcagaagtgaagtgtgcaaggaagggctcccagcagctgtgctctgttggtgtcccccagaggtggttggcagttcacacactaaccagtgcctcttcctgctctcgtgtctgccttcctctcagtgctacatgacgacattcctgtccacccttcctactgtgtcacagttttctccctaaaatgaagagaattggacctcaaaggctgctccccacatttaggatgatatcgttttgtgtacttgagatgatagataaatagatagtaagagttttgatagaactatttcatgttttttcagaaaaccaaatgcaacatccagaaattaccagtattaaattagaagaacatcattgtaaatatcttcctgccatatatatttcagtggacaggattaataataggtggactacaaatagagatgtggaggaaaggcctttaagttcctgaatgcgccacctcagaaagattgcagctgctcttccctgggctggaggtgttgcctggcttcccctcttcccgtgtattgattgaaaatcagttcacagtggccacagcatattcaacatgtcctaggagataaaggctcctcaatgcacagtcattcccaacaggacttgacttttttaaaaggatgactatcagggaaaaaaaattattctaaaaattactttaaaaacaatcatttttattgcttttatttttacattgtacatttctattcatattctatgcagaaatcattattcttatataatttagatattcatcactatatattttaacaggttacagaatcagaccctggtctcttaggctcattttcgtttattttgatcaatcccttcattgaatacactttacattcaagcacccttgtagacattccatctccatctctgctttgagtttgaggatgtcacctgtcacctctctacagtaaccccaggagtacgtagcctctggccactcttccttctctgacattggcagatttttctttgttgaattatgtgggtgccaagtacaacctgactttcttttctttgatattacttttctcccaaaatatgtagtgttctttccttgggcctaagtcaaccatcatcagtaagaagctctttggtgttttacagtctacatgaaatgtagcctttaagagtgagaggctcctttcttcctccttgtcttttggaaacattcctttacataagtaccaattgttctatctaacatgacttctattcaagagtgctggttttccatagactggataaattgtctcccatgtctgttagcattttgctattttaatttctttatttttttaagtttacttactgttattttatatttttcctgatttaattgagttcctagcaatgtttattctagtgtttgctatttttaactcatgtattgagtatgtattgaattggatttggttttaattcctgagatctaaaatctccctttattctgggttgttttttttttttttttttttttttttttttttttttttttagtattgtctttgaatagcttcaaaatctgactgcttgcatattctaaaaactaaaatagctaaaacttgaaaaaaaaattttaccccatgtcatgaagtaattatgcttcattgctcctcttcctggaattaagtttctttttcccctaggatggactttctggtttgtcttacttcccttcttgccaaaaaaatattttccctgtaaccatggcatttcttttcatcctgctcattctacttggtctaatgaggcttgactgacatttcaacattcttcccattgtacctgagacttttcctatgagaactataagttttttaaatcctgaaagaatgccaaggatggtgttgggggagttcaggtgaggccaagtacatacggcttctgtttaaagtgttcccctttgagagctctctcagagttttcagatttggtgaaagctctaaaccagcagatgatgccttctgtctccacaagggacatctcagggcctacttcccctgaagtacaactcaccaaggcctttgcttgtgtgcaggggagccagcccacatgctaaggtctctggtgtcatgtgctgcctgaaagtggaattttcagctccatcatcaaaatgaggagggcatttgcccattggaactctgtcagtgtgagggtttggaaggaatgctgagagtgttgtgtttctagaagtgacattacccaaagctttgtccagtctcaggcaagaatcttctgtacctttccttggtcatatgtagttgaatgtaaagtagaaataagaagatggatggatggatggatggatggaatagatagagatagatagatagatagatagatagatagatagatagatagataggatggatagatagaagatagataggagggagacagggaaagaaagggatggatgagtagatgggatggatagatagatagatagatagatagatagatagatagatagatagacagacagacagacagacagacagacagacagacagacagatagaataatagatttcactggggcactggaggcttttatagcttttaatttttcacatttgggtagagaaattctacaggtagatttgtcacgccatgctcatctggaatgtatattgctttctttgcaacacccacttcttgaagcagcaggcttcagtggttgcttagaaaaccacagaaccacagctctggggagaaacaggaaagtaccacctctggtgagagaacacagacttttacagctaacagaactgggcaccaggccacaccctcctcctccattgctagggtttggtagtaaatgagatgcaagtacaagaatgagttcctcatgtccacataatgagatgggttctcaccaaaaccacaaaaacaaacaaacaaacaaacaaacaaataaacaaaactcccccttgagtggagagaggaatcccttcatggtttctaccatccactacacgtggcttttgctctgtccagtttctgagagtgtgtagctggacattaacacgttttcttcctgtagcctgaggatcattgtatgtcgttaccagagtatgcgttggttctggcatgagtagatgaaagcaaatgaaatcaagccattgtgtggtgcacacccaggaagatgaagaaaatgcaatcaggaggatactgaatcaggaggaatatattccagggctactatagtcactgattattttttcaaggactatggttagatttatgaattgtggaatacttttcctactgtagataaagagtttgggggaagtgctgacctcagtgctggcatgaaagacactgggatcatcttctaccaccactccatcagctgccttcaggtaccacctgattgagcagcctgtcaccctggtagctcagtctgttgccccactgtggctgggtagttcactttcttcagacccttcaccagtgcccctttttatttgaataaagtcagtctagtctaaggttccagtgtatgatcccagctgtacttggacattccctatgcccccaagagctctgtcccctggacctttagattgtcaccaaagccccaggctctctgtcccctcgggatcttcactgcttctgtttccaacagtaagatacaaaaagccccagctggctcttatgagatgagaaacctatgcaacactctggtagcaagccttcctgagctcgtgggatttcatagatagggatggagtctgctgtcatcatttagtgtgtatctctcctgctagctgtgtatatccaaggatacatatccattctcactggctttccttttagtcccactgttgagccagacatattgaagagaggaaaaaggcattgtgggaggtgaggtataaaagtgcatctgattcggcagactgccaagtgccttcttctcgctgagagggcactcagtgactacctctgccaacaggaatataaactatccatttactgaatgaatatcttctctgggtcatgatttcacatcaatgtatttggaaaataaatgtttaaggaaattcattttgtttcattataaaacattttactccaaaattgtatctgaagccaaatctggtctcatcttcttccattgccagggaagatttgtgttagccagattttccattatgatagggaaatatctgagatgtccaatttgtaaaaaagaagaggtttgacttaagccttggggtatccttcttcatgactgattagccctattgtgctgactccgtggcaggaatgttgtcttgtggctgtgaagcaaaagggaaatatatgggggtcagagttccaggaccccctttaagaataaagtcccccaagtctaaaatcttctcattaggcccttcttccctaaagagttgagaaccttccaacaacagcatgtccctgggtagacactaagcttctgggacattgggttcagccacaatcatagcacaggttggacaatacctgaaaacatgggcctttggggacatcgaaggtccagacagtagcagagttcatgtagtcctacaagctaaccatacgagaccataagtttcttgagtcccaggtctggccactactgaattcttagttctgctcatctttagtattagctgtgtttgtaaacagtaagtgaatggtgcccacctccaagcctactcaagtagatcatctctgtttcctgcttcctgtttctgctgagctaattcactactgctgactaggaagacagggtacatacaattatgtttaagtattccttcaacttcaccatgcattggaacccatccacttttgaaatatttataagaaatatatagtttattataaataatatataatcatgttttgagaacatttttagattattaaaatgataaatgtaatatagtatcttaaatttattaaatatcattaattcatggctgtgtatttttattaaataattttgggataaattaaacagtatacatttagaatactcttttaaaatatttaaattaaatataattgtatgaactttatcatacttaatgaaagatgggatttacccctgtgaaatatgccctctttaatctgacatggataatctttagtttctttttcattaatgggtaaataggacttcctgaagaacctaccatagtaagtccctgggaaagatggcaccttatccctcctgagccctggcagatgtgtcctgtctgctgtgacactagaacaccattcaacccctgggtgtagatttcacttatgaccatctacttcccgcaggagacaagtgcctgtcagacatgccctatgacagtgccaactatgagaaggaggatatgatgacatcccacgtgatggaccaggccatcaacaatgccatcaactacctgggggctgagtccctgcgcccattggtgcagacaccccccggtagctccgaggtggtgccagtcatcagctccatgtaccagctgcacaagcccccctcagatggccccccacggtccaaccattcagcacaggacgccgtggataacttgctgctgctgtccaaggccaagtctgtgtcatcggagcgagaggcctccccgagcaacagctgccaagactccacagatacagagagcaacgcggaggaacagcgcagcggccttatctacctaaccaaccacatcaacccgcatgcacgcaatgggctggctctcaaggaggagcagcgcgcctacgaggtgctgagggcggcctcagagaactcgcaggatgccttccgtgtggtcagcacgagtggcgagcagctgaaggtgtacaagtgcgaacactgccgcgtgctcttcctggatcacgtcatgtataccattcacatgggctgccatggctttcgggatccctttgagtgtaacatgtgtggttatcacagccaggacaggtacgagttctcatcccatatcacgcggggggagcatcgttaccacctgagctaaacccagccaggccccactgaagcacaaagatagctggttatgcctccttcccggcagctggacccacagcggacaatgttgggagtggatttgcaggcagcatttgttcttttatgttggttgtttggcgtttgatttgcgttggaagataagtttttaatgttagtgacaggattgcattgcatcaggaacattcacaacatccatccttctagccagttttgttcactggtagctgaggtttcccggatatgtggcttcctaacactctccccacccaccccaccccccaaaacagagcctgaatcttcatgaagtgaataaaacaattatccaagaaggagtaaggtggatcttgccctaagcagagtttatgccacaaagattctccaaatcccccaagacagcacagccactggggttgagccatctcagggagctctgcaggtgagccagaggaccagatataaggcagctggggaggagcagggacatcagcctgtgcagagaccaaggccaaaggttgaactttgaaagactattaagtcatatattgtatggcaatatggtgtctggacaagttgtgcaatgtgctgaagggaagggattggagagccttgaagactcttcttcatttgcctgatcaacccggcctccagagggttttttgcccagtaagacgagctcagtgctcttgtgatcatttttctcttatcgtttccatgccgttgatggccctgaagctcatcactgcattttagaacccaatcctgaaattgagacctttttttaaacttctgatactgtaaaacttcttggaagccaaagctttcttccaagccccatcctcagttatcctggttcctgttcttccccgagctgatagtaccaggacctgttattccacaaaagcacaggcatccgtcacttcaattcaatccctgttcagattatagatatggactttgctatcttgataaatgtcttctctatgttattttgtctgaaaaacctataaaaccattattaagaatgaccatttttagatggaagaaatgagcccagcatctcagtggctaaaacacaaaatatccatgcttttaaacaaaattgttaaatattccgaagctctctagtataaacaccaagtagcatgtgttttcacataaagaagacaggggccatgcaacctttatcaagtggaggtattagaatgttgtaatgtttggagacacagtgtgaccagtacaggttcccagagaggaatgcccaccatatcacagaaaggtagaggtgggatctggtatagccagaccaagacagggatgtcacgctgaagccaagtcagttagctgaagattctcaacaggaaggcctctcttaagagtcagtaatagggttgttaccatccaccacctcaacaaaacaaaaagcttataattgtaaatgtttacagcactgtcttcgcagaaactttctgaggtgattccaaagaactagaggggagatggtctataacagctcttgaagtaaacgaggttcttagtctcagctctcctgacatatagggcttgattattactggtagggattgttctgtgaattgcttactactacccctggtctctccccagtagatgccaggaacattctagctgatacctaactgtcttcccaggtgttcgagggagcaaaccactgatctaaactctaaacgctgaagtacgcaggttttctaaaaatgacaagcccttgaaacctttcccagtaggcagcctcgagctggacttgtgtctttggaatgctgatgaattctatagatcagcattgcaaatacacttcaaatacgtctgagttcaagtgcagggactgagttcaccaaggtgtgaactgtgctcaaaaagttcaaaagtgtgtgtttctttgtttctaaaacattgtggcatctttttcatttgtttctaaaactttttttttagaaacaaatgaagcacttggaaagtgaaagtaaaattacaaatataaggatttacactgaagagagaaaaattttaggaactatagctgtgaaaagattttgttcaaaaggcaggctagccttacccaaattcatatatggcaggtgtcaacctcccaagcttacagttagcaggcagcttttgctcactcatccttagccatgagagccattaagtgtggtccaagaaagatggctccaaaccctacccccgacccaccagtggtattcagagattaaagcagaattgtaaatagtggcttcaggagctcttttttagaatgctttgccccttcctctcactgccttttttagccaatataaatgtcaatttgcacaccttttgttgtggttttatattgtaacagcatttttttgaaactattgtatttaagataaggtttcatattatgtccacaagtaattaaattatgtttgaaggtggctatatgctgtatcagaagttgatgatgtttttctttagccggtaaaggagggttttgcatgacctcactgtttgttctgtggtttgttctgttgtatgatgtgtgtcttgagttttgctgtgtgatgaagtgcgctgagattccagtgccctcaagttgtgttttaagtagctatcagaggcaagagggttcctaagagcaggttgacctgttggcgacagatggcaatcaccatttctcattccttcttctccctgttaccccagcttcctgtcccaggtcccttctgtgattcttaccttagtgtgcatgtgtgtctgtcctggtgagagtcaggagcatcgatatgttatcattgcattatcaccaagggcacgcacagcctagcacctgttgcttcagataccgtcacactctgtttccaatttagatacaaccacataataaaatgttagagtcttcaatgggaagcagaggtgcttgttataaagatgggggcttatgcttgtgtcacattttgtgttcttttcttcttttgtttggttttaacttaattgtgacccttgtaacatcatcttgccaaaaaaaaaaaaaaaagttgaactggatttatgtagacatgtcaagacgtactatctatttctttgtcagttatagcaataagagtggataaactctaaaatccagatctcccacaatgaacatccgtgttctttctatgatttttctttctttatggtgagccacaattaaacttgagatgtacagccacccaaacccaggaagctcatgtgcatctggtgctatggcactcactgtgaataagtgtgaccagatattaatatgcaatattgtttccaatcctttctaatacattttttcatgatgttgtgtgtggttaaatcttcctgtatcactaccacttcagatcttcacctccttgctgacaggtaaatggaagtgtgagtaagaaaatgaagccatctctgcagccctgactctagcatgatattaactcatttctgtttagctgggaacaagaggtttccactgggagcatagaggagctatccttttgtacacattttgccttagatcactacagacgatcattacagagcaaataaattctacaaatattctgtctgccccatccagtgaagtccaaacacaagcataaaacaagccccagtcattgtgggagtctgctgtagcctctctgaaaccaggaggtgagggaggagcccaggccttgacacaagaagtgtgagcagatacacagaaagaggcacagccagttagctcagctggccagctagggagtcactgctaagcctctggacctcagccacgtggtgaagtggtggcagaagaggagagcattcaagacagaatgacaaacagaatgacagctttcgtgtcctgccttttattcctttccattttaaataagcacaagatctcaggatgattttctgacaccgtggagcaaggctttctcattcatttatctgcttcactctggaagagattgccagagaaaatgatgctaacttcacttctaaggagtatgtcgatgtaaacactgggctctgttttccatgtgagcctggaatgcgcactgagggataggagggaggcccaaggtccctgaccccatttccagtgtttctcagtcatattttgatcagcagaattcagatttctacaagcagaaaatgatgtggaagttctgtgactccttagttaaacttccttgccttccttctttgaacccattccaattctcaagaaacaaagctttgggcactagggatatggctcagccggtagagtgctcatcaatgcccagtgccctggggttagatccccacacactgggtgtggtggcagtacttgtaatccccgtattctgaggaagaggcgggagttgaaggtctttagctccacagggagctcaagggaagccttggattcctgacaccctgtttcataaaaagaaagaaacaaaacgttggctgtttctgaaagttgccttttgtcatggcttcaactaagacacagagctaggagcaaaagagatagaaaattgagcaattagtgaaaggctcagaggaagttctcagatgaccaaagtgggaactccgtgttcctccatcattctggaaacttctggctctttctctgcaccagtacccaaagcagcaaccaactggcacagcccccatatgtagaggtgaggtcaaatgttgctattgccacacagcatccacctcttgtgtcttttcccaggctactctctccacccgtcacatatacaacctcttgggaaacccaaagggattcccatggcccctagaattacactgcttttagcagccccaaaccctttggcttttctattccactattaacctccaccctgagcaaacccactctaggattagcacacaagaagcccagcctccagttcatcaactacaaccctgctgggtatcagttgctctagaactggtatcttagaagcctctcaaactctaccctatcttacccctattgttcagttgcagcttccagaggtcacttactgaatattctggagtggaaagtattcatgggacaacccgcggccccagccctgaggtgtgtgcgtggccagccctccagtacctgaagcaaatcatcagtcagttcactgaggaccagttagatccgggactctcctgagcctgggctcacagttgtctgcatagaggaacagtgtcttcccacaaatggtctgaaacagcttagatgtagacaaaggaatcaggtgagaagctgagatgttcattttgctactctcaaaaggccagcttccacgtgtaaccacccagcaaaaagcaaccacattgaaagatgcacatagtctaaccctcagtacctcagcatttcccccagtgggcagctttgacatccaacctggcttgtgtacactacaaagacagaaggccacatgccaaccatcgtgggtttccctagctactccatcatagatgatgtgattttctgtgactgtccttgcaggcctcctgcctcctgagtcccgctactgtggtccaaccattctgggctttcaaaagtgatttgtggaaatggggacctgatcccacattactgtccctacgcacaggtcatcagtggttgcactgaagtttcagagcagagcagagtttcctcagctgggaacatggacgttgaggttgcattgccttaagcaggtgtccccctgggtgtgctcccaaaagtatggtctggtgcttaagaacagaattctggagaccaccaagtctgtgtttgaatgtctgcattgcagactaaaggaatgcaatggtgggcaggtgacctaccctttccaagacctctttcctcatcattgacagctggagagctggaggctaaagctagtaacatctggcaaaacgtgagcactgggcctgggtcattcaaatattctgttctttctgacttttttatatactatcctctgcctcctatcttatctctgtgacaaccggacaagccagcagttcattcgtattccaaccttggagaccaggtagctgtagtggggaagcagcaagcctctcctcccttgtagcaccagccacactgaaaagtccccagcctttgcaatttccctgggagttgcagggtcatgccccattggacacatgaaagacagcacctgggaggccaagcgtcacaaaaaagatggtgctgtgcagaggtagctatagctgcaggccctggcccaggccccttctccacttggctcccgctccattctggaatgttccttgcaaagaaaagtgaatataatatgatcctcttgagatacagtgtctctctcagaaagggaggaaaatacctacacctataaacttgccttcaaagcagccctcagctgatcatcaccatactggtccacaggttgcatgtcatatcagtttctcacaaagagtcactatccccaagacttgccccagagcaacaaggcaagtggcacagggccagaatccagagccaaataggaaaaaatagtgacatgggtagagccaggcacagggagccagatcttgtttaaatatgacaactgtggacatctctagagcccagtgcatggtagttggacgtgggcagcattgtccacccaagatgtaatggaagctgtgagctgtactgcagctgctctggagggtagaaaacactgctctgggagaggggagaggaacaggaagagctggcaaaggaaatgaaaatgtttgtacatgaaggaaggaaagccagttgagcaggcatccccaattttcatcttcaaaataagagaccaattacaaatccaaaaaaaaagaaaggccaaatgaggacagccactgaggtggcctctgagcccaatatatagtttgctccaaatgaccctgaaggtcaatcatgagtaggaagaggtcatacagcagaggtaggctctgaccccaggcctagctaacaagagaagacttcaaaaacacagtgccaaagttcagctgctctcagtttcttggccagattttacaaaacaaggaagaagaccctcactggtatgtctcttggctctttccacgttttgacaaggctaagagcaggagcaaagtggacatcctttgacctctgactcctccgatgactacagacgcagcatgtctagggagagggctacttattgcaggatgccctaagctccagcccaaagaacagtctggtggctccttgtacagcaatgagcccctgacccgtactccatttacagtaagcacttgacctgcggcagagcagctgagccctggagactcagtgaatcggcaccaagggaagcagatgtgctcgccatggtcctcaggcacaaccaggaaccagccactaggggaggaaatttgcataatagggataatttggtaccaaaactgtcccctgaagtgaactacatggatctcggtatagttcaacaaatttcacttcttctttcccatgttttctcacaccaactagatatgaggtagcatgtgcaactcgtccaaaggttcgggggtgttgtttgatttttattattgtctcccttcataagtcagtcccatgccttttctctcttcaacccaccactcccttgtgcccaaagtgagtttctgagctccctcagagacctctcccaagcacatgcaatgtgggggacacccaaatgctcttaccctgcaacacaagcagattcacaaacagcagtggtggtcatctgcctctctactgatatacttgaccaatgctgcctcactctgccgcttcctagagcctgcatgagcttcctcattgacattatccctgtggctttctgtgggcagagggtggaccagtcccagggtacaaagggtgtgtggtttcagggctccccagtttcattcccctttcaggcctcctcctttcgtggtaccaccctgattcccacccacagaggcacagcccttctctaacccttcgagggactccctattgcccccataaattcccacttctgcaagcatcaggagctatttttaccattagttttataacacctcacaggaaggctgttgtgcatttatatctactgatactgttaccaaattttaggtgacaaatactctaaaataaaccaaaggaaagaatagcctgagaaaaaatccctaagacaccagcaagatggccagattgctgttaaaacacacacacacacacacacacacacacacacacacacacacacacacacacacacacacaccctaagtagccagtgtgttttatatcaaaatttgggagaaaagaattataaacctacactctctacagataacagggacagaacaatgtgaggtaggcatagcctgcgacaggaggttaggcctagggcaggcttcctcttcttcctggttggctggtcccacacgcagagtatgaaatggccttgatggctgatcagcacacacagatgcttagattctaaactgaagcctttcgtttgttgcagctgctgacttgagttgtggattcaaatgagttaaaataggcttcttgtctttcctcactccattttttaaacatttaatttaattcagtatatctcaaaatacaaaagtaaagaggagactttcttatgagttcaacctcacggcctcggggaccataaagtgcaggaatctatgggtaaaaagcattctccccatcgtgacagccctgttcccaacccatctgttcagacatcttccaaatcacatctaattcccacaccatcctactccaagaaccctgcttaccctcaaagtcttcccacactgcactggctgctaaaacagaattctcggcactcggtgtttggtgcttcttcgagaccagatctgttcctagagtaactttgcacttgatcattcctggtcctggctgttaagtggtagtctgtccacatcagactaaaagcttagagggttccaggctccccagagccccccataataatggtatcctgtgagatcagtcctccctgtatcctgggctccctggctctcagacgggtcctgtccaaggtgatgatctggaccctagcccttctttgaggagctccttcccatctttgcactgcttcagctttccccttgggagtggaaaatgcagcagctctcaccttggaatctccaggaggggccactccttgccccagtattcaggacaaagtatcctggcacaggcagtggccttggtgtgaaaaaagcaaagagaggggtcatgaggcagagaaggtgagtgcagccccttgaaaacagggaaactagccattttagccgcaagtacagggcagagggtgtcattcacagattgggacttttctaacttaagtaattgttatttctatcagaatatactggtataagccagtcctataagcatggtcaagttccatcccactgactctaatcaggccagaagttgacctgtcaggtcccaaggccagtaattgaaatatgacaggacaacagttcactgttaaggggacaccaaagttttgccaataactacaaggttgttagatgttcagagtcaagcactgaacagacaggacctagaaaccagtcaggatccacagaccaggggcatctcaaccaactcttgaaaaacagacagcagaaagaatgaatagtggagacatggaagagaattaaaaccagagatgccaagtagaggaggaaacaaaaagaaacaaagaagcagggcgataaatttatttaaaaacagtgacatacgtagtaggtgctaatcaatctttatcagcaatcatgctaagtgccagtgaacaacacacaccaattaaaaggcagacactggcagaatggaccccagctaagacttgtctacaggctgtaggctgctaggtgagaaaggttacttatgatcttacccagctgtgggccctgtgtagtacaaaaccaacctaccgggcaagatgtgcccgctatcataacataatagttatgataataaccaaccactttctgattggattttaagcctgctacactagagggaaatcatacgtagtcaaaagcccatgatgagggccttcacaggccctggtgagagcaagggaagaacttagcttttacttaaggatgtgtttatatccacagactaggtttatagctataaagcaacac

SEQ ID NO: 146 - DNA, 1550 bp, Mus musculus
ccttggggaggcacaagtctgttgataacctgaagacaatggatgtcgatgagggtcaagacatgtcccaagtttcaggaaaggagagccccccagtcagtgacactccagatgaaggggatgagcccatgcctgtccctgaggacctgtccactacctctggagcacagcagaactccaagagtgatcgaggcatgggtgaacggcctttccagtgcaaccagtgtggggcctcctttacccagaaaggcaacctcctgcggcacatcaagctgcactcgggtgagaagcccttcaaatgccatctttgcaactatgcctgccgccggagggacgccctcaccggccacctgaggacgcactccgttggtaagcctcacaaatgtggatattgtggccggagctataaacagcgaagctctttagaggagcataaagagcgatgccacaactacttggaaagcatgggccttccgggcgtgtgcccagtcattaaggaagaaactaaccacaacgagatggcagaagacctgtgcaagataggagcagagaggtcccttgtcctggacaggctggcaagcaatgtcgccaaacgtaagagctctatgcctcagaaatttcttggagacaagtgcctgtcagacatgccctatgacagtgccaactatgagaaggaggatatgatgacatcccacgtgatggaccaggccatcaacaatgccatcaactacctgggggctgagtccctgcgcccattggtgcagacaccccccggtagctccgaggtggtgccagtcatcagctccatgtaccagctgcacaagcccccctcagatggccccccacggtccaaccattcagcacaggacgccgtggataacttgctgctgctgtccaaggccaagtctgtgtcatcggagcgagaggcctccccgagcaacagctgccaagactccacagatacagagagcaacgcggaggaacagcgcagcggccttatctacctaaccaaccacatcaacccgcatgcacgcaatgggctggctctcaaggaggagcagcgcgcctacgaggtgctgagggcggcctcagagaactcgcaggatgccttccgtgtggtcagcacgagtggcgagcagctgaaggtgtacaagtgcgaacactgccgcgtgctcttcctggatcacgtcatgtataccattcacatgggctgccatggctgccatggctttcgggatccctttgagtgtaacatgtgtggttatcacagccaggacaggtacgagttctcatcccatatcacgcggggggagcatcgttaccacctgagctaaacccagccaggccccactgaagcacaaagatagctggttatgcctccttcccggcagctggacccacagcggacaatgtgggagtggatttgcaggcagcatttgttcttttatgttggttgtttggcgtttgatttgcgttggaagataagtttttaatgttagtgacaggattgcattgcatcaggaacattcacaacatccatccttctagcc

SEQ ID NO: 147 - DNA, 1296 bp, Mus musculus
atggatgtcgatgagggtcaagacatgtcccaagtttcaggaaaggagagccccccagtcagtgacactccagatgaaggggatgagcccatgcctgtccctgaggacctgtccactacctctggagcacagcagaactccaagagtgatcgaggcatgggtgaacggcctttccagtgcaaccagtgtggggcctcctttacccagaaaggcaacctcctgcggcacatcaagctgcactcgggtgagaagcccttcaaatgccatctttgcaactatgcctgccgccggagggacgccctcaccggccacctgaggacgcactccgttggtaagcctcacaaatgtggatattgtggccggagctataaacagcgaagctctttagaggagcataaagagcgatgccacaactacttggaaagcatgggccttccgggcgtgtgcccagtcattaaggaagaaactaaccacaacgagatggcagaagacctgtgcaagataggagcagagaggtcccttgtcctggacaggctggcaagcaatgtcgccaaacgtaagagctctatgcctcagaaatttcttggagacaagtgcctgtcagacatgccctatgacagtgccaactatgagaaggaggatatgatgacatcccacgtgatggaccaggccatcaacaatgccatcaactacctgggggctgagtccctgcgcccattggtgcagacaccccccggtagctccgaggtggtgccagtcatcagctccatgtaccagctgcacaagcccccctcagatggccccccacggtccaaccattcagcacaggacgccgtggataacttgctgctgctgtccaaggccaagtctgtgtcatcggagcgagaggcctccccgagcaacagctgccaagactccacagatacagagagcaacgcggaggaacagcgcagcggccttatctacctaaccaaccacatcaacccgcatgcacgcaatgggctggctctcaaggaggagcagcgcgcctacgaggtgctgagggcggcctcagagaactcgcaggatgccttccgtgtggtcagcacgagtggcgagcagctgaaggtgtacaagtgcgaacactgccgcgtgctcttcctggatcacgtcatgtataccattcacatgggctgccatggctgccatggctttcgggatccctttgagtgtaacatgtgtggttatcacagccaggacaggtacgagttctcatcccatatcacgcggggggagcatcgttaccacctgagctaa

SEQ ID NO: 148 - DNA, 96594 bp, Homo sapiens
  misc_feature (4844)..(4863): "n" at positions 4844 to 4863 can be any base
  misc_feature (8214)..(9596): "n" at positions 8214 to 9596 can be any base
  misc_feature (29909)..(29928): "n" at positions 29909 to 29928 can be any base
  misc_feature (34733)..(34834): "n" at positions 34733 to 34834 can be any base
  misc_feature (38964)..(40859): "n" at positions 38964 to 40859 can be any base
  misc_feature (45671)..(47707): "n" at positions 45671 to 47707 can be any base
  misc_feature (54803)..(54822): "n" at positions 54803 to 54822 can be any base
  misc_feature (59603)..(59640): "n" at positions 59603 to 59640 can be any base
  misc_feature (67744)..(67831): "n" at positions 67744 to 67831 can be any base
  misc_feature (77916)..(78082): "n" at positions 77916 to 78082 can be any base
aaagtagcatacaggttctgaccttcaaaggatcaataaacaaatgcatctcctgctctacactttagccattggagccaaatcccatggttctaccctcagtttagtccctcggcttaatcatcttttgattggccatggaatgtgtacctaactatagtcaacagtcttacaaacatatatacatcctgtatatctatttgtacaaagaattggatcttcatcctgcatattctcttttcaaaattagcctttgtttaccatctataaatcaagacaacattattccttctcccaaaatgcagggttattcaatacaacttgttggaaacaaaccggcttggctgaaaatgtttatgagctataatcatagaaaataaagggatattataatgagaagtcaatctttcagtttaattgcagaacactttttaagctacagaaaattgtgaatttgagctctgaagtggaaataaagttgccagtttcagactgcatatcacagaaaatgaattctttttcttcattagaaaaacatatctgcaagtaataagatattatgagtaaatattacaagaatacattgtactgggctgtgtgtagctacagaatgcattatatctttaaattatttctaaatcacaaatttagagaaagtcctgctcctggcattactaaattataatctgtcttcttatcctacagaaataaagaggtatcaactcacttaggataattgcctgatacaaccagaacaggattagggaaaattcattatggtattgcagtgttgtattttaaaagtattctctgcttcctttttgaaaaatggcttaaaaatgagcagaataatgcacatacaaggaaagtgtgaaataaattgtcaacttttagttgaaggaaggaaatttggaatattctgtgttgaagcctttactgctaagacagcattaaataggtgaagaagcaacacttctagtgcatgatcgcagagccccagacaggacagaagcatagggagggatgggggtctttcagctgtcaggagaggaaaacacagtccctctgcatattggaaaacaaatgtgccaactccttgacatgttacttaaacaaaaatatttttcctgtaagtaagataaacccttcaaaagtagcaccatgaaatggaactatctgctgaatatctgctcactgttctaggaactgtgaggaaacaaaatagaaaaaaaaccaaatctctcctttcaatgagagcaaacaacaaatgttaccaatgaaaaccagagagaaggcaggagaaaagctaacgctcgggtgggtcaaggtcgttccctttcatggagaacagacaatgacaactcaaccacaatgataatggaccaaacacctgaagccagtaaggggggtgggcaggcagaaatccaggggagaaccttctaggagacagcagtaagtgaaaggcagtgagctggtctggagcacttgaggactataaggtagggccaagtggccagagacaggcaagtaagtgggagagtggagtctggcctgcattcaacacagaagcaccccgatctgactctgctcttcatcaagctctctctggcttctgtgaggggcaggggtggaagtagagagacccctgaggaggacactgctatttgcagatgagaggtgaccagcctgtctgcaatggagggagaggaggtccgaccatggacacctgatacctgcagagctagtgggattccccaatggactggatggtaagtgagagagagaggcatcaagaatgactccaaggttttggcctcagcaattgccagctggtattcaatgagatgaaggggtctcagtgaagcaagtaagagaggaagatcagggattcagctgggagacagtaaatataagttgcctattaagcctccaagtaaaggtgttaaggaggtgggagagttcaaaaggaggtctgaagagcagatattaatttttggagtaagggtacagagatgacattgcaaactgcttctggagaggccttcaaggaactgactgcggagggagacatgtctggagagctgcagcattttaggaaagaggggagaaaacagccaatgaatagcacaagagaaaagcatggcgagtggggtgtcctgaagatctacctcactgatatcggggttcaataaaatgttcgtgcattttttggtaaattttaaagtgctagataaatgctgacttactacctttgggaccagatggactttgctccatccattgagatcattctttccagctcttcttagattaaaaaaaaaatccacttttaacttagtcaaggttagtcccaactgagaatctggagacacattcctgggaatcagaagctctgcctacttttgacttgttagatagcactttctgagaaatcttacagccacccataaacaggggaaagggagaagggctaactcacattgattactaggtattacaattgaagacttatgttcatgcttttgtttaatccaaaccacaactccatgaagcaggattcattttccctgttgcagaaatgacagtgtgatcctgagagaggtgacgtaactcagctgagttcacgcagtgccctcgccatgcacctgtggtcccagttacttgggaagctaaggtggaaggatcccttgagcccaggaggtggaggctgcaatgagccaagatcgtgccactgcactccagcctgagtgacggagtgagaccctgtctcaaaaaaataaataaataaaaataaagaaaagaaaagagagttgctatcataattcaaaaataactagactaaatttcagtcctacttgataggctggaaaggctgttcacatatcttactctttcctggacaggtccattccatctgacctctctaccaagactgttgcttctaagactgacaattcggccttaggggaaataaaaaatttaaagagaagtgaaggaaaacgcttcccacaaattggagaaaggtgtcttaaaacagcagtccccaacctttttagtgccaggaactggtttcattgaagataatttttccacagaggtcaggaggggatggtttggggatgagtcaagagcattacatttattgtgcacttgagctctattattactattacattgtaacatataatgaaataacaactcaccataatgtagaatcagtgggagccctgagcttgttttcctgtaactagatggtcccatctgggggtgatgggagacagtgacagatcatcagccattagattctcataaggatcatgcaacctagatccctcacatgtacagttcacagcaggatttgcaatcctaagagaatctaatgccaccattgatctgatgggaggtggggctcaggaggtaatgtgagtgatggggagtggctataaatacagatgacactttgcttgctcaccctccctatactggtcagtggccctgaggttgggaattcccgtcttacagaaatcagttcttggagagatctcatttctgtgttgggaaatgtggcataagcaggaagaaagaggatacgtgtggagccagaggaggagccagcatgattcgcaaggtaatttgaaaagagagggcagacgcatggctgaaatattataactggccaagatttgtatcccagcctggtcacataaaaactgaatgcttcaaagtgccgaacacttacccagtgcttgatatctgccaaggagccatcaaaatgtccttaatgtgcactaactcattgagacctcaaacatttccgaggatgtttgtgctatggcaatgttcccattttacagaagaggaaactgaggcatggagaagtctagtaacttgcagaactaactccaatagtttggccccagagtctgtcatttcacagccaggttctgggctttccatcaacccccagcgagtccccttccctgagcttcagtgtactcatgtgaaatggggaccacagtgctagctttgctgcatcgttagatgggagataatgcctgcatgcctgtcacagagctgggctcagggtggggtgataattacaatattactattaatcttgagttaattctctcttttgagacggatgtttctaagctcccctgccagccaagtgtggagcagaaaagcatttgctcagacctcctgtgtgatctctcctcaccacctccctccttttgtccatgaagcctcccccagttctggcaactctttagtgctatcctttgtgttccataaggctcatgtcagaatttattatgacacattttgcatcagaatgaaactattaattgtccaccgactttactagattgtgagctccttaagggacagatcttcctttctgctttcttgtgactacctgcatctcaagagccacctgcaatggtacactctcaataaatacaggctttctgaataaataaatgaatacatgccaccagagtgtttatgcttccggaaatcctgctccaatcctgttcctattcaaagaatcaactggagtgacacacagctctgttcttctttgttctgatctgttcaggtcagattaatatattattttttattactcatcaaaaacatcttcagaaacttttcatcagaaagattttttgtgtaaacctatctatctcctccaaatcactatatctgactcagtgtgatttttagtctcttataaccaaatgatattgatagaaatttgttgcttttgagaacctaagtgtatttctcttacaaatttcaaagggaataaagtgaaagtattatcaggaagtgggaannnnnnnnnnnnnnnnnnnntgggaagaattcatatgtcagctgcagcccatccctgattcgaaacctacaggcagagatgtgaatggtcagtagtgctaaaggatttctgtggttcctgcagaaccaggagacactgaggtgccaagacagggccttacagatgtttcaggaaaccaagcacccagaggagtatcttgccaggttcaccaggtgcttcctacccaggcactgccagcaggacagtcctagctctgcaccagccccctgcctctcctctgcatcctgctccttcacccccagcagcaggcgggagctagtggactatgcttagaaatagccaaaccaacgagggagcccaagaaaaaggatcgaggacctctcaccaggccagtgatcattacttttcaaaaacagcagaggcagaagctggaagtcatgaaaactgggaaaaagaaaccaaagaaacagtgtctttgttgcaacagtttcatccaagtcctgggtatataaataaaataaaattttattttttagcaaaaaaaaccttttgctgttatttaaaaatattcttgctgttttccaaccatcagaggagacatgcacttttcattgctgttaacagatctttttttattgaagaaaaatacaattatgataacttccatagattatttcattgaatttcacgtaattctatcaagaccattgtgaagtagatgtgctctgcggatgagaaactgaagctcaggctttaaacaacttgccaaacacagttactaagaaacaaaactattaaccatatcgtatcacctcaatcatccttttactttcctttgaaagtaaaaaactcactctcttttgaaaatcccatccaggctctacctggacaaaagtgcctagctgcctctctttccatagtgagctctgaataagtagcctttgattaatcctataggtggtctctattctttcgataatacagcctcataagaagaaaaattggtgatttagcaattattgcctgaataaattaaagtgttttatttaatactttaacattatgaagagggcaatatatgaattaatatgtaaataaaataaaatgactttagacataatatgaaaaaaaacagttttacatgttccaatttctccctatatgttttcccatccattgtgcattttactgttgtccctaagggtttgaacatttgatttatatcacctctctggtccctctgagtctatccacagaccccaggttataataatataagcttgacttccttcaactccacccggttgggggcaagggtaaggcatggtacctgcagcctgactgctgttttgttttgttttgtgacagggtcttgctgtgtcgcccaagctggagtgcagtggtgtcaatcatggctcactgcagcctcaaacttctgggctcaagggatcctcctgcctcagcctcctaagtaggttgttgggactgcaggtgcataccataacacctaatttttaaatttttaatacaaatggggtttgatttttaaagtttaaaatttttttgtacaaacagggtcttgctttgttgcccaggctggtctggaactcttggcttgaagtgatcttcccaccttgggctccaaactcaggtgtgagtcactgcacccagccaaggagcctgactcttcacagtgcactcctcatctcattgggacattggttgggctagcagggaataactgttcttacttggaaagtactcctctctgtcaggcatgtggcaaggtcttccatatgtgatctccttaacccacaaacaaccccaccaggagggttatattatcaccaccaatttacagatggggaaattcaggctttgagagattaaggacctcagtcagattcataagcccaaactatctgggctcttagccccacatgctcctgcctcagtgggctacaccttggtgagatgcctatgtttcggtccactggtccactcctgaagaccaaggcacaggtttagagagacgtaccagcggctaaaggtacttctgcatccaagaactagaggtgtcccgtgtcccctttacaacattgttggcctccctctgggccttgtaccttatgtttattgcctcatttaatccaggtaaggagtctttaggattggtggcatgtattctttttatagacaaggaagatgatgctcaggagtttggataacctgcccaaggtcacgcagtggaggagaggactagaaggtaaatcaatggacctttcactaccttccccttctctgggctgtagcagtgagttaactggctcagacttgcccagcggaatgcccttcaggacacactgagtactgtagtaagagctgcatatgcgctcagggagaatgtggatagacgctgtttgtgattcacgggtaaagggccttctcccagaggcagcagaggcagatcctgtctctggtgtgccctggcccccgacttggaggcctcctgggccaggccaagaccttccccggcagcgatggtctccagccacactcaactgccctgaagggacatttcctgcttattcccttgcccggctgtgtcctccacccggaaggcctgtgccttcttcgcctgcatgtcctaccctgaggaggctcccttggtctttcatcgctctccctatgggtcttcacgccttcccgaaccaccgcgcccaagcaggagcacgttctcggccctcttcacagggcgctcctcctcacaggggtgcccgggatttttattctgtgccttcctggtggctcctacaagtctggaagggcaggaggcgcatctcactcctctgggtcccctcccctagcgcctggcgggagcccaggctgcatttgtggaattcatgactttttctctcctgctcaagctgaacacattgctggctcctgctcgggtggagcccggctaattagagtgaggggctccccgtagggcgaaggggtgcgctgtcagatgtggcattcccgttttacggagacacacggtgtcttacacgccagggagaggtctgagacgcaaagagccgtcgagcgggctgcgggattgcttcgctgtcacctccgcctgcagccacccttccgcacgcacttgtgtgtgcacccaggccaacatggaaggcgccatcctaacttctgccgtgagcaggtgggagggaagagagacgagaggtattccattggttgtctgggaaaatgaattgcaccttcccctcccttgcggaggatcaacttttcccaccccctcgggtgggcactcgcatcctggggccggagactgaacccgggagccaaggggccccagttccagggannnnnnnnnnnnnnnnnnnnnnnnnnnnnnnnnnnnnnnnnnnnnnnnnnnnnnnnnnnnnnnnnnnnnnnnnnnnnnnnnnnnnnnnnnnnnnnnnnnnnnnnnnnnnnnnnnnnnnnnnnnnnnnnnnnnnnnnnnnnnnnnnnnnnnnnnnnnnnnnnnnnnnnnnnnnnnnnnnnnnnnnnnnnnnnnnnnnnnnnnnnnnnnnnnnnnnnnnnnnnnnnnnnnnnnnnnnnnnnnnnnnnnnnnnnnnnnnnnnnnnnnnnnnnnnnnnnnnnnnnnnnnnnnnnnnnnnnnnnnnnnnnnnnnnnnnnnnnnnnnnnnnnnnnnnnnnnnnnnnnnnnnnnnnnnnnnnnnnnnnnnnnnnnnnnnnnnnnnnnnnnnnnnnnnnnnnnnnnnnnnnnnnnnnnnnnnnnnnnnnnnnnnnnnnnnnnnnnnnnnnnnnnnnnnnnnnnnnnnnnnnnnnnnnnnnnnnnnnnnnnnnnnnnnnnnnnnnnnnnnnnnnnnnnnnnnnnnnnnnnnnnnnnnnnnnnnnnnnnnnnnnnnnnnnnnnnnnnnnnnnnnnnnnnnnnnnnnnnnnnnnnnnnnnnnnnnnnnnnnnnnnnnnnnnnnnnnnnnnnnnnnnnnnnnnnnnnnnnnnnnnnnnnnnnnnnnnnnnnnnnnnnnnnnnnnnnnnnnnnnnnnnnnnnnnnnnnnnnnnnnnnnnnnnnnnnnnnnnnnnnnnnnnnnnnnnnnnnnnnnnnnnnnnnnnnnnnnnnnnnnnnnnnnnnnnnnnnnnnnnnnnnnnnnnnnnnnnnnnnnnnnnnnnnnnnnnnnnnnnnnnnnnnnnnnnnnnnnnnnnnnnnnnnnnnnnnnnnnnnnnnnnnnnnnnnnnnnnnnnnnnnnnnnnnnnnnnnnnnnnnnnnnnnnnnnnnnnnnnnnnnnnnnnnnnnnnnnnnnnnnnnnnnnnnnnnnnnnnnnnnnnnnnnnnnnnnnnnnnnnnnnnnnnnnnnnnnnnnnnnnnnnnnnnnnnnnnnnnnnnnnnnnnnnnnnnnnnnnnnnnnnnnnnnnnnnnnnnnnnnnnnnnnnnnnnnnnnnnnnnnnnnnnnnnnnnnnnnnnnnnnnnnnnnnnnnnnnnnnnnnnnnnnnnnnnnnnnnnnnnnnnnnnnnnnnnnnnnnnnnnnnnnnnnnnnnnnnnnnnnnnnnnnnnnnnnnnnnnnnnnnnnnnnnnnnnnnnnnnnnnnnnnnnnnnnnnnnnnnnnnnnnnnnnnnnnnnnnnnnnnnnnnnnnnnnnnnnnnnnnnnnnnnnnnnnnnnnnnnnnnnnnnnnnnnnnnnnnnnnnnnnnnnnnnnnnnnnnnnnnnnnnnnnnnnnnnnnnnnnnnnnnnnnnnnnnnnnnnnnnnncggctgcggggcaggtcgagcagggaccgccagcgtgcgtcaccccaaagtttgcggggtggcagggcgcgcgctctggccacccgccgctctgggcggcagctggtggcaacgcaagggcgcggcgggggcggccggcgcggagggggccaggtacggggcccgcgggcggcgctgtgcgcgcggggcagccggtcggccgggagcgcgaaagcctggtctgagccggctgggggcggggagtgtggcggagaaatggggaacaatgcgagtgagcaacttcaggaagtcattgtgaaagaaagctgggaagagctccgcggccaagttagcaggacactctaacaagtgactgcgcggcccgcgcccggggcggtgactgcggcaagccccctgggtccccgcgcggcgcatcccagcctgggcgggacgctcggccgcggcgaggcgggcaagcctggcagggcagagggagccccggctccgaggttgctcttcgcacccgaggatcagtcttggccccaaagcgcgacgcacaaatccacgtgagtgttttcaaattgaatttcaataggaaaacttggggtaactggtgaatttaaaaaaaaaaaaaacacagtaaagaaaagcggtaaggttggtagaccctggtgtcgctcaggtccgcctctcttttctgaggacagtgagagagttcacttctgtcaagcgtctgttgctctgcactgtgccagcaggtgcaggaccaggccgacatgggacacttctgagcagccccgctgtcaccaggagaggagttctagctcccaaccatatttaaatttatgtagacctacatatacccacggaagtcagcctttataaagtcgtgtgtaaagagttttccttatatttgagccgggagctttctttttatactataaatatgatgagatcgagtctgaacttaatttctgcaagagaggaattatcccggctttgaaaagttagtccttttgctgaccgcaggtttgacgctcaagtcaccaaaccttctcaggaaaacccttagtaatattaaggcatcaggttacttgcggttatatttgaaatgtattttaaatatttgtcaagcatcgctgctgatgcctaaggaacctcgtgagggcttgtttttccttctaatttggaggcatctaatgaccgaaaaccgtagcgattccatagggtctgaccaggcacagctttcaaatgcagcttccctctctctagggactgcagcccacccagactgaatttcaatgcggtgcgctttgcttaggttacccactcacaatttcccactgcgccgcaggcagtatatttcagctttgagataccttgttttaaaattccagacaaaatggtgttgaggaaatgtctccttactagtcccatcaacttctgttaaaagaggaaaatttatggaatttgaaaatactgcgtatgatatttaaactttcatagacattcaaatgcttttaaggccaggttcaatttggttatgagtcgaggggtgggggggacccacatagaaatgtcctgggtcctcttgagtttatttctttgtttgaagatgtttgttcaatgagttttattgtactcatcttttatatggaattttaaaaagtaacaatttcagtattatttatattagaatgtgtcagaattatttccgtgacaaatcagatcatttgggctatggcttaaaatgtacacgaggcaaatattcatgacaagaagattcaccttcttacgctggcatcttgtaaaatgcagaacaagttaaagaaataatgtgtacacatacaaataatgatgtcacattaaaaatactacactattcttgcttgatggaatgtatctgatttccaatttcaccatgaacatatttcatacattttttacatgaaaaaaaacgtgactcttaagtctcacagtcaatcagagctggtgaccagaacattttattgaactaaatggtcatgttttcttccccttttgtttcacggtgagagttgaaggaaggagtttagaaactctccagtacttgtttaattcatcagtgttctaattagagtggtacctcttggaaaactacacacccccctaatgcagaaacatcatagcaataatcacccaccctcagggtctccaggagaccacaagggctgcagataaaagtctggatgtgttaggtttgaccctttcgaagagttttacacaggctcctaaagagaagatcagctgtggccgtttgtagccatttcctttgtcgaaaaactaagatcgcagtgaatgtattagccaagaggtctaaagccctgttgtactgcaggccactgtcttccttgtttgactagagacttggagtttgagaacagtggttctttggtttggatacattttttgttcttgatttggatgtgtgtgtttcatgcgtggttaatatagcatattttcaatataaatgtcaaaaattttgaaataggaaagaactctctatatattaatgtacttatacacacacttcaagattatgcatttattaacagatacatgaaataaattccatgtgcatatgcacatatgcacacagagcgtgcacacacacagcatgcacacagcgtggagtgagaggcatggggcagtgtggaagagttttaacatcaaacagacctgaaatgagtattaaaggccccctttatttttaaacttttactaaaacaagatggatttccctatgttatataatggtgaattttaggcataaataacgttttttgagtgttgcataattgtacgtattaatgtaatgtaactgtggttaacgaagaattcatcaaggatatcactgttttgtggcattttttttttcctcctctaatctttggacttgtgaaataatttcactatgaaataaatgttggttcttgtcatattctaagggagattgatgtaagtggctccactccagcttacagaaggtaaaccacgacctttttgcgttctctgaaaacgcttgtcttccgatgcctctgtttctaagactgacaagcactctgggggcactgtgacgcctgcttctagcggcagagttgctgcagctcctgtcctggctgtgaacattgttctctctctggtgtctctatgttcataactacagagacttcagctctattccatttcatatttgtgctgaataatcattccattttatgggagaaaacacaagatgtaaaagcaacaagtgacccatcctttgaagcttacaagaagagaaacattaatctatttcacgtcttgaaaacagatcagttttattttgctcaaaaagggcacatgtacatttttgatctaggtcttagaaacgtagagtttcagaggatcagcattatacacactgtcacacacacacacacttaaaattcagatgaggaacaagataggaatgaggttttgttagggacgcagagcacctaaaaccaaaggatatcgacagtaacaaagctgtttttactgtagtgctgactgaacactcatgctggtgtcttcatgtggaccatggctttcttgtatttctttgcagtttaataaatgacttcatatctcaggttacctttccacatctcctggaatatatgtttatgtccttaaagtttcagtgtcgtcactttagtagctttagtttgagtttttaaatgtttggtaatattccaacaaatattttttaagacattatgaaaccttatgaagtgccatatattacaagtgagataaaacagcaagcaaaagaaggtttgcagaaggtttttaagtggcgaagtgcgggcctgcccattttggtgtctccttggtggttactcctgagaagggcctggaggaagagcaactgaggcctaatctacaggcaactgccaaattgtttcagttgacgtttttccctctcatgtttgactataataaataggtagttgccagtggagccttcagccaaccacctggtaataaactgttaaaaatggtgcaaaccctaggtcacaggtgtgggggccatttgtcttgcctgttaacaggcctggccttaattcttttctcccatggccatttctgcctttggggaactcacaattcctgttgactaaaagagcacccttttccaccacaagcctgacaaatcagacgtccacataatttctgaactcgttttggttaggacaggaagcacaggctcccttcctgtctgtgttttcctaagagaaaacggtcttccctccttttttgcatatttggcaagtggttccacctttctctgcaccctggtggagtgtgaaggcagcagaggaaccttttggaggaggaagaggacacagaggccctgtagccaggcaccaagatccctcccaggtggctgggtctgaggggaactccgagcagccctaggtcctcaaagtctggatttgtgtggaaaaggcagctctcacttggccttggcgaggcctcggttggttggtgagtgccacacggtttctttgtgtgcttgcatggattggaatagccattgtgttcttccgtcttccctgctggtgtttccacagtgggtggcctgagcccagagcagctccccatatccctgtgcaggccacctgtctcgggtgatggagagcatcattatgctccgtctgaacgctctgctttcggatggccccatgctccacctcctgatagctcgtggcgcggggccacggcttaacgaatggctgaaaatgggtcctaattagtggaaaagtgctttgttcatattttctcactcgagtgtgcagtgattcatttttcttctgcaatcagctcactgctaaagtaaatctgactctcttcccgccattgcacaccaaaagttaactctaatgggtaggaggttaggtttgttgagagagcaatgcagtaaaaagaggggatccaatgtggtcttgtctgtctggtcttcctttcttcgttttttcctcccttgtcttctctgtcattcccttccctccatttgccttgcctttcctgtccttcccttcccttccttcccctctttctttctataattggtggggggtttgcacagactgccaaaacactaagaactgtgtaaagtgtttttgaatggccttacacatattgaagtagatttttatgctccatttttgagatcacacactaaaatctatacctttaaagcattttctgttagtttgaaactatttgaaaatgaacaatgtggtttagattagagtcctgttctgaagctaggagttccactatgaatattgatttatcagtttttgacaaatttttgttgttataccagattttcactggcaaacctagagcaaataaaattccacataagatacttccctagacctaatgggaaaaatgtttaatttagagtctttaggagaaatgagaatgaggaattgaccttttgtaagcttacttctgaggcactctgaagtgtgttccagtgcttttaatggaaactagagagagccagcaaccccctagtgtgagccccacttttaaccggaaaaagtgaccttttcctcctcctttgtgctgagttttgcgtagggcagaaaattaagctgatattcaaagagattcactgcaaaaacatattgataaatcgtatattctatttcattaaattaaaaccatactgctaattatctcaggttgttaaacataaggcaattaattatcattttaaaagttggtaggaagttgtgagtacttttgcagtatgagtgttttcccgctttagtatgaggttgtgtatgtttgcttgaatttacagaattttcactttaagagcagacaatgttttgttaaagaaatgaaatttgctaaaaaggagcatgtaaagtgaaacattaaaaataaataatttcaacttacttaagagctgcagaaaaatctgattgctgtgtttaaaatgaattttcccacatttcgctctcttatggacaggagcattttctgtcaggttataaataaagacatgcccattttttgtacccccacaaatgaggaagttgtaagctctctgaggttttactgatgagccccctccccctgggtttgcatgaagagatcataggccacaaataaaggactacaaaatggggtctaaactatcctggtggggcctgatacccacgtttcgcatggaccttacgatgtgatgaatggttttggcatgagtgtcttaagaatgcttccagattcgggttacaggacagccagcgctgagctccctattgcagaacaaagtaggaatctagaactttcttgctaacaggatccagctaaaacaccaagttagattcttaaatgatgttcttttctgtcattatttgattgttgtcagtagcagtaattgttaccaagccattgatgcttctattcttccctttgcccttctgagacacagctcattttgacttcagtggaacccctcgaaggtggggtgatgagcaaggtgaattttcaaagtaaagctactaagagaccaaactacaatttaaggaacctgatttttgaatcaaattccatatactgtgggtatagttcaacatagattaatttcttatagttattatgaaaaaaatctcatcttgatgatagctgataattttgtgggtgtcgtaaacaaaacagaggtcagaattcagtcccttggggaaaatttccaattagtaggaaaccaagtggcctaccttagtttgaagacacccatcaggatgtctgcaccttttcatcctctctggaggaaagactaaatacccattattgtatataggtcaggccaaagcagccttttatattgcaaggaataagaggtaaatagatatatgtgcaacaatgaatcccctaatgtgtttactctagaacacatgttctttctgtatttatatgtagattttgtagatcttgtcttaccacctgctaatggtagatactgtatctaaataagttgaggaaaatttatagtacctaggaatgtgtcctcagtgggccaatcaatcaatcatgacttcaggttatttttaataaatatacacgtatgggttcataaacaatgggatgttcttgtgaagatctaaataattttacttctttgggactaaataaaatatagcttttgccaaataaactcacacaagcacttattttaatagaagtcaaatggctttgcagaaacttcagttttacaggtgcattgtttgaaatgttacgggtatacaagtggatttctctattatgtacagtgttaagtttgagtttcaaaatgtccacctgaaatgatttacttgtacgttaagataatttaactgctaagaaggcaagataaagcattctttgtgacaccatatggccttgctgagggaaaaacttactgttataagtttgtgtttatctctctttttaaaaaaaaatgaagaaaaaaacgtttaaaataatgggaacacagcagttcctggggtcctctgtctctttatcttattatagtaaattaccaaaaaaataatgacctggggcatgtctgtgtggacccttcttttggaggcagtttctgtgttttgtaaagctgtaggttctattttcattgcacttcatattgctgcacagctcctgaccatgcatgaaggtcctctgaaatcggtaagagggcagaagaaaatgattctaaacttagatttttttaacttaagtgatgaagtgtgaaacgccatttatatttgaggaagctacctaggaagtggctcatgtcgatggcccaaatcagaagagggcctgtaaaagcttctatcaattttgactgtgtatgcttctaccatggcggctcaataaacagcagtattagtttaagagtggatggtacagtagtatagacgggaagcctctcctctccgtgtgaaccgtgcacccctatgagagggtagagacaatacaatatgcctgtaacgtcaggacagacagtcatggccagcttgaactccagccctgggcttcttgcagcaacaaacgtgaacacagaggactgtctccaactccactttctctatttttaaaacaactttttgaatacagtatctgccatcttttcttatacctcactttgaaacaggtggctccactgtggcatttaaaatgttctgtttcttttccctctgtatcaaatacctctttaccaagaaaacattcaaacagcatagtttttaactgtattttgaaaggtttccttagttccctttgacccttcctcttttgcatatcagttcctggccataaaaataaaaaatgctaggacagaattgcacatctgagctgatttgccctcaaaaagtttcacagtggaacaaaccgcaggaggagttttctgtggctcagttaaatgtcgggggagggtggtgtgaaagccaaattggattcctgctttcctgtttaaatcttgtttttcattgttatttgcaccagcaatactctgtggaataatcatgaaaatgtgtagattggcagctaatttttgaaaaatgaaaagaatcagaaatgaaataagagtgctcggaagtttttatgttctctcaacctgttttgtcaaattgttacgaaaacctataaggtctctttgactagatacaaagactttgcacattgccttagctttctcttgaagcatttccttttttaaaatacagtgtaattcacagtgatatgatagatttgcaaaagtaaaatctaccagtctgaagatgaaaggacttgtctcttagcaggaataatgggttttattaaagaggtctgtgacctaaggcattttaaataaattacaggcttggtccctgtctcccccatgtatctactcccttcaatataagcatcattgagtatttaaggaaataaccccaaatgtaactctagtgtagcttcacttgtcagggaggaaaaagtaaatagcatacatttggccaaataaccagaactttactgtagaagttttatgatgaaatttgcctttagtgcagagtattacaaagatcatgtttagtttctagcagtatataagtagcatccatccttatctgtcatgcatttggagtgtgcgacccctgcactgggctgcaacattctgatgggcaagagtgctagggagaaagaggcatcaccatcagactgcacgggttcaagtgtcagctctgtggttgattagctgtgtgacctggggaaagctatttctcttagccttggttctctcatctataaaatggagataatgatgcagatgccttgggtttaattgggagagttaaagacacatttacatatttagcaagtaggtgttgaattctagctctacattggacactatgccaggtgctcaaataaacaagtggacaagacagacaacacccatggtcttatgaggcttaaccatttgcctcttcaatgccagaaacttagtaggttgattagataaagccagtgagtaccagtatccttttctttgcagccttttcctggcacactaaaaatactcagtacatatgaaatatcactggacaaagaatcccccttggagtaccagtggagaaggaaggcatttgcttaaaagcaaaccaacagaaagacattgtaaggcagttgtttaagtctcagagacctataatttttttcttttttcttttttttcatctcgctctgtcgcccaggctggagtgcagtggcacaatctcagctcactgcaagctccaccttccgggttcatgccattcttctgcctcagcctcccaagtagcagagactacaggcgcccgccaccacacctggctaattttttgtatttttagtggagacggggtttcgccgtgttagccaggatggtcttgatctcctgacctcatgatccgcctgcctcggcctcccaaagtgctgggattactggcatgagccaccacgcccggcaactacaattgttcttaaagcttgtagaattactgtgtgctaccaacagacaggctaattttgagtgaccctcagtactttgtacagttaatttggcacgctgtgtacttagtggctttttaacagctataaatttgggctgctagaaaagtagtaaagttgtgattcttgacaggcatctatctgcattttcatttttacttcatttgtctagactcagcttgtcagaattatggaagagactccttgtgtcagggcaagcactgtgaagagaggtattcactgtcagaaaagagaggggagctggaggcagctcagaggcctgagacccgcctccacaggagccccagcaggttcggtggagctctggccacactctcctttgggatgctgaagtcagaatgagttcacttcccagccagtcttgccaaggctcctcacctggaagcagcaactgcccagggctgttggatgtttctccccaggggacagccaggtcccagtcccgcctcggtgtggaaggaggaaaggcagggtccaggaagctgtttcaggacaggcccaaggtcccccagggatgcctttcagggtcagcggaggctgtaaatcagcagggcccacacggcctggaagaggcccctgtgctgtcggcttgcccggcttgcccggctcctagtccggcttctgctcctcctttgtaaagttatggatatgctaatagtttccaactgagactaggaaagtaagtcctacttgacactgtttggtcagaaagagggagagaaaggagaaggacagagagagactgagagagagacagtctcagacaaagggagacggagggagggagggagagacagagaaagagatgggaggtaggtgtgggaggagggagagatgcagaaggcagaggaaagacagacagagatttagacctcccaagtcagtgagcagtccagagttggagtggagggtgcctggtggcttgtgactgcagactccactccccgctcctagaggcacagccatggacagcttctgtcacgttggccctgcacttatctctgcatctatttccccttgtgcaagattcagaactgcatgctccaaaaaaacaataaaagcattcatgttcataagaattgcacaggtaaaaggtagtttgctgatattgttgtattttttactatcgcttcttttagctcttgcctgaaattgtttgggtttcccaggcaaagtagaaaactgcggtacgtttctgtgaaataattattccttctggcatctccctttacagacctactgatcttgatttttcatttaggtgaaagtttgtgaaaacatgccattagcttgctttgtgattaactccttttactgaatgtgagctccttttaaattgaggccatatcaagcttaaattccatattttacccggcactctgcatttcttccatgtgggagaggaggggctcagtaagtgctttgtaaaatacacagccgaagtgatgcacgtgctaacaaaggagtgtgacaggacttaagtgcccttctagacacttcaggctcccctttgtaagctgtcttggaagaggccacatttcctttccctcaaacagtttctcattgtttgattattcttttagcctttctctggaagcaaagccacttttacgagaaagtcactgctttttcatctcaagagatgcaagtttggagtttggggaagttttcaggtgcccgtcaagtcatcctttatgatgtcagacgagtcaggccacagaattcacagggctcagtgcagaccgaaaacttgaggcctcttgttcagaaattattaaaaattttggtgaacatcaccccaagcaaagagatcccctaagcaccagcccccaagcaactgcactcataagcccatgaagccccctgctgtcagaaacaatgtggttgaaattgtgtatgcacttggaagtgagatggattgcaaaacacaggtctccatgctggggcaggagtggtgatagggcatggagtggaaatgtccagcaggcccacgtgcgaaaatgcagagctctctggctcttgcagacttggctgctgacaatagacgcgctccaggaaggtgctcgctgtggtgtgatctgctgcccacccctagctccctccaggagactggtgcggggactgtttgcaaatgactgcaaaagtaagaaggttcccacagagcagagcttgatttggggaccagccgagggcagtttgtcaggattccggcttgaaactgttctcacatctcaccgcctgaaaggacgagtgtgtccagaggacttagcattgatcacctctgtctccatgcagcaaactcagaggctcagcccgcattccactggaagggcgtttgccagtggtgttggttggaagagccttgactttgccttaggaaacatctttttttaagaattgaaaataacttgagtatgcaacagtagggcatttgttatataaattagttgactagtgtgtagccagtaaaatgatgatggtggtgtgtatttgttaaataaaaagatatgtgtggtattaaattaaaaaatattttaaaacaacatatttgtaatctgtttagtgtcctctttttgtaaaaagtacagaaataaatatacagaaaaaatagtagtcctaagtggtagaaattatgagcattttcttgcctttaaaaaaagttgtaaaagattgtatcatttatgtagcaaaaagttttaagtcagcattctaaaaatttcgtgttgttatagttgctgtgacaagatttaacttctgtatgcttcaccaatcaatacagaggtatttaagacccggtgtgtgataggccgcgctaaaatactatacacatcttcagaaaactagagaactaacttctaacttcctatattagtgtggcacggctgttacaaagatttttctcatttgagtctatcttgcttctttatcattgttttgacagtttcagaagaatcgtggcttttccccttttttacagtaaaggtacctgagactcttgacgtattgctttttggaaatgcttgtgctggtcacatgcttgcatctgggctagtgtgtctggcttccgtgtgctggtggatgcttactctgttttctgaaatactttttctgtacagtggccactagctgtactcctaagccacacacctaccttgaaaattcatgtcacttttagaaatagataaaagcccctcccatccagaaaaagtgactatcatgtatatcctcatcatgactaatactgatattcctgaaattgaaaatacatattccatatgtaccataaaaggtattaaagatatatggagtgatagatatattatatataacacttctaccctcacagttttcagcctaattgagagggtaagatccctgaatcatccatcagtttttcaggtctctgctgaaagcaggccacagctcagatccacacatctgaaccagagacagaggtggccaaaaataaaaagggggacagggggacaacctggtttagagtcaacaaatagactgcattttctggttagtgaaggagctctcctgaaagtcatataccagagcataaatgagcagatttccttgaggtcaccttctgctggccatagctttcttatctgtggagctgccagctgtcatccactttggggcacctgagactgccgagcggcaggccaggacccaagtgcgaaacacagaacacctttttgtttctactccactgatgctggggttctctccctggtgtttgtggctcgtagtacactctgtggaacattcactatggtcatcgaagggcagcatcttcccagttgtttctttcttttcttttttttttttaatttaaaccgatctgagaagccagccatctgtcagcaaaacaggaaggctcgggctctctcctgggctcgttttgctgccgtagtgagcgtcacttctccccgtgtaagagtgctggtgaaggctgaggcaagggcccagaaagattgagggacaaagacaggagcgcccgcattgcccatctgccaggctggaggtgtattcattattgatggaggtagtgcagttgctgctcagatatgcagccctgcctgggtaaatgagacattcttcagcaaattgcttcgttttttgattgctgattgtacgcgtgtcaccaagctgactcaaggttcatcgatgcatgctcagtaaattagaaagaacataactatggatcagccaagagaatgaattctgtgcctacaatgacccagggccatttaattttctgcttaattttgttgcagtcagtttgcattttgggttattatgcagtaggaaattaacaataaataacaaatttggtcctcctgtgcttgtaatgatatttttataaatctttgtaatgctgtttttaaaaggatcaaggtctgtgccagtctgatactccagcaagtatgtgaggaggaaaatgcattattcttgctagataaccttgttgttaaatagcataggggttctttatctctctctctttctcatatcttattagtatttttgctttaaactaaaatcccttcctctctttctcagataacctgaggaccatggatgctgatgagggtcaagacatgtcccaagtttcaggtgagaccttatgagatagctgtgtgggaagttcatgagaaaagcttccctggggccggaagtcacagtgcttggtatgctcatgggggaggaataggggctattctgcaaaagaaaagaccatgatggaatttgcctgagtgtttccttcacctgttacaaattatctcactttgagctgaacagaaagcctccaagatgaaattagttttactgttaaacttcaggaaaaaaaaacgggaagagttaaatacatttttgtactgttggaaggaaaaatggctgattggtttaaaacccaaacacatgccaatgatggtacttaaagagagagagagagagaagcttgaaaaacataattgttgggcacagtcatgactgtttgttcattaagcatggacacaacattgctcccctttgccatatatcttttcaagccgtattggatatagctcttctcatccaggagacccaggaagtggagaagtctgtagtaggaaaagcctaagggtaggtcacagactgtgaccatttggcagcactgagggtggacggcgagccagtccaacaaaaccgcacagttccccagtgcatggacataggaagacagctttctatctggccctgtatccagaggcgtcagccccagtagcagctttcatggactttggggttttcggtatttcatatttttgagcctcacagactcacagccagccccagaggctgacttatatttgagaaagttctcagtggcaccttgccttggctgagcgccctcgtgttttgaagtttctatgggattctacaagttggtgctcctgatgaagaccaggacctatgtgtggctgctcccctgcttggtggtttccctggggaaggtgcaggagaggatcttctgagttccatggaactggagatagatctgccaatcacaggcttccttctccaccactcctcagccgctctattcatgtttcagattttggacttaaactctcccaggtgcaaagaacaaacaaaaggctagcttatttttcttttagagtgaggcttcgtatttattacaatataattgccacattctttgtgtaattctcacatttatatcttaaatataattctcatgaatgagaattatataattctctttttgtatatcattgaatattttcacttaatttttaatttttttaatcgtcacaaaataattgtgtacatagacacaaaataattgggtacatagtgatgttgtgatatatacaatgtatagtaatcggatcaggtaaatcagcatattcatcatctcaaacatttatcgtttctttgtattaggaacattcgacatcttccttctagctatttgaaactatatattattgttgactacagtcatcctgcaatggtgtagaacactagaacttattcttcctacctagctgtaattttgtctcctttaacaaatctctccctatcttccactcccccgacctttccagcctctattagcctctgtcctactttctacttataatgatgacagcagcatttgttagtttccacatgtgagtgagaacatgtggctttttaacttttagaatgtggtattcaggcacttcatggtacagttggtaaaagtgaaaatgtgtccaaaagtttgtgattatctatataaacaaaaatggtataaatacaaatatcaattttgcattgaagaacttaccttagaggtatattctcacaagtgcacagagcatttaagcatttgttcactgcagcattgttatcagtattttaaaactatggtacatccatgtacttccacatacagctcttaaaaataaggaggatatgaatgaactagtatgaaaagaagtccaaatacatgtgaaagtgagaatagcatggttctggatggtatgcaaagtatgatctcgttcttttaaaagaaaataaattacatacacatacatattttctatatgcttgcccataacgtttaggaaaattcttgggtgatatttattaacctggacttcctcttggaagactgatggtagaaggaaggggacgagttagggaagaggaggagaaggaaaactttgcttttcatcttctaccttttagcattatttgaatttattttccttaagcgtttactttgtttcgtaaacaaaaaagcacaaaaacaaaaaacgagttaaatgggaaaaaaagcagtttagctctttatagcctctcatttggcttcgccagcctctcactgcagcctcagagagctggtctgggaaacactggtagatgaggactgtaatcctcactcatggaagaggatctcattcactgggtttgctgactgtgactagaagtgattagggtgtcaaaaaacccaagcatgttaaaaatttccagaggccaaaaagatgctttcattgttctgctcttcttttccttgtcgctttcactttgggtagcttctaaattggtattttgcatggtgcatttaaagaaaatgagacccctttggccaatgcaggagtctacactctgatattctagagtcaaagctgaatgctgacacctaggaattcatctctagaatgtttatataaggaatagcccctcagtattccgatctcgtatcttagtaacgaaactaacaaaagcctgattctcctctggtagttttcttgtctttaccataatacaaaataagtaatttgttctgcaccctgactgttcaaaggatagggtagctgggggcggggacaagaatggagaccttattacataagacttcctgaaaaaggaaactctgtttttgtttgaaatgatttggtctgaaatttagtttgtgtacacttaccaaagggattcctatttctaaaacactcatactgcttttgattcctgttaacctttgagcactctacgtaatgatgagagcacttaaagagtcatgtcacttttagtaaagaatcaaaggatactttttctacttcttcgagtttgatctctgcttctccagttaaaaccagtatttgtttttttcatttctaaagttggaagaaatgacagttagttatggcataaggatgtacatttaaccaaataggagttgacattcttggtaagaaatcttaccaagattatgttatagattataagaaatcttaacaagaatatgttcctaaatcatcctcttttcccataaaatattaaagtatcagcaatttcataggattcaacctaatgtatgcgaaatgctagataaacagataaatacttaatatctggctttttttcaaagcactgggttatttgttccttgagatttatcctaaatgtgggctataccctggtttacagtgtctcacagatgtgtagtagtagacactccataagtgtttactgacttgaatccacagggtactgagaaaatgctactgatagacttggaggagagcatatctaaagcaagctaccctttcctttagggcacgtctcactaattctttgggtaaagcgtatttttcttccttttgtgtttttggcagtctttccaaaaatacgtgttatacctatgcattattttttggtttggtttctaaagaaagagtcagccggtgggaaagtgaaggatgtgggaactgagagatctgcatcagcatcccacctctacctcccacgatgggacctgagacagttatttttgcctcctggaccactatagtatcatctgtaacaggagggacttgagccagttgatctctaaggttcctctggcacctgtgaccctaaatagatattggatattggtttaatgctatttgtagtgtgtttttttggggatatggaaaccagaagtttgtttccataaacataaacataaactgtatatatctaaaggatatggaaacctttagatatatataatctgcttacgtaaagaaggtttgtatatattgcagtgtcaatgggaatattttatcaagttaagcatagtaaatcacattgattaaatgctttgtatttaccaaacattacccaaagtgttttctcctttcaacctcacaaggacccacagaagaaaatacagttatcatttccaacctgcagggagctgagacacagagaatttaagcaactgaccggaagtccaacagggagtcagagattgctctggggtgtgatccccacttggaccctagagtggaagcttctccactactttatagagttgagattctatattttgagcttgtatttacccagagaattatatcctcttgggcaattgtatataataaaacctcatgcatttaggagaggcgggatgacagaactttgttgagtgaattataatctacttgagaaattatttgcttacattttataagctaattataccatatctcatccagttttcccagaacacttctcataggtaatgctttatttgaaacataggccataggtaagttaagtgtaaatgtgtatttttataatttaaccagaagtttatttcatttttctaaataagtgaaattgtattgcatcttctaaattattctatttaaacacttgatgtcttgctgtctccgtctctgtgtgtttgcatgtcattgtacatgttcttaggaaaagtgtgggagcttgacgcaatatataccttatgtttctatgtgcatatagtttaccaaataataccataagtttacttagcatattagaatccatgcacattatttttattttatcttcaccgcaaccctgtgggatagaccaaaatcatgcttttcagcctcctttttccacttgaggaaaggagtcttaaaaaagggaccagtctcatgttcccattcgtcttacaactaattggtcaagccagaaagccagaactatgtcctgggtcactaactcctagtcactgtgtgttagtatttgagatgcctgttggcttgatttagtcatttattttttagtgttttataatccttgcatacttttacattttaaatggttaaccaggcaaattggtttaaaatcagtgcataaaaatactgtgcctatcatgatgggtttcatgaagtgataacttttcatcatggagatcctcagctgtcacagaagatgaggggccctgggtacagaggctcacgtgagggatgaaagtctcagcagcccggacttacactttggggcttttaggcaaatcagacaacctcttaagaactatcactgagttcaggcaaggcgagcttgaattaacacagggcccttggtgggcatgtgaatatatctcacttcactaccatccagttctgactctttactagatgcccctgtacataccaagactgattttttattctcccttctccccatgtggtttcttctgcatagagagttcctattgatcagtctgacccatggtattttagaattgcgatccctactgtttcattattcctttttctcccccatgttgaaaaaaataaatgtccctgagatgcaagatcagggacactggagcactgacatttagttcagtgcaggaactgaaggcagatgtaattcttaagaagnnnnnnnnnnnnnnnnnnnntgtagtggatcttgttttctcatagatacagcagttaaattttttaataaaagtaactaagagttatttggatgtattttagcatgcactgagcggaaagtacgacatttcttcattgggtaagtcctgattctttatgatcctcacttggttccagggccccatgcatctaagggtgtctcagagcatcctgcagtgctccagcatgatcgcagggaaaagctataggaggaaaagagtcaataaagtttagtttctcaacctcccacctccaccccataataatgacagctggttaatcatgagacgcgtgcacaccccacacgccctgtacatgtttactcattgggatagcatgtcaggccagaaggctccatggtcatttctatgaaggtactttagcaggtcttcaagaaggcaagtggcctgggtccctgcctcccccaaattgcaagctccctgctttatgtaggagacctatgtgtatattacagttctgtgtaagattattttgttattcttacccccacacccaccccccaaccccccgctgccaccaaaaaaaaaaaaaaaaaattcctctgacaaccttcataaagtacctgggagtttgaacaccattgctctaggaagtcatcttatacaaaaataagagttgtgaggtggttcatataccttcctgcgttctcctatttggagtttttccccatttatgaaagaggtgaaaacgctaagatatttagcaattattactttaaacattttctatttataggccgggcgcagtggctcatgcctgtaatcccagcgcttgggaggccaaggcaggcagatcacgaggtcaggagatcgagaccatcttggctaacacggtgaaaccctgtctctactaaaaaaatacaaaaatttagttgggcatggtgggggatacctgtggtcccagctactcgggaggctgagacaggagaatggcttgaacctgggaggccgagcttgcagtgagccaagatcgcgccactgcactccagcctgggtgacagagcaagactctgtctcgaaaaaaaaaaaaaattctatttacagcagtgaaaatagtagtgacttaatgcacattgccaaggctttagcataacatgaacactttcactcaatgtctctctggccttttgtttttccttgggaaattcttataatcctgctccgtctttaactattcattttgtattggctatccaaatatacccaataatgctctttctgaaaatatgccaattgtggtaattacagctaagctggaatattaaattgtgatgtctgttttccagagaatgaagtagtattccccagagcataggcttggtgcctgtgcaggttctattttaaatattccaggaagggttgttttatatactgaggatgattttactggtcttgccagtcgtctgaaatgctggtattactcttgtggaaggtttattcaaacaaacaaggacatttcacacaatacctagtcatgtttttcagacattttaatgtttggttcatcatttgcacacactctcaaaaatctaggtttgtctatgtgttcatatcattttgcctgttgccagctcagtcagcaggcacactctcccaggctgttgctgttttgttagacttcttcaggaccttcatctaaaatggtcttccacacgtagctatactgcataagttcacatcatctgtttcttgcatgtgggttgtgtctcaactcaagtttaagttagatttggaagggcggaaactataggagttgcagcttcagtggagaaaagagcatttcctactagttatggcttcccaaggaaggttagattcctcagagtaggagtgattccccaatgctagaacctttggtcaaatataattctaatccagtcaaaataaatacaggtattctgtaaaacccgatttcattttgtaaatcctactttgtatagtataagcaatttttgtatttgtgtggattatattttattttcctatttcaaagagaagaatttgtattagcagactccctttgcatgcggagaggggatcattttcccagtaggcatggggttcccttccattccttgtccagtcttcttttccccactaagttaagtcaaactaagcagctggtaagatattccctggttcttgcaaagaaagtgagcagatggcagaatgtatagctctaagcagaatacctggtgtggtatcctcaaacacaaattgacaggagggtgtggtgtggcaagctcattgtgggggtaaattggaataagcttacagggggaagagttgacaaaagataggaagaaccttaaaaatatagatgccttttatgcagtgataaaatgtctagatatttatactgtggtgattattaggaatatgtgcaaagattggctattaggatgttcattacagtgttgtttaataattataaaaggacagaaagcaatgtggactcaaaaataggaaaagaatttaaataaatcctagtgtacccgttatacatgaaattatggaaatatgaccctgagcatggaaatatgtacatgagaatgtctaaaagctagttcattttgaaaaacaaaataatgtcacctcatattatttatagtatataaagatgattttaagagtggcagtgtctgggattataggtgattgtatttcttcccttttgcacatctatgttctctcatttgtattgtgtggggagaagtgactttttttataaaaagaaaaaggtatatgcatcccagcagagaagcactggctccacccagtacctgcctcctcatgccaccctctcaagccaaaagccgggggaagcccaggcaccttgaccatgaccgcccgagactcacacttcttctttctcatcagggaaggaaagcccccctgtaagcgatactccagatgagggcgatgagcccatgccgatccccgaggacctctccaccacctcgggaggacagcaaagctccaagagtgacagagtcgtgggtaagtgggtcaccagcggcctctgtgcctgtgaaacctttatctctttgtatttttccaagacagtgatgaagggatgcaagtcattttatccattgtgttccctcaactggcatattaaagaaatatggcacaaagatcagcaggatgggggtcctctggtgtgtgggaggatggacactcacaggccagcatggccgtgagagccacacaccccgcaaaatgtccaagttgaggagcaatcctgcccagggacgcgtctctgtcactgtcctctgtcctcactgcacttgcaggaatatcaaatgttatggattgtagatcgtgaaaattacacacttacgtgttttggcaacagtgcttttcagtgtttggggttagaacaagccacatctggccattttatgttatccctctaatctctagttcttaaatttcagatttaactgaaaatagaaagtttcataaatggtaatttttaaatgttagaaaaaaatcaaagcacacatttacataccttttccataaaaaagtgtgtgtgaaaccatctgcaactccactggttaacttacacatgcgacagtttgtgtttggaaaacttcacccaccctctttatttcaagaaaccaaagacggagagaagttcagtgaattaaccaaggtgaaatgacagagtcagaattgaactgaatttctgactgaaaaactagttctcgctccattataccatgttctaatgagctaatgagtcaacagttccctggaatacctgttttcttctttaaaaagagaaagagctgtgatactgagagctacctattggcataaaagaatatgaaggacatacaggtaaaatgaggtagactggatcaatgtgggtcagctacataagcccccatagccaaggagggaacatgtatgtaaaattctcaggcttatgagaatcacaactgtatgtctataggacatcctaatgcaataatgggaaaatgtgataactgaattttatctacatgtatagaaaacatattttgggccgggcatggtggctcaagcttgtaatcccagcactttgggaggccgaggctggcggatcacaaggtcaggaaatcgagaccatcctggctaacacggtgaaaccctgtctctactaaaaatacaaaaaattagccgggcgtagtggtgggcgcctgtagtcccagctactcgggaggctgaggcaggagaatggcgtgaacccggcaggcggagcttgcagtgagccgagattgcgccactgcactccagcctggatgacagagccagactccatctcaaaaaaaaaaaaaaaaagaaaaagtaaagaaaacatattttgtatgttttttatgtgtcttagaaaccaagtggactaggtataatggttctttttttttttaactcagcagcacagttaatggcacaaacagataaagatggtggctaaagccatttggtgtagatgaatccagaaaacaagtacatttatgaattattttaccctattggaaaatggctactatatgtggaaagtagaggggaagagaaatgaacttgtgaattatctactctattctaccaaagaaagatacatatatcatttcagggttttccaaagttgggatgcaaaggatcatgtttcattttaatttatgtatttatttttgagattgtcttctatgtattgcaagtgatactggttttaccatgcactgtaccactacgagggttcctttcaaaacacattnnnnnnnnnnnnnnnnnnnnnnnnnnnnnnnnnnnnnnnnnnnnnnnnnnnnnnnnnnnnnnnnnnnnnnnnnnnnnnnnnnnnnnnnnnnnnnnnnnnnnnttagtccctgaagcacccagcgccaagggtactgttcttcctgcttaacacaggagcaaacagatgctcacaccctgcccaagaacacagaggctcagggactgaaccagaagaaatgatccattaaccatgtaaatgaacagagagcctggatgtcagagtgaggaggccagctcgggtcgctgtggagaaagagatgggctctccctggaatccctgcagctgcccttagaggctgtgagccatcgtggctagggcatctttagagaactgaaagtcaggccgattcctggagagtgaagaatagcacacgtgccttcaaaacagtgtcagtatcctgtcccttacggacgtcatattgttggtgggttttcctgggtgggagatcacccagtatctggttggcattactgatgggttcccagagctgtcttttggttcaaagtcctgccctcggtcccagctgcccccagcacaggtgtcaccttggagtcaggggcgggtttgtcatagcccatgggtcctggccctgccctttatcatgtttgacatgattttcagtctacttttccttcaggatgtaatttagaaaatatgatttcagaattgtgaaatttaaaaaccctagaaaacctctttgctttgcttgtaaatagcagttgatgcagccctgtggacaggcgggaacagccatgtgacgtgggcactgagatgatttgggagattgaatgctcctcagtggggctagaggccacaggagtgataggttactgtaaagaaagcaaaaaagatgcaaaagcctacatgacaaaccaggcacgacacaaaggagaggcttgagaagaggaagtgaaggagggagaggattccacaagaccgaagtgcccaaggagacatggagggaagagagggctcttcacagagctgagtttagagaccaccctccatggttctggaaggaaaccagccagctttcatatgtggtgacaggctgttcattaatttgtagtgtacagcattaaataaatgaagtatgtagagaacattaggaaacaatataaaaaggtaggggaattcgtggataaagggaataacctgggtaccatatttcatcacattattccatgggaataagtcatcagtgcaaaggactgtaaggagtgcacagcaggaaatgaaaagacagaagcagtggggccgagaggaggaaatggagttgctgaaatgcagggtgagcagcaggggcggagagtgccctgtgggtaaggcacacctcagaagggacaggtccaggccctctcctccctggcctggagcttctggcaaggcttttcttctctgagcctcactttcctcttttgaaggtggcaatagtaactgaacctgcatcacagaatggccttgagggttagatggaacatatatagacataatttgttgaagacagagtagcaaagacacaaagtaaaaaggacagaaaaaagaaatgcaacttgtgcaaaatagaactttcaaagatttacaagaagggtaaatgaagctatcgtagcttcacttgggaaaagggagagaacagatgaccagcaccaaggatagaagagggatttcttactttaaaaaaaatggtcccaaagaataaacaaactgaaaacagccaaaagagaaaggaagaatttgttagaatagggcaagactaaaggacagagtaagggtgctggccgccacctgactcaagttcaagtcgagctgccactgttgaaatttcaaggagaaatggtgagaagctaaaagatgcaaaaaaaaaaaaaaagtgggaaattatttgctaataatagattgcaagagtgtctgctttagaaagtgacaaggaacacttttggaaagctgtgagctgttatgaccactggcatccttcagttttagacaaatctaatctcaacaaggataacagaccatattaataaacaaattgatgggaatggtggaaatcagttccctatgaggagggtgcaaagttatactgattggtgagtcactcccagaataaacaaataatggtttcacacctcattgcttcattcagtgtggaaggaacattctaggtttgtgtgtaagtttggggagaaggagacagagccagagggcagagcagccctgcagccctcagttggcctccattttcttcccggtctgaagaaaatgaaacaaaggatttaaagtgttgcttgaagaatttaagttagacttaaaggagagatgtggtctttactctccttttggcaaggagagtttagtcatcagaatggtctatttagtgagactgtagcttgttcttctgaagtggtctttttaaaaactagagaactctcacctctctgaagtggttgtgtatgaaactgtttaaagccgaggatgcactcagtgacctcttcaggcaaccccagatttactcagtcagccatggcacacatgctagagaagtaaaaaaatgaattgagacttgttctgaaaactcttgagcaggggctcttaaaagttttttgtttaggaattatgtcagggttggggtctggagagcagataagtgttttgtgtgagaaaagtaaaaacttagttattttcttcccgtattcagtaatccttgcatttttttcctcctcctttatacatacatttttgccagttactgacttctctcttgtacacatttccgtgtcctaaattaaccaagagtcctcagccactaggattctattgacaagcccacaggtctggaggtgtgagtaagggcattcctcccccatgaaatcaggcagcaggggaggcgtttgggtgggtggaacagaggagcaaaagaccagaggacagagaagaaagattgcaggctagaaaacgggatggccacccctgagaaagaggacaagcaaatttagggcttagagtagaattgaagaaaaaacccagggcagaggcacaggaatgctgtaggactgaactgggaccatgattgatgtaagtggagatgggttggttgaatccgtggaaggccaaaggattgaggcccatatgggcctgggacagggcttactaaatgacttgctacctggcttgataatcgggacaacctcaggcagtagttattcaggcgggaggacacatgagtttgaatatagggagataaggtatatttctatatgccctggtacattccagaatgtgcttctctggctctgtgcactggagcagccaactcctgaagttgggaggggatcgccatggtttcatgagtggtttatttcagcttgcatctcacagtgtggtgttcagaggcataggctctaggctcccctggcagcactgagagatagaaactgaatcagcacaacttaggtccttcatgttgaatagtttgaacagaatttgatttaccctagcctaattgaaaaaaaaaaaagtagaaaagaaatcctaggtattttccctctggactccagaacaaatgattgagtgtgtaaaagcataaattctttttattcattcaattgaagtaaaaatttctttactcagccatgagttctaagactgcagtgggaattgtaagaggattaccatattttaaattggctattctggtgccaaatctccccttcattttacagtttcaggcagaagaccagcacggtagtcgggggaggggggtgggtagacaaatggtggtaacagtcctctacactctgggagggaaggagcggtgctggggacagctttcaccatggaaagaaagcagccgctctggagattgggcagcaggcttttgagcacggatgcggagcctgcttatctaatcagcagctagaggaagttgtttttatctgcgaaatgcatctcttctgaaccgataaaccccattttagctggggagaaatattatctagcagcatctgagcattagctgcagctgaactcaagcatgttcaaatgtgagagaagtctcaagccgagaactgtttgccgaacttcaagtggctggagtactggttttcaagttttcttttctttcttctttgaggaataactgaaagcatattatttggattcttgttcaccttgcttttttagttcctttcccnnnnnnnnnnnnnnnnnnnnnnnnnnnnnnnnnnnnnnnnnnnnnnnnnnnnnnnnnnnnnnnnnnnnnnnnnnnnnnnnnnnnnnnnnnnnnnnnnnnnnnnnnnnnnnnnnnnnnnnnnnnnnnnnnnnnnnnnnnnnnnnnnnnnnnnnnnnnnnnnnnnnnnnnnnnnnnnnnnnnnnnnnnnnnnnnnnnnnnnnnnnnnnnnnnnnnnnnnnnnnnnnnnnnnnnnnnnnnnnnnnnnnnnnnnnnnnnnnnnnnnnnnnnnnnnnnnnnnnnnnnnnnnnnnnnnnnnnnnnnnnnnnnnnnnnnnnnnnnnnnnnnnnnnnnnnnnnnnnnnnnnnnnnnnnnnnnnnnnnnnnnnnnnnnnnnnnnnnnnnnnnnnnnnnnnnnnnnnnnnnnnnnnnnnnnnnnnnnnnnnnnnnnnnnnnnnnnnnnnnnnnnnnnnnnnnnnnnnnnnnnnnnnnnnnnnnnnnnnnnnnnnnnnnnnnnnnnnnnnnnnnnnnnnnnnnnnnnnnnnnnnnnnnnnnnnnnnnnnnnnnnnnnnnnnnnnnnnnnnnnnnnnnnnnnnnnnnnnnnnnnnnnnnnnnnnnnnnnnnnnnnnnnnnnnnnnnnnnnnnnnnnnnnnnnnnnnnnnnnnnnnnnnnnnnnnnnnnnnnnnnnnnnnnnnnnnnnnnnnnnnnnnnnnnnnnnnnnnnnnnnnnnnnnnnnnnnnnnnnnnnnnnnnnnnnnnnnnnnnnnnnnnnnnnnnnnnnnnnnnnnnnnnnnnnnnnnnnnnnnnnnnnnnnnnnnnnnnnnnnnnnnnnnnnnnnnnnnnnnnnnnnnnnnnnnnnnnnnnnnnnnnnnnnnnnnnnnnnnnnnnnnnnnnnnnnnnnnnnnnnnnnnnnnnnnnnnnnnnnnnnnnnnnnnnnnnnnnnnnnnnnnnnnnnnnnnnnnnnnnnnnnnnnnnnnnnnnnnnnnnnnnnnnnnnnnnnnnnnnnnnnnnnnnnnnnnnnnnnnnnnnnnnnnnnnnnnnnnnnnnnnnnnnnnnnnnnnnnnnnnnnnnnnnnnnnnnnnnnnnnnnnnnnnnnnnnnnnnnnnnnnnnnnnnnnnnnnnnnnnnnnnnnnnnnnnnnnnnnnnnnnnnnnnnnnnnnnnnnnnnnnnnnnnnnnnnnnnnnnnnnnnnnnnnnnnnnnnnnnnnnnnnnnnnnnnnnnnnnnnnnnnnnnnnnnnnnnnnnnnnnnnnnnnnnnnnnnnnnnnnnnnnnnnnnnnnnnnnnnnnnnnnnnnnnnnnnnnnnnnnnnnnnnnnnnnnnnnnnnnnnnnnnnnnnnnnnnnnnnnnnnnnnnnnnnnnnnnnnnnnnnnnnnnnnnnnnnnnnnnnnnnnnnnnnnnnnnnnnnnnnnnnnnnnnnnnnnnnnnnnnnnnnnnnnnnnnnnnnnnnnnnnnnnnnnnnnnnnnnnnnnnnnnnnnnnnnnnnnnnnnnnnnnnnnnnnnnnnnnnnnnnnnnnnnnnnnnnnnnnnnnnnnnnnnnnnnnnnnnnnnnnnnnnnnnnnnnnnnnnnnnnnnnnnnnnnnnnnnnnnnnnnnnnnnnnnnnnnnnnnnnnnnnnnnnnnnnnnnnnnnnnnnnnnnnnnnnnnnnnnnnnnnnnnnnnnnnnnnnnnnnnnnnnnnnnnnnnnnnnnnnnnnnnnnnnnnnnnnnnnnnnnnnnnnnnnnnnnnnnnnnnnnnnnnnnnnnnnnnnnnnnnnnnnnnnnnnnnnnnnnnnnnnnnnnnnnnnnnnnnnnnnnnnnnnnnnnnnnnnnnnnnnnnnnnnnnnnnnnnnnnnnnnnnnnnnnnnnnnnnnnnnnnnnnnnnnnnnnnnnnnnnnnnnnnnnnnnnnnnnnnnnnnnnnnnnnnnnnnnnnnnnnnnnnnnnnnnttaaaagtgctgtcagagtagatagataacattttctgttgccgggtttttggtcccagttttattttctgccttgttccatctgtgttgaaagaatagttagctctgtgtataaaacaaccaactgacatttcgttaactttccttctacatggggtttcagaaagaaatggggaaaaaaaggctggggggttgagctgtggttgccagttgccacctgtccccctatctggttagggcattttctgatttgggaagtgtaaatataacccagaaaaaacagcttcccctccttttatgcaaaagtagaaaggcttaaacagagtacagccttaacattgccccggaaagtttccacagaacccgttagactaaatgaaagctcttgctctgggggagtgggccatgccaggaagctgccctaccaagccctctcttgctggcaaggcagggctgggcctgggctactgtctcccaccagataagcccagctttcttcaaggccctaacaggaacctacatttcacaaattaccgcagacatgctcacaattttaaactctttgcctgttaggatcagtgagataacagaaacttatagggaactcagaaagcatgctccggtgagcagtgagccacctagaatcagccaactggtaatatgcggaaaatctgccaggttgttggtaaacttttggtagcttgaagtctaccgtggttgggagtatttacaccacagaaatcggtgaacgctgcaaatcaaggctttttctttttgagagctggtttatctgtgcaccactagcttaaatacacttttaatgtcctgacagctgaaatttgacagtgaaatttgaaaggaggaattcttttgggtagggttgtgtgtgtgtgtgtgtgtgtgtgtgtgtgtgtgtgtgtgtgtgtgttgtggaggaggagctgggaaagggtgaatctattggggaggactgtggggtacatataatttgtccaacagaagagttggttccaaatgactctttgctgttgaagtcacaaactggaaatgttggagcaactagactctccatattctaaacaaaacacatctttagcatttagtttggttgctgggggagtatgattagaaaaggatttggccaggcatggtggcttacgccgtaatcccagcactttgggaggccgaggcaggcagatcatgaggtcaggagtttgagaccagcctggccaatatggtgaaaccccatctctactaaaatatgaaaaaaaaaattagctgggtgtggtggcgtgtgcctgtagtcccagctactgggaaggctgaggcagaagaatcgcttgaattcgggaggcgggggttgcagtgagccaagattgtggcactgtactccagcctgggtgataactccttctcaaaaaaaaaaaaagaaagaaagaaagaaaaggattctgtgtcttatttatgagctattatgctattgctgttatttggggctgaatgatttttatttggggctgaattatttttaaatgtaaagcaagatgtctaaattacattaatatgttactaaattactatgatttttccagaaaaatattagcccatgcaatattctttaattcctgtgattaagttggtcttctgcaaagaaatttctgttgacttccttagattaaatgcagccctgagataggtgtgcaggtccaggaagtggcctgtgcagttctccctgtgcctgcaggggtggcttcttgaggatactttcgcagtaagggcttagcaatatgcgcatgtctaaggagtctatcagaaaactacctccactgtggaagggctggggattgtatttttgtgctttgaagcacctgacacttgctgtaactccattaactgaagagccgtttggtgccctaatttcaggagtgagttcagctgcagggatctcagagagacaggtctagggtgtgtctccgcaaggcctgctgccaggagagtacttcccccacaggggatgtggctgcaggctgtcgatttccactgaaatcaccaggagatgattctggtgaagccctgaacatccggtgtcactcctcaccaggctgggtgtgatcgatggaaggccttcagcatggccccctgctgcatggcagagcccagtggcagatgtggctgttctctttttcagagtgaaggactgttaccctagaagtgaaatcctgctgaaatgagaaaagtgctgttattatatttctacaggcagctatatgatcatttttattatgattcttggaacctggcagaattttgactgcttttgcaatatctctgtgctctccagttgaacttggtggcaataaaattaagaatctgccagtgccccccaagcatttctactctgtccataatgtttagtgacaattaactattaccaggtgtagccacccttacttaatcttagtgttatggtgcaagtaatccttagtgaaattattgttctgtagagaatgctgtgatctaagtgaagtgactttcatcctgagatgacaatggagttgtttttgtcactgtaaaggctgcatttactcgcagttttaaagcattattgctacttatatatggtctcaacactgatttttatatttgactttgtagctttaagtgtaaaaatttctgttaaggttttatatgtgttagttaatttttcccatttcaataaccatgttttattattgatggagtctcctaaaaatatacccttaaaatctgcttgccctgtgcctgcacacatattttaaatgttgggtatggagtcttttttttttttttttttagacagagtttcactctgcagcccaggctggagtgcagtggtgtgatcttggctcactgcagcctccacctcttgggttcaagtgattctcctgtcccagcctcccaagcagctgggattacacgcccgccaccatgcccagctgattttttgcatttttaatagagatggggtttcaccacgttgaccaggctggtctcgaactcctgacttcaggtaatccacctgcctcagcctcccaaagtgctgggattacagatgtgaggcaccgtatccaggctgtatggagtctttctaatcaggacataggcagacagtcctagcccagctttatgccttatgagacgcaacaacgttgaacagtcattgtttgagggacagaggttttacagatggatgataactagcatctgtggaacattatttgtgaaatatagaaatcagaaattccagcgtagcactgtccaaggggaacataatttgacctgcatatttgctggtccatttttagtagtcacattaaaaaagaaaaatgacacaggtgaaattaatttgaatatattttcttaattcagtatgcttaaatattatttaagtatgtactcaatataagcaattgttaatgaaatattttactctttttgaactatgtgtttgaaaccccggatgtattttttttttatcttcaccacacatttcaatttgggttggtcacatttcaagtgctcaggagtcacatgcagctaggggttacctattggacaggcaggcagatcttgagagctccaaagaactgtgtgtcattatattgtggaaaaaaaaaaaactttttagattaacccttgttgaatgttagccaaagactagtcatttatcaactctctaaaagtagtttttaaatcaatttgcttttcaaaacattttctcagtgttgtcacaaatgtatgtgaacatctgctttttaagtctttcattttttgcccacatttgatgtaaagaaaatctaggtccagtccaattttaacatcaattgggtttattttatgtagctgtgttttaagtacaggtcttgtacttgtaggcattttggttaagtacaaagtaacgagaatacaacaacatgtgaacatgtcaaacaaatcagtttttcaaagctaagtagctgaattaaatgtagaaaaacatgacatttaatttttgtcttcatcccttcattgtattcccatgtactctatggtaacttttttaagttgggaagtcctctttaaatttttgaaatgaggtagctgctttatagacatgaggcaggttcccagagagcgcccttgaggacaggctgtaagtaaactaagctgcaaagacagacaccatcacaactatggaattgttttgcaaaaattgtggagagtgatgccccttgatacttcctaaaagatgcttttgcaacctgataaagcaaccgaggagaggtggtgaaggaaaggcttttttttttttttttcaaagagagaaagagaagcagcaagctgcctgcctgcagcctgagaaagcagttccaccttggcacccatgtcctcatagcccaagcggggccaccctggcatgtgaatctgctccgcagtgtgcagcccaaaccccagccttcctgtgaaagggacacctcctgctgctaaccgctgctcttcctgcagttcaggagacagcgtgtgctcctgtggcggctgcatttcctgagtacaccatgatccaaaaaggcacagattcgtcatggaagctttgattgggccgttactgtcttttgacctttcttgtttgcttgcccttttgtttctttcctcctttttccttccttcctgtctttcttcttccttccttcctttcttcctttttctttttaattttcctcctttctctttctcctttctttccttccttctttcctctttttttctttcctccctccctccctttctttcttnnnnnnnnnnnnnnnnnnnnnnnnnnnnnnnnnnnnnnnnnnnnnnnnnnnnnnnnnnnnnnnnnnnnnnnnnnnnnnnnnnnnnnnnnnnnnnnnnnnnnnnnnnnnnnnnnnnnnnnnnnnnnnnnnnnnnnnnnnnnnnnnnnnnnnnnnnnnnnnnnnnnnnnnnnnnnnnnnnnnnnnnnnnnnnnnnnnnnnnnnnnnnnnnnnnnnnnnnnnnnnnnnnnnnnnnnnnnnnnnnnnnnnnnnnnnnnnnnnnnnnnnnnnnnnnnnnnnnnnnnnnnnnnnnnnnnnnnnnnnnnnnnnnnnnnnnnnnnnnnnnnnnnnnnnnnnnnnnnnnnnnnnnnnnnnnnnnnnnnnnnnnnnnnnnnnnnnnnnnnnnnnnnnnnnnnnnnnnnnnnnnnnnnnnnnnnnnnnnnnnnnnnnnnnnnnnnnnnnnnnnnnnnnnnnnnnnnnnnnnnnnnnnnnnnnnnnnnnnnnnnnnnnnnnnnnnnnnnnnnnnnnnnnnnnnnnnnnnnnnnnnnnnnnnnnnnnnnnnnnnnnnnnnnnnnnnnnnnnnnnnnnnnnnnnnnnnnnnnnnnnnnnnnnnnnnnnnnnnnnnnnnnnnnnnnnnnnnnnnnnnnnnnnnnnnnnnnnnnnnnnnnnnnnnnnnnnnnnnnnnnnnnnnnnnnnnnnnnnnnnnnnnnnnnnnnnnnnnnnnnnnnnnnnnnnnnnnnnnnnnnnnnnnnnnnnnnnnnnnnnnnnnnnnnnnnnnnnnnnnnnnnnnnnnnnnnnnnnnnnnnnnnnnnnnnnnnnnnnnnnnnnnnnnnnnnnnnnnnnnnnnnnnnnnnnnnnnnnnnnnnnnnnnnnnnnnnnnnnnnnnnnnnnnnnnnnnnnnnnnnnnnnnnnnnnnnnnnnnnnnnnnnnnnnnnnnnnnnnnnnnnnnnnnnnnnnnnnnnnnnnnnnnnnnnnnnnnnnnnnnnnnnnnnnnnnnnnnnnnnnnnnnnnnnnnnnnnnnnnnnnnnnnnnnnnnnnnnnnnnnnnnnnnnnnnnnnnnnnnnnnnnnnnnnnnnnnnnnnnnnnnnnnnnnnnnnnnnnnnnnnnnnnnnnnnnnnnnnnnnnnnnnnnnnnnnnnnnnnnnnnnnnnnnnnnnnnnnnnnnnnnnnnnnnnnnnnnnnnnnnnnnnnnnnnnnnnnnnnnnnnnnnnnnnnnnnnnnnnnnnnnnnnnnnnnnnnnnnnnnnnnnnnnnnnnnnnnnnnnnnnnnnnnnnnnnnnnnnnnnnnnnnnnnnnnnnnnnnnnnnnnnnnnnnnnnnnnnnnnnnnnnnnnnnnnnnnnnnnnnnnnnnnnnnnnnnnnnnnnnnnnnnnnnnnnnnnnnnnnnnnnnnnnnnnnnnnnnnnnnnnnnnnnnnnnnnnnnnnnnnnnnnnnnnnnnnnnnnnnnnnnnnnnnnnnnnnnnnnnnnnnnnnnnnnnnnnnnnnnnnnnnnnnnnnnnnnnnnnnnnnnnnnnnnnnnnnnnnnnnnnnnnnnnnnnnnnnnnnnnnnnnnnnnnnnnnnnnnnnnnnnnnnnnnnnnnnnnnnnnnnnnnnnnnnnnnnnnnnnnnnnnnnnnnnnnnnnnnnnnnnnnnnnnnnnnnnnnnnnnnnnnnnnnnnnnnnnnnnnnnnnnnnnnnnnnnnnnnnnnnnnnnnnnnnnnnnnnnnnnnnnnnnnnnnnnnnnnnnnnnnnnnnnnnnnnnnnnnnnnnnnnnnnnnnnnnnnnnnnnnnnnnnnnnnnnnnnnnnnnnnnnnnnnnnnnnnnnnnnnnnnnnnnnnnnnnnnnnnnnnnnnnnnnnnnnnnnnnnnnnnnnnnnnnnnnnnnnnnnnnnnnnnnnnnnnnnnnnnnnnnnnnnnnnnnnnnnnnnnnnnnnnnnnnnnnnnnnnnnnnnnnnnnnnnnnnnnnnnnnnnnnnnnnnnnnnnnnnnnnnnnnnnnnnnnnnnnnnnnnnnnnnnnnnnnnnnnnnnnnnnnnnnnnnnnnnnnnnnnnnnnnnnnnnnnnnnnnnnnnnnnnnnnnnnnnnnnnntggtgtcagcactccaggaacacatgggatccccgggaggtggaaattgagccgtctttggagaatcagctaatgagacagatgcatgttaaatgtctgttgtggcccaggcactctgctaggcagaggggtgaaccagaagaatgagattcatggggccaaagaatttgccttctggtgtaagaaaagatggaggcagcttggcagaaagaaaaaaaaggtaaaagatagaaatgaaatacagaataatctatctcctcatcccacaagcaattctgcctggtttgtggctcacgcctgtaatcccagcactttgggaggccgaggcaggaggatcacttgaggtcaggagttcgagactagcctggaccacaaggtgaaacctcatctctactaaaaatgcaaaaaaatttagggccgggtgcagtggcagttctgcctggtttgaacatctggttcagttaaaatacttcatgaaaatatttagcttgatgcactgaaatccatcactgcttttgtgggatgcactgactgcagtctgactgttctcctagtggaaaggggagcaatagcttctgtctgcatgtgcatgaaacagatggaaatttagaagagattctagtgcagacaacttcatcccacccccgctgcccacagagctagccatgtgcacggtgtgtttgaacaatgttatgttgctgctgtgcacagagatccccagtctcataaaacatactggatggaaggctgtcgagagatcatcaggccccagtgcataagttcttcctaagcatccttaacaggtgatcacctcgcctattgagaaccctcaggaggcagcccacttacggaagcactgattgttacaaaagccctgaactaaatctgcttgtctctaaagccagccctgcagatgtctgcagtgtaactactttctcttctctcaagcagttcagcccttcaaatcattgacaacagctctacaaagccctctaaatagcccgttctcctggctaaagtgtgttggtttcctcagcatatgatgaaataaacaccatgatgcctttgccttgctttttcttgctggtctcactcttccctggcattcttcaatgtgcccaagtccttcctagaacattgcacccaaagggccttcctggtctttccagggaatgcagaatgaaaaagaaatcccatcccctgcctcgaaaggagctcttctgtgtgtaagtgtaccttccccctcagggcataatgggaaacagtttgccaaagctaactgtgtaatttcacatgactcactgccgttagtctgagaaagcatggcatattaaactcattttccatgcttcccaactttatttactattccatttctgaggggcagagagctgagcaggaataacaccttccttgctcctcctaatggggcacatgtgcacatataaaattgtgttcgatctttgcagccacgacccatgttaactgtcaactgagaactcatgagtcagtttctcaggaacagccctgaagacattatctcctgcatcttgtatttgtgcctttgatatttggagggaagggtaggatctggcaattatcgttatctcatttggttcagtgtatttcatttcagcctgttaagatcttttggaaatactgtatgtgctagttacagggacagtgataaataagacagcattcctgtccttgagatgctatttccacagctccatgagatgcctagttaaaaacagagccttttttggaaacagcctactaatctgttaaaataataatggaaaaagataaagttagcatacctgagctgcaagggctgcctcctggtctgatctctgataaggatcagatcctagagcctctgagatccctgtcctccctgtctgcacaagcactcgcagaaggagaaacagtttacggtggttcatcatgactttgaaccaagcttaaagtcaaagtcatactctttaaaccattggaaaccaagtttttgcgagttgcctaaagtgggcaaaaatcccacaatgcacctgagcacaagcaggaaaacatgccattgtctccccaggagccctccttgacttctactttactttatccattgacactagtcttataagtagctttgtctgtccaatttttaattgaatttcgtttttattttcgtgagtggaaatatcactttgaaagaaatcagtcctctcctgaaatccagaattcctggagctcagtttacatgtttgacgcgtgtcacatgattccacaagtcactcaagggcaggaggattaccatcgatacggaaagatttcttagaaagcttaagtgaaagggaaaccagggagaaagtgtgcttcgtgagaataggtatgcggacggctctttgtgacgctctgtgcaaccctcgtgtttgcattgaaccaagctgtgctgcagatggacacccatcccatttccccgactcataccagggaggcccactttgcaaggtacacagaggggaccacagagcagggggccatgcaggggaccaagggacattttagtgtaaccaaagtgtgaagtatgccctttatttcaaaagaataaagaaaatcacaggttttcccgctgatatgccagggacatttccaagagaattccttttttgagagaaatctcctttgatatcccatcagtcagccatactgcataattgttagatagtgaaagaaattcattttttaagtttgtcagaaaaataaattctttgaagtcttaaattgttgcctccggacatgacatatctggctcttccagaatccatgttagtcctagctgaggaagaaggagaaggagaggggcgtttgttgattattgattttgtaagatgccccacacgttggctattagcagaattctcacttctaaaaggaaaatgagtgtgagctatgttcaatgagaaacagttatttttgggacattctttgaggtaaaacacctccttaagatgctgcttccttattgctatgggaccaagattagagcaagaacatagtggttttcagaccctggacatcatccacagccgcagcagaggccctgcccacttgaacaatgagacaggccaccattttgtttcgagaatgagcaaagtgaaccaccatgccagatattgttaagtcagcaactcttctgaagatggacatagtaaaaaataaacaaacaaggcagcacttgagatggtcatggcagagcaatctcaacaagcgatttgttattttgcacagtgatgtacccactcattgaataaaatgcaccagaaccatgcactacagatgctaaggagagttgtccttcaacaaaggagataggccccactggccgtggggcagtttatgttatttggtccttgtcatgggcaggcatggccctttctatgcttcacagatgaggaaggtccctggcacaggtccagtctccagcatggcctagaggtggcaggtgctacttagcatcgccagcctcctgcttggtcatggggtcagccagtttataacacgaacggaggttaatgaactgatcttcccatcgcacaactggtatgaacccacatcttctgattataaatcttttgctctttaactcttagtcattaccactgtctagtgtaggcctgtgtgttcatggcctttgttgccaccaaaagatcaactattagctgaataacatactgagacatgttggtgttgtgttctaaatagcactagtaaactgttagggaaatctgactatatagctactatccagtctagtttttcttgcgaagtgtttgttgagtgtgtaatgaggagtaaggaaggtgaataagaaatggcctgagtctttataaaataagcaaggagagaaaacagttttgatgagaagcgcatggaatttttagaagataggacgtgtattatgtacctataagaatgggtaggattttagaagagatggatggggaaaaggaacagggagtgggaacaaaacgtggaccaaggaagagcaggtttagccatggaagcctcaccgccggctttggtttatcgtgggccaaggggacagaccctgtggggagggctggcagcagggaggtcttccagaagtctatcctgcaggcagtaacagccacccagtctataagctgagtgggcatgggggtgatggggaatgggtggggagttattggggtaacttaccccaaaatgatagctagctggaaccatttattctattgcattttatcaataaatcttataggaagtaccatcctagtgaaaaccctgtcacattgagggcattcgtgcttatgttttaaaacatgttattgggtctatgaaaaataaggctgaaacctatgagcaccctccatgcaaagtttcagtcaagactttggaaacaagacagtgtcttactcactttataaattcattcagaaagccgtaggtttgaaaattccaaacttagatgtaagaagctctgagaaacacatgaaatcacccccacatcagtagagatgtctcagcagacatgggaagaggggcagcagggtgtagggaggtggggcagccccggggtgggccttgcaggctgggcttgaatcccatggccaccaccgtccgctgggaggcctggagccggctgcccactctctgaccagcacatgttgatgctgtatccttgaagggaccgtggtctgacatcctgtgatgcagacctgaatccagcacccacagggtctgcacattccctctttgaggtggagcccagctccagaggctggtccctgactctgtttctcaagaagcctgtacagatgttcccctcaccactgtttccagtcacctttggctttcacggtgcagatgctaagtttgattttcagagcccatctgggaatttagtgaactgaacaggtagcatttctgaacccacccataacccatgccctccccactgattttgaaagagagtttgctgcaggtgactttgcagctgggtagagaatcttggggcaggattccgaggcaggcagatgagtgaggataaattgggttctgacggcacgttacaccagtggactctaacgacgacctcacctcgtgcacagataattctgccttgtgcttaaccgttagaaatgtgtcactgaagtgtgaacatattatgctgttagatttcccatcatttctgttctttcattccctctcatttgcattggttactcataaatgtagatctttggtatgatttgtacaactgccgggtgtcaatctgtgaaagaaatcgcagagcaagctgggctctggtagcgctttatccctgcgtgctggcttgcccgggttgactcagaggcagtctcacattcagctgcgctggggccaaggacccagggagccaagtgtgcttctgttttctgtatttagcaatttaagacctgcgtttaaatactagctatgcattctagcaaaagaggtttatattttaacacagtaactcttaattgtttaattcagttcgtgtgttacctctcggaataaaatagtggaagccaattaactatagacttcattagtttggatttaagatcaccaaaacatttaccacatctcaattgttcattacatgctctctcttttttaatgcagtttttataatatggggagtgggggtgtggatttaaccattatatttttatgatattgggagtagatttaaccattatgtaaactggattttttaattttaaaaagtcacttatcttgatgtaaaatcatgtcttagtaaccttgataaactaagttttgcatgattacaccttaaggttaaaacatatttcatttcatcatttcccagaaggggcactgaattcacccatttcctgtttttcatctcagaatgttctgtgtttcctccatatctactttcccggcagcaggaccctggaagcagtcacaccaacctcatttaccccacctgagatttgtgtgctttgaacatagttgcaatcaaatcaacaatatctttgctcagaaatggatatgtgaagtaaaatgtgctgccctgttcatgtatgaaatcattcagctagctggccagtgagcccttcattgcaacaaagatttttctagagcccctgcactatctggggctatgtcaggcctcacactcctgctcacacgtttggaggctaccttggccagtattaccttaatccagcatttaggggaaggagcatttcaagactaaattttctaaactgctcaagcctacctcattttatttcttgtgtattttaacacttttggatgaggactcttcctagaacctactaacaattcccccccgcccccatgccaagattctttaaagactttcttgaaaacgcttcagtcttttcttcttagctcaaaagtactatcctaaatactagctctggcattacagggagttaatttgtgggcacacacagtaaattataaaccccttaagcagagaagattgtattatcagtttattagttttcttattcattccttcagcacacatttctgttgcctccaatgcagcagagaaattgacttctacagtttccacaacagtccagatttcaactgtgtagtgctctttcagccagaaagtacacttgtgtttccctggccataggtcctgaacctcacttctgaaaagtcattgtgcatagagagctaatagctgtaccctaaatgatcctggctttgaattctcttatctgcttggatagtattatctgtctcttcctctgcattctaatttgctacttctaatctgctgggaattacaataagaaagaaccatttaatcatttttacaactgtgcctaaagagagtgtgtgtaagtgccgagagagtgtatgagggacttgcccatgagtaaatgcatgaattttaggtcaagggttttttgcttctcttttggttgattacctcagagatcagttttactttctttctcattcttgacctatcatcactagctgatatggatgatgtgtacaactctgagtaagaataatnnnnnnnnnnnnnnnnnnnnctgagtaagaataatgtcaatgggacgggatgggattggctggtgattctgttgatcttaaagtttatatattttaagtttagtgtttcagaatgagaccaaagcggtgacattttcaacctcttcggtctctcttcagttttttcattttaagtttttgttgtgcttctatcacttaaaggaagcctccaagttgaaatcaaatactaatgacatttttatctaatgtataaatgtgtttttattatttattaggaaatttattttacttggccctcagccatgacatatcatggcataatcactatcctaaatttgtatatcttatccttgcataaggtaagactttctatgaattacacatatttgtattttcctctcttacatattttaagaatttttttatactttgttttctgcaaatgaaatattgctcataagccaggtgatggctgtccacgcctcttttcccctgcttacccttgcttagatcttatggtagaatcttttcatagaagacacagaaagacatgaaagaaagagctggagaagcctgaggggctgcccagtggtctgctaggatgctgtgccacagcccaggcacaggaggcagggagagcaatggggcccttcccttccaccaacattcagcagaatttgcagctccatgtttccaaagcttccagggcacttgcatttagagagagagagcaagcaagctgcctttcctcttcctcagttctgccagccacactcttgccatgatgagcagtttcagccaaaagctccttcccctgccctaacacctcctgcaaggcctgaggtctggaagccacctgcgcctgctggcccctcctttcttgtttctgcaatggatgttgtggccctgtgagggagaagagaaaaagaagttgccctcctccctctatcctcacctcctgccatgctgtcacccttataagagagaagggctaaccatccaggctaatcctccagtgatgcaggagaggacatcctggccggaagagtcagagcttccaggtgagctcaggtgggtcagcccccgaggctgtgaagagcccaggggccagtagatgccacttttgctccaggaagaatcttcaactgtgtcctttttattcaaggggctctcttttcagcgaatctctagatgtactagtcacaaacactcgcatttattaaaatgtatccatgatcccacaatccttttacatatttctctccaggagtatcacatttctgagggccctgtgcctgttttctgcaggaagttgctgttgtcccgggtccccctgcccccagcacctctgttacaagaagcagacccttcatgccacactgggacccaggcaggccccaagccaggatgctgggatcttagtaaaggttggaatgatgtcagaacatagaggaggcagaattccccccatagcatcatcctggagggcgctgatttgtgtgctctgccaggttcatctgtgactcaggatttaaaagccccaggtgtggtgtcccttctgtgcctgcaaggtgcgtctttagcagttctccctggtgtggaaggatcagtggttcttgcagcctaggcaccctccacagcaagcccaacacaggtgctgtgagcagctggttcatgaacggtgatcctggggagaagaggaggatgaaaatggaaaaccagtgcaaaggtgtgtcatccagttggttactgctgtgggtgcccgggcttccatcccaccagagcccccactagccagggcagcctggcggaggtgagcatcattctgctttctggctgcacctgtgtggacagagcccgttccaaagcctcccaggcacagggcagacatcaagcaaggggcagagctggggcgagggctctgggtgcccccgttattgaacacaggcctgaagggagcctaagaggtggctggcaggagatactacaaggcagaaagacagggcagcagtctttgtactgtacgtttttgttttttaagagagaacaaaaagtcaaggttgagagatgagaaatactcttgccaaaaagagaacaccaaaatcctggagtcacgggtcttccattaccctctctagcatttctgcttgtcttttccctagtattggtgaagaatttttaaagtaaccaacccataccgttggttacaggccctgtggtcaccaggctgtctccccatgatggggatggagagtggttagtgcagaaacttagacctcccctccagcttgttgaatgccctgaagtttatctagaagggaagatactcaagcgtaggatttcagtgatgcatttggacagcatcagtactatgcttcagcgtcaaaaacgtcactttgggtaggaacaatacataatgcgtggcaatgccttttgtgacacctgttcaggagattcccataggaagcttctgaggcagagtcctcaggtgaggagggggacaggcctgggtcttgggggaaggtggagatgaccagcctcatgcctctctccccagtggcctcagtctccatcaggcaaatcttgagaagcctcctccattctgcaggcaaatgactgagatgtgtgagctctgcttcccaacaggcggaaattcacatggggaagggcacctgtgaatggccttctagaactatcaggaagttctggatttagtaccctgtgagagcagatggtcctgggtgcactcggatgatcctgcctagccagctggattgcagagtggtcatcattatcagtgagctattgaggggttgagagcagtcagtgtcatgtataaggatgggttggggtaccggccaacgcccgccttgaggcctggccgccggatgggaggcgagagcacaagagagtcctggctaggtgtgccccgctctgcagggccacaccatccactggaaaccctgtgcccactgggctgcgtgctaagaggctgtggccaatgctcttgtccaaattttactgaatctgcagtctctcttaattcactccaaagtttaatgtgttagcttgcgaataaataaataaataaataaataaataaataaataaataaatggaaagaaacagtcctcagaaagtcccagtcaaattttaattccaacagatattcagcagtttcctctaagaacaatgagagttctggggctagccagtgtttctcttggaaaataaggaagagggaaagcggtgcattcatttaaaaacctgccctagggaggcagcgttccctgtgaactccgaggccacagtgagcagagcaggctggaggcctcccggctgtcctgcccctcctgccacatgcctgtgaaaatgctagataaggactttttctcagcaacttccacgctccttcagtggggatgtctttgactcagagctctgccactggttatctccacgaacagaaaatgccacagatgggttaattcactgtgttgttctcattttccctcagtttcaggcttttctctccttgcctgttttcctcgcttaaaaaatgatgtgggggtccctaaacgcatctaccccgatagatttatgttttcttttccattagtccactttgcgtctcagccctaaaattaagtttttgattataatgtaaggaagttttaccatattttaactctggctttttaaatacaaaagaaaaataacagaatgggcttctagaactatcaggaacttctggatctagtaccctgtggggacagatggtctggagccagcgcacttggatgatctctctcagccatctggaccgtagagtgaacttgttactgtccctccaaggctgacaactatgagctcatactcttctagcagtttaatttagacccaagaaaggctgtgtgtgtgtgaatttgtgagagtgtgtgagtgtgtctttgtgcctgtgtttctgtgtgtgtctgtgtgtacatgtgtgtctgtggggtgtgtctgtgtgtgcacggctgtgtgtctgcgcgtgtgcatggctttgtctgtgtgtgtgcgcacgcactctgctaagctactcaatgcaattccttactcttacttccctttctgtcacttctccataattctttgtatttcggttgggctggtatctcgcggcggcttcctcttttcctgcattcctatatttcattatttgctcttgttcctcttctagggcttttacaatatagccaggaggatgtggaaacccagttacaagatgacacacaagcacagtgtcacaatcgctgtgcttgggccctacctcctggagaccagggtgggacggtgtctctggatatggagggaagggcggaagatcacggggtggcagaaggcccgactgtccggtcttctggaagctggggtctcgtggtcgctgggctggtggtgctctaaaacctagagtaaccgagagcaggatgactgcacccctgactgccgactcaccgggcttcggagggccatgggtgtgtgattccacttgtgatcctcctacttccccagcccaccctggtggtctcccacttctctctctctgcctgtggagtgttataaccgactccttcttctaggcatctccatcccaaccccagaccagttcccttaaaccacctcccaccacaggacccccacaagcagggacctctcacagttcctgttgcctggggacttcatctcagcttccaaggcctctgaaaccaggccctgcatcctgggcatgactgtccccatgattctctgagccagccannnnnnnnnnnnnnnnnnnnnnnnnnnnnnnnnnnnnnccacccccccaccgccaagtccactgctgaccctgctgtagccccccacctccacttgttgagattccctcttcctgcttctcattttgaatgtcacccttctgtgacttctcacaacccccctgccacccctccctccagttggcatggcttagtcttcctaagaacatgtgctgcttcccagtacccagggctgctgtgcaccgtggcacgtgagtttcggtgcatcttcctcctgctgtttatagattgcaacatccctggacagatcttggattttccctctataatttctctggagactccctcggggtttgcacacacatctgtggaatgcccaagttggagatggtcctccctgatgtgtagtgtgggctattcagagggcctcatttcataaactcattaacagctaggacgcgaagacttggagaagttagctcaggacacacggagtgggagggaggcaacgagttaagaaatgggctttggagtgcctcgaatttggcctccacttttcttttctactgtcttacctggtcttaggcaggtcgggtgaccatctggagtcggagtttctctcatttgtaaagcgggggtgatatttttctcacagggctgcttcaagggttaacaaagttaatgtctaggaaggacatagcatagcaccttcacctggttgcaagcccctggagtcacatggcaacagctgtggaaccaggtaaatgacttgacttacatgttacacgctcttagttgttcgatttgtaaatgggaagagtgtgtgacccaaattagtcgtttccagatatttcctggtaaatggttgttgaatcataaaactagaaagatgggaaagaaagggaggaaccccccttacttcgaagaagtgttgttgatgtgaaggacaggactttttgagacactctcatcctaagaaacagctgatatctactaggaaaaaacatgacatttgaagtttcttcctaagagatgtgaggttttgacagaagtgccaggaagccagaggtgtgtgagtagtgggccaatctcacgtgaaggctgtgggacggggcaggagaggggcagccagcatttcctgagcgccagctaatggcggggacctggcacctttgctctgtgactctccagctgtatggtgacatgaggctggcgttttctttggtttcatacgtgaggaagctgaggcttggtgatgtcctgtgcatggctcggactccagagctactcagaggcagaggccgtctgtaaacaccttcaggtggttggaggcagggtgctgcagccaatgctgatcactcacaagccaaggctttattgtaagggctaaataaaataacatatgcctagcatttatacagcacggggctttttaggaaatagtgagacgaccatggagaggtggaggaagagagaagggaaagaagaaaaagaaaaaaaaagccttaaagagtttcttaagagaactatatattacaaagtccttggagtttttttttccctggttagacataagtttacatgaaacgttaaacggcttaaagtagccacatctccttccttatgtcttctcacagccacttgtgagtttcttatcaagatacagaattatggccaagtgcggtagctcacacgtgtaatcccagcactttgagagactgaggtggaaggatcatgtgtgctcaggagtttcagaccaacctaggcaatatggtaaaaccctgtctctacaaaaaaatacaaaaattagctgggcatggtggcatattccaatagttccaggcactcgggaggctgagacaggaggattgcttgagcccaagaggtcaagactgcagtgagctgtgatcgagccactgcactacagcctgggccacagagcaagatcctgtctcaaaaaataaaataaaataaaataaattctgcaacaagtcacaattccttgctcagaaatctctacaggtgtgcttctttgttaagaaatggaggaaacatgaatttcatcctgacttctgagtcttgtagagaccagatctgactcctgcagccttctgcccacagagctggcaggcgggggaatgtgcgcagagtgaggaggagctgatctgacattccgaacagtggagactgctgcctatttggccgcaccactgtccttctgcatggaaaagtcacagtaaataatggactctctacctgtgagtcgattttactgagctgcctttttaaatatatgtgtagaaagggcgatctctgtgtgtcatttgcacatgtacatacacatgtacacacgtgcacacgtggtcactcatgtacacatgtgtgtgcaccagtgcaccagaccagatgcacccacccaattccacgctcctcagccccttgctttcctctgcagacagccagttcagctacagttatgccagattgcctgcactctgatctttaccatcaccagactctcagcttgagctcatgcctgagaaatccactttctgggaggaaggcagaagaaactgccaaggcaggactgaagacttgacctccacctgtagtggggtcaggtcaccagaggctggctgactccccaggatttctcagcagagtattacacaaataccccttccttaaagattagcaaccacttaaagacacaaagtgtgcaggactgtacccatggccgagagcggcgggattaagagggcaactgagttgttcttcccatccctcctcctctgtgctgagtcaccttctgcttggaattctgacagggacccgttgggcttctggaagggagggacagcagaggatccaccctctgtgtgtcctgggggagattacttatctctggcctccctgaagcagggcctgggcttctggaatctttgaggctgacaccctgccagccctggggatgagagagaatggccgtgtctgtctgcagagcctgaggaggagctgagcacagcctccggagttctcttcagttgatcgcttaggtggacaaaggccacagaaatggatttaaactcctcagccctttctttgcatgtttgttctcatttgaagtcagaagtgatatgtcctacacctcaagaacgtgtgaaatgcacatacaataaccccatttcaggaagccaagtccagcttaacagtcaaaacatttccttcagtctttagtccttcactttgccgaactcccttttacaccggcagcaacagtttaacctgttgcttctgtaagagtgtgctactgggaaaaccacatctaaaacacgtgtgcagttacatcagctagagcacatgctaaacagttgatcaaaggctcttgccttgtggcccacgctgcagacactctgacgactgcagagctccgcagccccacgtcgtcccttccgcactgcctgctgtgcctctcctctccatgtggcagggaacacagccagtcatcaccatgtggctctgcccggcgctgccccagcatgtcctgacagggcctagatatggaaaggtggctctccatgcacacaccccaagcccctcctgcccgccgtgtgacccacactcttatgggcagcccagttattttgtagcatttcccttccttatcattttggcccagtgatccagcacaaatctcccttattagaataaaatttggaatgacaaaattaaatttcatttttcacttatattgaggacctcacactcttcacccctgccacgatccctgacaagagccttcctatctaatcattgttcctccagccctcttagttttcttcagcctttcttgattgcctgaatgtccctttcccttctccttttaaagcatgaaccaagctttcttaccccgttctcattatcatttttgcattttcttctttgcatatgattctccttaaattataaaacttgggggtaatttctagaggtgccatcatagtgcttctgtctactcagtgtctttagaatcagcaaatatcatttttacaaaaaagtagtatttcttccaaaaaagagtaagcaagaaggttacaacactgggaaaatatccctaagcctgttcttcaacctgttgaatgttttcccctaaattgttatatggagatcctggacccggaagttggctgacatgaaacaggcctagcagggcagctgaggaaatgctccaacctcaggatccaggaagattgcacatggcaccaaaacaatcatttaaaagctaatcctggccaggcacagtggctcacgcctgtaatcccagcactttgggaggccgaggtgggctgatcacaaggtcaagagatcgagaccatcctgaccaacatggtgaaaccccatctctaccaaaagtacaaatattagctgggcatggtggcgcgcgcctgtagtcccagctacccgggaggctgaggcaggagaatcacttgaacccgggaggaggaggttgcagtgagccaagatcatgccactgcactccagcctggtgacagagcaagactccatctcaaaaaagaaaaaaaaagctaatcccataaaagaaccatcattttgaacctgctgtttcctttcttgtactctttagaagtacccatttctccctttctaagccataggtgtattaattggagctttttctatcttaattagttcactgtgaacaattaaaattgtgttaataaaacaaaaacaaaaataggactggtgcctagttgtactacatgaagagagaaagggccagacattggtttttcctaatcttctgtcaagttctccaaatcatctgctctggaaggtagctccaacagctgggatttgaagtaaagcatagtgactttggccatcactgacatgtcccatttgaagcaaccaaaactgtccctcgacctgacactcatccctgaaacaccatgagggtaagtgaggcgcttcggaaggtccactcaaccccattgccagatagagtaagtgtctgccaggggcatttggagctgaagggaagactgtacagactcacggtttgcaggcactgaaggcgttttcctgccttctttttcaccttcagtggacttgcaaagcactagccctattgtttttcccatctgggaaacatggtgaatgttggttggttgtagctaatcctatgggtcttgaggtctttgttgacaagaaggtagatgttatctttatctgcgtgtggctttctactaaaacatgagctacagggctctcttttttgttttaaagcatttttccataaggttcacccttactattgcttatctgaataatattacctgctgagaagtttattcattgctcaccagttgtagggagattttgacacaggactggaggatttttttctcatcgtaacagtgcagacccatggaaagcttggaagcagttgtgaccggataagagcaggttgaggatgataatcttagggcaatgagcaggttgattgagaggggtgcctgaaagcaaggtccccatgatgcaagcaaacaaactcacatgccagacggtggacaggaaacacaggcaggatgtggtgcaggctgggctgccttggctgggcaaaggcaggggcttcatggccatgctgggatgtgacgtggttggaaaacaataagaatggagacctctccaaagacctcagacataatttggccatgagaggcaagggtagaggcgagccccctgtgggttggaatgtatggaatccagatgaagcaccatcaacatgcatgggctacataggagagctgggtctgggggaaaagatgggatttgggtttgggtgtacatgttccaggcatggagggaagaatgggcagaatgacgaggatcaagccctggtggagcccccagaccagggccctgggcatatttccacttgccttcttctgcaaacttttgtgtgcctgttgggtggaaggtactatgctggggccatccaggatccggagcagtgtaagacatcatggcctgcatggtgtgacccttgacatctgaaaagaacgagctggtggagtgggaaggagacaagtggcagcagagttgacatcatcaggactgactgcaggacaggcggtgaaacgagccactgaggagttacccagtgccctggggagcttagatgtgagacttacaccacccagcactccccagctctgtgtccctgggtcccactgaacttgattgtattttagttgcctcttttctaagaccggagcaacaataccttccttgagtgtgcatgtgcagtccatagatggcagccagtgttctcttcccatgagaagactctgagcctcctcactagagggtggtctaaaaacaaatggatccatccacagaaggtctgaaaggttttcatagaatcttgacttggtagcacttcaggatctaactcgtgctttccagaagtgtggcctgtggtgttctgtctggagtatttggtcctcccatccacctccaccttgctgtcctgtcctgtgactctcactagctcagtcaccgggtcaggaagccctgccatgaaatgctagatttggaggcattgccaaggtaccacaaaccatactcaaacaaggtcataatagactagtgatctcactgtggctaacaggttcatgtgatttaaagaatgacagcattttttctaaattttataaattttataaatttctcctaaatacaaatctgaatgtgtttacctttagacagattttcccagaaaattgtcagtgttctcgaatttgaaagtagatcagatctcctccctctagttttgaaaatctcaagtaggtttagcctctccccagagtgacaacggcacaagaagtttataattttatgcacagctaaatgcaaactgaaaagtgtggtttgtgggtatttcatttttcccataatgttcatcaatttggcaattcaaataggattcagaatccaaggtgttcgcagcattttatatgaaaatgtgcctgagagtttggggaatagaaattcttaccaaataagttaaatttgctcttgataagaatatattttgtaaaatgtagaaaactgagaaaaaaagtttgacacctgttttatctgcatccttttattaaacagtggcctgaatttactaaaggacagagaacagggttgagaggtaatcactgaataatagcttcgctaatcccacagtgactgcttcttatgacaagcaagagggtcaacttagaggcaggactgtcttcaggggcaaaagcaagtcagcacctacaaacctctccaagagagtgagaaaaagcaggttgtatggctcattttgcagcttgccagaagcaatgtgggaatattgtcagactgcacagacctggggccagctggctcctagagtgcgaggagctctcagtgactgctgtgcatactcacctgctctgtgactttgttcagtccctaccctggatgtgtggtgaagggtgccaggcttagctgctggaccagtgaggtccctgagggggcagggctaagaggtgtagcagtcgcacttgaccagtcattgattcactggttgggaatttgttcattgaggggacaccattactccccatgcctcacgtgcaggtgagtgtgtgtatatttgcattaacacacaaacacacttatgtgtgtccctgtatgtgcagctgcagtaccttacacatcttccagtgcctctcaagcatcataaaaacagcttccacaaaacctctactacccacctggcatccacagagctcccagtgattggctcccaaaagatactgaactttggcatggaacagagtgagtttccacatttgctgttgtacataattacctgtccagctagaatagtacacacttcttttactgagcccagaagtttatgtgcctgaacacggatggtacaggaacaagggtgagcgcttatcaattcagcattactctggagacatgaaacaaactaataggtacagctatattttgttttttaaacaattttgtgaaccacatatttgggacaaaaatcaacaagtaaatttgaattacactaggcaaaggnnnnnnnnnnnnnnnnnnnnnnnnnnnnnnnnnnnnnnnnnnnnnnnnnnnnnnnnnnnnnnnnnnnnnnnnnnnnnnnnnnnnnnnnactttccaaaagaagacatacatgtggcccacaatcatatgaaataaagttcatcatcattgatcattagagaaatgcaaatcaaaaccacaatgagataccatctcacaccagtcagaatggttattaataaaaagtcaaagaatgacagttgctggtgaggttgtagagaaaaaggaacgcttatacactgttgaggggattgtaaattagttcaaccatgtggaagacagtgtggcaattcctcaaagacctatataccatttgacccagcaatcccattactgcatatatacccaaaggaatatgagtcattctaccgtaagacacatgcacgcatttgtttgttgcagcactattcacgatagcaaaaacatggaatcaacctacatgcccatcaatgatagactggataaagaaaatgtggtacatataccccatggaatactatgcagccataagaaaaagaatgagatcatgccctttgcaggaacatggatggagctggaggccattatccttagcaaactaacccaggaacagaaaaccaagtgcagatgttctcacttttaagtgtgagctgaatgaggagaatacatgggcacatagaggggcctatcagagggtggagggtgggagaaggaagagtatcagaaaaaataacaggtagtagatttaataccggatgacaaaacaatctgtataacaaacccccatgacatgagtttacctatataacaaacccgcacatgtactcctgaacttaaaagttaaattaaaaaaaaattaatgtctaataatatattacagtattcttcatattcaatggcaatgtgtgaagtgggaagtgtcttgacagaattcggtgtttcaaggcttacactttgatgcccaagactgcacaaggctacattttctactggtgagacaaattccagacgcattgcattcagatctaatctcttagctccttaatcttcagggtactggtaaacatgaagacctccccagtgctgtagtcatcatgatatgtacagcaggtggctgagctctggatgtagactgcagggatatattaggaagttaattctcaaggcaagtcatcttcaagcaccatatcagcatgatcagcaatataagtagtatctcagtgctttgttgtttagtcagagttttgtactctatcacccattgtaatgttcctatttgcaaaaggtaatacataccctttaaaacatctttgctttttctcccattatcgagatgctagcagcttcataaagcagaataactaagggcaaacagattatataaagggttggagctcaatgaagacaacaagaacagcaaaggttattgtaaaactggctgcttgcaggccaacaagcacatccatatggaggcaatcagtttatgctacctctgtctgtttgatgggattcataatattgactttatccattagatttggactaccaggggaataaaataagcagatggagagtaaggatttgctaggaaataattcagccagtcactttgaaagctgttcaagaaacagctttcaaagtgtctctcaaactatgtttgcccattatcccaataatttatttcccaataatttcatgggaaaagaaggaagttctgtggtcagataaatctggaaaacactggtttaagcaaagttcagtaggtctgcttccctgcaggtcacctcagagtctttactctgctaacctaggaactcatccaacaagtttaatttaacagctacactgtgtacgtcactttaacagtcactgagctgtgactcttgggggaaagattgtgcgtgtgtgtgtgtgtgtgtacacatgtgtgcacatgtgcagaatctaccaaatcttaagagaaaggaacatgctgggaaactgtcctgtgaaagagaatagaaacctgaagatttgaggcagtgatagcatttatgaaagcagcagataaggactaatcaccaaaaggggtagctcttttgttggttggggaaaacaggaatttttcccccacccaatgtgctgcattttctaattttctatgaacacttcctaagaaaaagctgaatgaagaacatttgcgatgcaatcagctcattaagaaacacgcacttttgtggagatacgtgctgtcccaggagatgctctgcgaggagccgagtgtttggactggagctgctgaatggtttctcacagttctagaatgtttggggctgcaccctctaagatgttgaacccatcagtaattgctccaaaccactttatgggatataatgctgtgagttgacacctgaggggattgtggtcctgttcatgagtaattacttttctgttgcctatagaagggccagcaatagcagatgagtagctgaacagtggttttgagtaataaaacgttcttttttaaaaaaaagtaatgctttctgttaaactctgactatactctctcctggtatcacaacccagctttctttttgccttctttattgcagttacatatggggctgatgactttagggatttccatgcaataattcccaaatctttctctcgtaagtatatgccgtgcttctggaaaacaaaagcatgccttcatctcctatcatgtaaatatcgtacgtgcatgttccttcatcaacccccgagatacattaaatattcactgttctattcgttagacacctaccatatcatttttgggtatttataccataaagtgcaaaacgaaggtctaggcagttgtgcggtgtcctgggagcatggcagtggagtaacagtaagggttggagtcacagtagcactgatgggattgttacttcgcggatgctgctggacagctttgagattactcctgtaatcctttttattgagtgtgaggataaaatggccatattttctgtcaccaacaaagaactgaacatggtttcaagataatttttacaattttgtgggacaggagaaggagatatgctcttcatctgtggttctggagtattaatttcagaactgagaagagaaaattgcaggcctccaggccgttattctgtggtgcatcgctgctggagccaacgtactgttcctgcttggtgcccgcaggaccttctctgatctgagctgttaaaccaaaaacagatgtgaatttcatttttcttttttagatattgagctgataaatgataaatatatttgggtaacatcctcaaatgagtactttaaagaacagagagtgcttttgaaaatgtatagagagctgaatatttaaagccatacaagttgataatccccttaggacctgtattagtaaatcctctaatactataaagcaacatcagaaaacaggtcgcatttgttaacactgtgacaattataattataggctctaatttgaacagtgccagtaacagttaaagacaggtgtctgacatcctggttatcaaaaactatctggtgtctaaggaatttaacagtatcaaagtacatctttttgctcacaaactagattggctacttttccagcctatagaagttacagaaatctttcttttactgatattcctttgattccactttaaagcaatagcttgatacctactttttgagatgtatatgtatgtacatgtaaatgcttatatatgtgtatttgtttacacgtgagcttatatgaacatataaaacattatggtattggacagagaaatgatattgatttgaagaatcatattgttgaagtattttgggaagtcaaatgcacttgagagtaagctaatgcatcctaaaacatgtttctgtgaagtctgaggaaggtgtcagccagagcatatgttgaagcagacccttcagtgaagccttcagtctgtaagaatcgctgcatgtgaagatgtgttaatgttatgatagttacagtttttataaaagagatgatatacacttggatatgctttctgtctatatttatgcaaatgtgtccataaggtattggtgtctctctttctctcccactctccccagtgttggaattgtgactatcttctcacacaagcggctacttggtcttgatgccttcccccgcaaaacagcaaccaaactgttctgggccaatatcaccaccttgtggtcatgatgaagaattgccccctttgccctcaacacctcttttcttcttgaaaattaaaaacaacccctttcaccccctctactgtccttattccagtttgtgtccgtagttgctggaggaaagaaaatgcctattgctcttttttttattctctttatctgtttactcttctgcctttcttttctctccctgacttcattccatttaaaggccttaaattgcaaataacgaaaaaagtattttctaataatataccctagtgggacgaaaacaaccttctacattttaaatgatattaagttataataaatggttccatgaactttaaaacgcttaaaagttttataaatctcttttagaggcaacacaaaaatatctatatatatatcttctcttcacctcaaattttcatttaattaccgtgattcaagatatatcttaaatatttccatttcatttgatttttacttgctagtcaccagtgttgcaagaatatttctgtaccatttttcaagtaaaatattgagcatttcaagcttacatggcctaaactcacactagagtgactacttcggactatcttttcaatggaaaaatgcgttctgagtaccaaacatttactttttcagtaaatatgaagacacattctaaaaaggaaagggaaatgaagaggaagcttaattcattggtcaggtggggactaacagtgtacattatacctatgcattaaaaaatgtttaattatccatgagcacatacagtgcctggcacagattcaggcctcttggctcctcttggcatctgagttccttggattctccagattcttcaatccaaacttgtctatctaccaaagtccaccttccatacaggggtgtggggtctctcttagtactgttgggtgccaataacatagaagccctccaagataggtcaatgagattttaatttttcccaactttaaatagcatctgggaaggaaagcagcttttgactaggagtttgaaaacatccactcttcatatttattgtcacatttattgagtaataaaattgggctcttgtccattatctctcagtcaatgaaagagcccacggtgggcatgagccaaagtgttccggagaaagagaggaccagtctccatttcatgttctatatttaatcagttcaattcagcaccttactgagtttgacatttttctaagtaatggggtggggggttacaaaatatttataactatctttcctatcttcagggagatgtaccatttcactgaagcaataccacagctaagcagttccagctccgagtaacagaggaaggagtgagcgatttaggaactcacagaagggcacggccaggcaactcgggccctggcaaatgttccatagagacagcatccatggggttgaaccaagcacaatgcctgcaaatcgggcaggcgggttcatggaattgattctagggcaggtatgatcagcaccatttaaggagtggcagttgttaagaaactgaagggatttctcatatggcattttcaacagaattcagcaggagccttgcatatcccttgggatgggttccggggtattatggagctgccaggaggtgctcagcttcagtaagtgccagtcattccttcccaacctcctccttcattagtggaagtatcagctggtgtcattgccttcttcaggaggatggatttcaaaatgaagggccaacaaaactcacattctcgcagagcctccgtcacaactgcatgtgttcactgccatcaacaggccaacacccacttgttcttttcttctaggtaaaggaaaaggtctgtgggacaaaggccctgaactcctcactccttgaatgggaggcatattggtggaggctgtcacacaactacaggtggcaggaacctgccatcagggttcccatcagcctccagggcttgcttctctgccctgtgtgtggacaccttccatcactggaaacccctctctcagaagaaccacttcttgccctcatctcccacttgcctctcctcggcaccttctccaccctcaggggccaagctgaggaagtgtgcatcctgtgccaccaaccttgctcgcaggaattagtttcagtccccagtgactgactcttccaaacctgcaccagcctatgctgcccttttgaaaggaggcgtgcgtacagcctggctggtacagaagattccagatttcagtgactacaggacgctgtcaccccttctgtttttcttttttctgtccacatctctgattgagcataccttcagggaaaaccccagaaacctttttcacacttacatgggaagccaagacactctcatcctgggcttgtgtttttaaaatctatattttaatttcacaggtccttacatttatgactaatagatttcagattttgagatacaatctgtagttgcaacttatgaagatagtttcaagccctgatttctgtcatctatgaaaacagtaagcaagttgcttgtattctcctcctagctggataagagacccccgttttcatggacagcctccttgggtggacagaagtctcctgatcttgtctatgtaaccagcacccactttgcatttttccgcaaagaaaagaggagcttaaccccatttacgggaaatccacgcactgcttgaatcttacgcgccccgtggtgacggtgttgcccactctgttcccttcccaccaaatcctgccagcacctggcagtcatccagtccttgtcttagacttcaccaacctttcccgtcataacatggcttagaagttgtccgaatagtgctagaagctttcagccctggaatgctcagcatctgccatctaacttccatttaaaacgttttgagcatttgctgatacaggttcctctgtcctttccccattattttcagttccttggccttgcccatagtgatctgtggatattgtctgcatactcttttttagaaacctagagcatcgcagtgtccttaattttcctcttcaaactctatatattcctgagctgatcatccctactgctgttcctacagaactgtgtgactaatcttctatatatgtccctacatctagccatctaggtggagatctaggtacctatctccctaaaattgtacttggtatccacattgacctcaggacagtatgtgataggctcttgtgccttttcgactaggagtttgaaaacatccactcttcatatttattgtcacatttgttgaataataaaattgggctcttgtccattatgtctcagtcagtgaaagagcccagggtgggcctgagccagagtgtttgtgtccctagttctcttttggttctgttacagctctcagtgacagtgtcattgaggctaacaaggacagagtactgctttcagccaccatttgtccaatgagtggctgatctccaggcctctggctttgagaacatctgtgatatctaaggcagcatccattgtgggctttcccccatgcttctgtttccttcctgtcacatagctttgcctcctcctgcaagcagcctgctgtagcagaaccggtgttcctgaagccagaaacccaaaggtcgtgtccaatgcttccctgctgttctgctccccacctgcaagcgcccacacactgatcaacagcacacgccatagagcatgccaaagaatcccagaaatactcattcttaatgatccagaagaacaagtgatagcttctggcaagttctaataggccatgtgtgcccatgggaaagcaagagtcaattctctctagctggttgcctctgaatttatgaagtcaagccgcgtaggggaacatgccaagaggattatcccaatgcctgttctgcgtggtgtcctttttctagcctcggaagcactaggcctacaccttcgctatagccctcgtcttagcgcctgtatttgaaaaacttgccacaccaatcttaatttgctccattgtgttctaatctcattttaaaaaccacaaggtaaatgattaaaaataatcttagattaaggagtacacagatctttgcagcctcattgtgtttccagagcgggctagtgtagacactggtgaacaaggagggcctagagaattagctttctcccagaaagatgcacagcctctacctgagagtaccaattccagagaactcaatggtcattaagcaccattgcctcgacagccagccagcctcacttgcctgcctatctcctttattttccaagtatcttgtccctggcagtggggagaggttagcaggaggctgctcagatgctctcggtctctgatcttcaggatctgaaggggagagcatttgaagaatccccattgctggatttctcaggacaatcctgcataatgccaggatctgatggaggagacaggcagctctgttaatcctctggtgcatcctcacttctgtggtctccaagtccaccatgtcccagttaattcatttcattattcatctgtaagtcatttccctaaagagctaataagaaaacactggcagtacaatcagccctccatatccatgggttcagcctctggaaattcaacccactgtggcttgaaaatacagtattcaagagacatggaacctgtggatatagaaggcagatttttcgtatccataggttctatagggccattttagggacttgcacatctacagaccttcaggagtctcagaactgatgcactgcagataccaagagatgactgtaagtggttaggaatttggatgctggggccaggctgcctgcagttaccttccagctctgccacttgccagctatgtgaccttagcaagttgttcaacctctctgtgccttggcttcttcaactgtaaaataggataatgatagcacttcccttatggagtccttgtgaaggttaaatggcagagtacaattaatgtgctgtgtgcccagcgtgtggtattggggttaggtgaaagactgtactgggatcactgggggtgagcctccatgtgccatgccccaaccactatcctcagctaacttcttgtctgtcagtgttaggctggtgctataataatttccattttcatggatgaggaaatcaaggcacagagaagttacatgacttgcctaagatctcagtgcttttaaatagtgcagctaagattccagaccaggtatttttatttcagtgtctggactgtagatctctaaatcgagaggaactccctgaataaaataagcttggagtgctgttaactaagttggttatttaagacagttgttctcagtcctcagtgtacattagaatcttctggagggtatgttaaaacagactgctgggcccaccgagagttcctgagcctgcaactctgggttgagcctgagagtctgtgcttctagtaagttctcaggtgatgcttatgctgcttctcccaaattttgagaaccattgattgaaaatgttgatcaaaaattatgtggtctaggctgagcacagtggctcacaactgtaatctcaacactttgggaggccaagtcaggtggatcactgagctcaggagttcgagagcagcctggtcaacatgacaagacccatctctacaaaaaacaccaaaaaaaaatggctggatgtggtggtgcacacctgtagtcacaactactggggaggctgaggtgggaggatcacttgagcccgggagacagagcaagaccctgtctcaaaaaagaaacatttagtcttgattgtcatctatctcattgatcattttacttggcaaaatttacctacttactcttattagtctgtaaaaatggttattaaaatggtggctttcagtgtaactacaaattctcttagtcattatagtgttggattcaccaatgtatcatcagtcagtgtttctgaagtgtgtaannnnnnnnnnnnnnnnnnnnnnnnnnnnnnnnnnnnnnnnnnnnnnnnnnnnnnnnnnnnnnnnnnnnnnnnnnnnnnnnnnnnnnnnnnnnnnnnnnnnnnnnnnnnnnnnnnnnnnnnnnnnnnnnnnnnnnnnnnnnnnnnnnnnnnnnnnnnnnnnnnnnnnnccctttggaaaaaaaagctcttccagatacctacattcataaactatcccaattaacccttcagcaagtggaagaagtgtaagaaaggatacctcttctttagaacacagggtttgtttttatgttatttaagataaacaggaattcaaatggtcatgtaccaaagcaacacaaagaacttccggaaatctgaaagggaactgtggtcagaactctgagcatttttatgtttactgagttttgtcccaaagtttattaatgtttacatgccacaaggaaaggtagcatcacaataagagacgtttttcaggcttgataaccacttattaggtattttgccaaacaagttcacacatcctagagagctggattgtgtgacccagaacccaccctctagggcaaggtgcccatctgatgggtagggtgtaggagtaggcctcagaccactcctgacgtgaacctgcttaaagtgagggcccaattctaaagtgggaactatgtaaatacctttctagtgcattttcagataatcgccactgggcctatggatggagagggctggcagatctccctgtaaccccaggtgcatcccgaggcctgccaccgaagcccactcaaggctgaatgcacggcgagctcaggctgctctccccttggtatttgctaagaacttctgtttagtagctctccacacctatttgattgtctttttgctgctgtgttgttttgttgagttttttttttgcaatgacactgagtggcctcctgtattgtttctttcagccagtaatgttaaagtagagactcagagtgatgaagagaatgggcgtgcctgtgaaatgaatggggaagaatgtgcggaggatttacgaatgcttgatgcctcgggagagaaaatgaatggctcccacagggaccaaggcagctcggctttgtcgggagttggaggcattcgacttcctaacggaaaactaaagtgtgatatctgtgggatcatttgcatcgggcccaatgtgctcatggttcacaaaagaagccacactggtaaggcctggctcagtttttcctttagtggcctggagaaggtgcatggggtttgaaggaggaaagcatcctgtcttccttgtgttctgagcatgtttctaattgactggtagctcagttgttgcaagcgattggttccaagtggtaccgagtcatagagtccttgttctggtacagccttgtaaaggacttctcaacacgtaccaattccaccctataaataaaacaagggaaaagtgaacagcatcacatgagaggcttggcgagggctgctattatagtaacacatactaagtagtctcagctgagccctcagggtacgtgtgctgagtggtcaccctccacaaaacaaaaaatcctgatacaccaaaacttactcctcaaagtttccactgagaaaccatgagtaaaatgtgtgtttaaattgtatccaaactaacagggtttgatgtttagaaacaataatcaatgatggaatagcagcaaaatcgagttttcagaaagacctcagatgagctttcaaatggcttgccctctaacaggaaagactttgaatcagatgcttctattgccactggttatcagctcaaattcctaaagaacttcatcccaaataccctgtcttgctgaaaggtttactggaagtataagagaatgtcatgttctgtgtccagaaaggaaggaacacgggcaccctagtgtcagcgagttgtgctcaggctcacaggatgccccctcaccagaggcgtgggaacacggcgagccccagctggccgcgctctgccactgtttctaatagccggtcacgttgatggaagtgtcacagagttgtccaacagaactgtccagtcagaaaaccaccactcatggtgctggagtgtcttagaagtaaaatatgaataacacacacttatttaactgtaggcaggaggtttcttatgaattgaagagaaacttttctttgcgtgggaagctgttctaaagttgggtaaaacacaatagatccaccacctctagcagccactgatagctgaaacgtgaaacatagagaccctaagctatcactgcctctgagctggcattgttaggtcatcataaagctagcgtctcccactgcaaaacccaagaggaaaaaaatagttgaaaatcctattttaaaggcctagcagattctataagataccttgggaaaatgatgacgatgacttgaaatcagaccctcgtatgctgcttccgtgggggcgaacaaaaatatgttcatcaaaaattaagcagaaatgcagaaaattttgtgagccaaaaaagctgtgttatcaggaaatgcagatatttgtggggttgtaattttttatatttgaatcgggcggttttcaaaatgatctattccatttgtagtgtatctgaaaacctataaaaataagttgatatcaatagatatccatcttccataaaaattcaacttctaaaattaagcaaactttgctttttctaatggcccctttatcctcaaattacccactgaaatagacggatcacactcagccctaagtgaagcaagcgtgcatgagagtagtcccagcctcgcctttgtaatgaggtggaaattaacatgaaggtaggctaccctgtgatagacacttaacaggatactcggggacccatggtaatacatccctgataaggaatagacctcacaaatgaactacttgcctgttaattcatttaaagcctgactgtacagtgaaaattctcttaaataaatatttgataagtgaatcaaattctggcttactaaattgccaaaatataatgactgcctgccttgataaaaagaataattacatttaatgaataaacctgccaagtacagatatgccaggtggcacctgctgtttgctgctcacttctcccaacaaatagcagctaggtgccacctgcacaccaataagctgagtttttcacttacggaacaaataactttcagaagtcaattttatagtttctgccttgccctttgttaaaaaaatacacacacttgaagcaatgaactcatgaattgttttcatcatgcatttccacttgcctaaatataaagggtcccaggtagatacagaaatacctggtttggccaaacttggtttgaataactagacatgctagaaaaggttttcattttcctgggatctgagtggaatatgttagaaaaggcatgctttctgaattctctatgcttaaaacatttctagagcagtgcttctcaaacttgaaagagcatgtaaatcacctgagatctcgtgaacatacaactctgcttcagacctggggggaggcaggagagcaagcattcctaacaagctcccagcttgtggagcacagagccgcctcaggcagcagggcagtgcagctgagcagtgacagtgaacagggccattcagagggctctccacctggggcttaggtacgacgggaatccccactggacaggctaggacttgcactgtggccattgttcctcctcctgcccatggctgagtcagcttctcagtcccttccaggatacactgagaggattcaggggcggtctcgcctctgcccatatccccacgttggtgaagtaccactggcgccattttctaatcagctcatcggcaccagcacgtcacttcccctgttgtgcagctcagttttatatttctgactcgggtgtaatagtaacatcttccccaccaatgtctcagggttattgtgagaaccagagaggagagaggtaggaaggaagcaggaaatgcagggtgcaaatacaccacattattattctaaataatgggatttttaataacaaagaccaagaagattgtctgtgcctatctagttcccatctgtaagataaaaaggtgcagtccctgagcctcctaaaaacagcaccctaatggcactgctcctcccaggtatgattgcagtagacctacgtcagttcttgcagttcaaacacattttttcactttcttctgaaatgccctcaaattctatgacatagtatccatgaagacttccctttttacccagtgaagttactagagggggttcaaaccttcttacagagggttcctaaaatgggagatctgtggagtcattgggattaaaaattaaatttcaaattcatgacatcaatgtcctcatcccagttaaataaaagtaaatacaaccttgaagaaatttgacctactcagctgcaatagctgttgacctgcagaaggcaaatgatggaccccggccacgcaagaacacacatggcgtgggctgcgttcttgtgccccagctccatggacgtgtcttcttagctgtggacccctccaaaggaaactgcttgagtggagtgctctgtattgtcactcctgggaatgctctcttaacacccccatgccttgtgctatgtgttcataccagcataggcactcagaagcaaaaaaggtttccagtgaaatttgtttgcaggcaggtattaagacatcagacactgcaggatccaagtgaacccctgcccgcctgcctgcctgccctgctctgctctgcagaagggcatgtgtctgtagcaatctgccctttctgtctgcgatgggcagagaccctggctctgcctcctgttttccctgtagccctccagacctggggagagacatgggactccagcacctgcccagcacggaagggggtctttcccaggtgtaagtgtagggctgcattcactaatttagggtcataccacaaacactgttgtgtcaccaggatgttgtcacatgcttattgtgagcatttttgtgacatgagctttctcctgagaggccaccctgtccaaatgagagctgtagttggaggcacatccgtctcatgctgcctgggtctccctgcaccagctcactctacttttcctttttatccacttggagttaaatgcacacatttatgcacaagtgcacagaaggcccagaactgttcctaatagataattaaatgatctctctccagtggaaactctcctgggctacctggctgctagctgttttagcctcttcatccagtattgatttacatgcatcggtttgtaactcagacagtatagttagttagtttgtttcaccatcaccttccaacctgcttacgtttaaactccttctctctgcttagctaatacagatttctgtaaggatttggagaaataccagatacctcctggttagtatcaggacctctccattggcctataattgaacatcactgtaaattagtttcagcttttatagtaatgcatctaacccgccagcttaaaaaaaaagtgatgataatcatgaaattcaagtgtcaatatagacttttaaatctggtgtggatgttaatagtgccagatatgcttctgtgtaatcatttttgagaagtgctgtcttctttaccataatcacattaatcaatcgggaaatggttaaatagacattttaatacattgttttttcctgagaaaaaaagtgactccaggaaatatgttgttacaatatctcaacaccaggaattgtggtcacatagcattcttcttctaaataaagcatttgttttacaaaagagtttcatgtttacttaaacgtgacaaatgtatcactcttcgaagtgagagttaaatgaaatgttccctgatttagattccaagacctgtgactactcagtaggacaatagcatatttcttttactcagatacctgtttatccctttgtcagctccagaatggagacacaggtgctgccacacagaggagagggtcaggtgttttcttagtcacaaatgcagcagtctcacccctgaaagaattccttcataacaactaaattgcacctcttagaatacctgtacttaaaatataatttgtcttctatggatatagacaaataatagcttaaatgttttaggatttgtaaagaaagaaaaagctagaaatctcaatgcaactctgacttgtatgtcctgccataggaaggtttgggacttttctttggaagatgggaggcttccttcacagtttcttaacttctcattttattcaatctttctccatctctctctctctttctctcatcctcacgctctctgtctgtctctctcctgatttgtctgcttagggacagacaggtaatggagaagaaattgaaagggaaaatacagggaaaatgtaaatgaaaagaagttattataactgttataatgaagtgcctttcatttaaatataagaatgtaacgctgaaatgaacttgtgatcctgaaatgcatttttaatgagtttcctttttattttgctgcttcagtggcatattttaaagaccctttgaaaaaagccacattaaaaaaccccaccaaatgccacaacacgcaaaattggatattggtttattccaaaactgctgatcaggaagagtggctcttcatcacaaaatgttgcagtcactttatttaaatgagtttgaatttgcattgtgatgtgccattctgatttagggaaaaaaaattagattttcagatcaaattgacccagccagtgaagcgttaaggagctggcaggtttagtctgaaagcctcatgttctatcaaacctgcagccggtggaagtcaccaggcccccgtgggaaacaactttctcgtagcatcgtcctcatgtccccacgctgagtttagttctcaccagctctcctctctccgtcccaggagaacggcccttccagtgcaatcagtgcggggcctcattcacccagaagggcaacctgctccggcacatcaagctgcattccggggagaagcccttcaaatgccacctctgcaactacgcctgccgccggagggacgccctcactggccacctgaggacgcactccggtaggtcccctggatgcagtccggggctgtctgggtgtcccgggattcctccactctgcccgcctgggtcccggattgtgtccttgctggctaaccctgagtccctcccagctcgcagtcctgcatcgggtgtgagctgttgcttctttgacattgccccatcccccctccccatattctccttttcccactgcaccagggagattgggcgcaggacccccatgcacatacacacacagaagtctcaccttaggtagcatgtttcagaacaggcctcctcatcccgtttgtcaggctggtatggtttccctaaaggattttgcgggaaatgttttcaccaagtgtactgctaagacccaaaacgttttcaagtacaattctttctgttgttaagtcccgctttggagtgttttacacaggtgtaatggatagcttttttgcagagctggtagagaagggtgatttagggcgcacccacccagactgagccccgtgtggctctcacaccaaaaaccagccaaggccacagttacagaggccagtctggggctgttaccagattttagacagcagcctttctctttgaattagacagttaaagtacaacccacataatctggagtcttgacaagatcatcataggcataaacgctctatcattctcaaaacagtctcagcctgcaaagttcaaatccactaaagtttggttagatcctctgcctcctgagaaatggtcctgggtgtttcattatccagcagtcccataattctacagggcagaggaagagagggctcttggccggcctgtcatggatcatgtttgcctacagtgtggtctatacaacatgacatggcacaggtctccttcataccgtccagttggggatatttgctgtagcatactgcatgagacttcggaggcgaaaggttgatggcttttgtccttcccctcaaggagcttcctgccccagccagccaccagccagggcccttctccaagcagcagcctctctaagccggtgccctgggggatggcaatgcctcagaccagctactcctcacccaccctgggtagcaggataaggaggagcctccctcagggaggcagacgtgtgttctttgtgaaatatctgcagcggcccaggccatctcttcccaaatgtgatgcgtgtatttgatggttgagggttttagaggctgctcattgtgtccatctctttatcacacatttactgagcacccctgggtgcccattctgcacagaagacctcaggtgcacacaaggaaagcaccaatgtgttacaggaggcatgacagagtgtctgaggggacagtgggagcataaggaaggggacagtgggtcctggggtggaaagtcaggagagacttcccatagaagggaggggcttctgaagtacatgctggaaggcgagtgtctgaggtttgctttagagacattctaaactagtgtgtgagtcggcagtaatcccagagaggggtgcggcacccatgttggcaagaactcggtctcactcctggcaggtggtccctgcagtagttcacccagttggctggagacaaaaaggagaggagtcacaggggctggtgcatcacctcctctccatcctgacctccttcctggcggtgcacatggagaaggatccccacatgctcgccatcagaaaattgtcatgatttgggtgatttgacttcctaaaaacttccaagaaaggagctataccaagctgaggagttgcttgcccgagagggcgggcagatcagcaggggggccatggagtgggacacttgccttgttacagagggacagggagaacaggtggttcccctgagataggaagacagtagcatgacggtgagcatctttaaatgttcacatgggtgatgagcatgtatggtggtcccacctggagacaaaggtggtacctgggcctgataagcaaggcccatggaggcctcagctaagagaactgtgcagtctgtctgccatgctaaccagtggtctaggaagaagcttcacatctgttgtttctaaggagccatgtagacatagacacagttggcagcaatattgccttgggttagtgggaagcaccacttcccatgtcagtggaaaacacagacactcattcttaggttgacaccaaccataggtcatcatcactcctagattactctgattgcaatggaatctctcatgcccatcagtccttaaaagcagagctgctctctttcctttcttgttgtggagttaggaacatgtagtggagtattttatgttattctggctccaggcctatgtatttcatttgaggcatgatggtttcctattctaagtaccactaagtattgagtagttataaaatggtggtagactttggactgtgtatttctattctggatccacggatgagcaagtggagaaaacccatcatggatgcagggctgctggggatctgtctgtccgaaaatgctatagagacacacactgctcttggggaaaaaaacagtgatgatttcttcaaaatgatttcactgaagtgaaataaggactttggccttgctctggcaaattcaaatgtggccacactctactccattgtggaatggtgactcccctgtcccatgaaaaaccaggatcaacatcacagctttctctagcaactggtggtggcctgaggtcttatgaactagcatgttagcagggatagagttagggaatttgtccgatgctgacagcaagagggtgctgggggagctggaggggtggagaagtgatctcccttcctgcctcatggcttcctttggaagttgcaagcttagaatttctttcccaaagaatattggactatgcttcaagagacacttgagttcagttgcttacagtgaacatacttcttatgttccagagttaaactcaatcatattttcagaaaaatagatattcagacatcatgtcatatttacaggaagctatttgatcatggaatttactgaagtgacagctttttcaggaaagggtatcgagtggttatctatatcctattaatttctaaaagcaatgctcaataaaatgtgcaattttaggcaatattctgtgtttcaacattatttccttatgttgggggtacatcactttatatagataaagaaagatccttttcattctctattaaatggtcgagaagtcaaattttggctttcatgttggtcttcttactgtagcttctgttcacctaagaaagagatttaaccaacataagctttggctaaaccattgtaccaaacatttctatttggatgctcttaacttttatacaatactttgaaatgtgttcaataaaacaacatgagaaagaagtagaagattctgctattaggttggaaattgatattccttacataagtgattaaagatactttattcagtttatcccttaaaatggtatctactgaagtccttaaacttaggcatgatattaattcctggctagtctttctttttcctaaaatatcactcaataaaatccaagaaggactaaaactcattatatagaactgcactgcccaatacagcagccactagccacatgcagtatttttaattataataagttaaaattaaacaaaattaaaacttcagccctcagtggcactagccacactttttgtgtccaacagctacatatggctggtggctgccatattggacagcactaatagagagcatttctatcatcataggaagttctgttgaacaaggctgatctggaagctacaccatcctaaagctctttggcaagaaagcagagcttttccataagctcggtttatgaacaatatattttgtattttctatgtatatgtatatgagaatacgtatacatagaaatatatgaaaatacatatacatataaatatacatatacataaaatagaaatacatatacatagaaaatacaaaatattttgtattacatatacatatgcatggaaatacaaaatattttgtattatataatgcaaatataagatatatttatattatgtaagaaaatacatttgtgcaataaaacgcttatttcattcaagcatatttgtccagcatggtttcttagagactgaagttacccagtttagcacctggaactgaattcactctggctgtgttagatgtagcaccagcgtcatgacagatccagcccacagcatagactgaggcctactctggaggcaaatctgcagacaatgtggccaacacatgggccttcctcacatctctgtccagtcgctggcatccacgttataacacagcagtggctcgttttctccagttaaaggctaggcttccgtgattgaagcaggagagaatttggtagtcagtaaagtagacaaactaagacaaaacaagagtcgcatgagttcttggtacaattaaagaaacccttggccaccaacgtttttaaattcaggaatttcaccaagtccgtaacagttttagctctcaagggtagaattttttttttaacttttttggtaataattgtattgcatgcattccccttacacagaaggctggcatttaattggggtcttgaactcaattgtgttttctgcagttggtaaacctcacaaatgtggatattgtggccgaagctataaacagcgaagctctttagaggaacataaagagcgctgccacaactacttggaaagcatgggccttccgggcacactgtacccaggtaagcgctgctgctcggaggccagcctggtgggctctccccccagcacggtggggaaggagggcgctctgcatgcagccttaggagcagagccttgggcctgcttcctgccggggctaggagggagggaagtttttggccaatagcatcagtttcaccagaagcacgttgtgcttcccagctttctaggtcctcatctgaccagagagagcttgattttaaaacccttcccacttccaatcgggagaaactcctaggatagcagtgaccttgaaagttttggggttgttttttggatgttggtgattttaaaacaacaacaaaaaaaacacctcaagtagtgatatttctttgtaaacaaaataaaatgtaaaatattgttttgaaacaattttttaacaaagttgatcaaataagaactttcaggctgtgattttaagcatcagttcagactgagggcagggtatccactcctgcatggagtgtgaggttgaagtttgttggaagcccctggtagttgataatattgaggttgttgaaggatgagaggaaaggtcgcttctttcttaggagctgtgatgctccactgtattgcataacgagatagcacttgattcagaccccagagcctgtagaataaatgatgtggagagagtattgaaaaaggctggatttatctgggggaatggcaatgttataaaaggttcttccctaattttttaagagataagcaatttataaagagatcaaataaaactaatctctttcaaaacagtattcatttagcactacccctggaaaaatcatcactagactgtgagtcgaaatttaacgaatggaggaaaatttattaagcctcattcacctttcggactttaacaaatggttcaaaagggaaaattcaccagagtaccctcagattattaatggcagatgagagcaggaaaaaagaatgttgagaatggctaaaaattgattccaattagtcttggcatggagaggcaacatctcacctggccagagccctgcagccagagtgctgtctcctctgccagtcagccagggatctggggcttacaggcgattcctccaggcctcaatcttctcacctgtgaaatgggaagataccattaaattgtcatttggcttctttcaaaatctcaggtctagaatggaaaggcattgaaggtgagtggaagagaagaaactggatgttaaaataataataatgtaacagttattaattcacatggccagaccccagggcagaagactaatggacgagaggatgattatgttcctttgaaataaaatgtcaacattcaaatattgtttttttctgtaaaaaataagtgaatgggtcttggaaggaagtgctcctaatgatgtagtttacatattaatgcttaataaaccattttatttactcaacaaatattcactgaggacttataatcaataataccaagccctattgaatacagtaatctaatatacacatagaattgaaaagacaaaatgaacaaaagaaacagacagtatatcatttctgtttcctccactgttttcattactaaagaaacaagctgcagtacacagccggctgagagctgcttccgggggagcaggagaagcagcactcatttcactgagacctgggtttgagttctctgtttttgaatgtgacccagagctcatcgcttaaatgcgactgataattcgtgcctggccaccctcatagcagcgctctgaaagaaacataaaggagtggatacacgtgtgagcaggagcctagacatgtgtcaggtacttacctaaacatggatgtttaggtcactgacatactgacaccatcaagctaattcttctctattggtctctatgtcagtaaggctacgtgccagtaatgtgtattaaatattaccctgtggtgagtatcaatttcaccctaaaatgttcatttattccctttggtggttaagttacttggactaccacagtgatgcctctatgtccccacactcaggaggtatgaaagcgtctctaggaaggagcagtggtctggtctcagtgtggcagcagacaaagccaggctcgcacttaattacattgaattatttctgtctggtatggcctcaaaaggtgcaaaatgatcataaatatctttcgacagtcacctttggtttttgcccttgccagcacctggcccttgtaggtgctgctggtttaaggaacttggagtattaaggggatccataaaaggactttgacagaagtcttcctgaactgtgcttagggccaggaaggcaggcaggggcttggtcatttcagctgtgctgtacccggatgagtggaaactgtgccttctgatgcatctctcctcctctgttcccctctaagaaccccttgtctgtgctcagatggatgagcaagtagtctcttctcccaccccaaaaacctccttagattgggtggattcagtaaaatcaaagcctcagttaggcaatataggaaaagatgaatttttgtgaatataattttctttagtaaaaggcttttggtcacctcttataatttctcaatgtctttatggaaaaaataagtttctcttgagcctttggtgcacaaacagagtcaccagcccttggaggtgcatgcatctaatgacagagcagcctgtgactcgcgagcatcaggctcacttgttccttgctgtgattgtctctggggggtggaggcttttgggaggccctgcgccatggtgcagaggaagacccctgacctctgggagccctgggcaggctgtgggtgtggcttggcagagaaggatggacatgtcaggaagcatattagcttaatagatgaagtgtgtgaccagtgtaattgggttttatggatttatatttatcttgcatataaatcagggtgtggcctatatatgtttgcccatttaataaaaaacacatattccaaatgttaaaacataaaatataccagcaacaatagccaatttgaaatatatgttttcaaagtaacattcataatagcaatgaagacataaatacttagaaatgaagaaaaccagcaagccatagtgaggcaagaaagaaaacatgggagattggagaggtagagaggtctggatgccgtccatgggcctctgcccaaattagtgtatcatttcaacataaaactggcttgtaaattttactggaatctggtaaccatgtatcataaagtatctggatatatacatgagataattggcaactttttaaaagaagaataatgtcaagtgatgtatgaaaatgtagctgaaatggatggaactctttgaagaatagacaaacaaatcaataatagagatggataccctactgaagaccccatgataaatcagcatgaaatatccgaggcaggaggaagcataaggcaggaacggtattggaagaattgatcaggcatttaagataatcagtttacattatcatctccttatacactaggataaattgccgggaaatgaaagagttatatttttataactccaaccacaataactgatgtaaatatagatccagctatgcaggatacaaagttgtatcttcaattatggaaagagatgacatagaacaattgagaatgactagaaatggcccacacatcagcatttacctccataatttctaaattttctacagcagtcaggggtgctttgattttcaggagtttgttgtatgctcagggataaggggctctgggtttttcctccacattgcccagatctgctgtaggctcttgggggccacatttttgtatctccgttcactgtgctggtccatgaagtcagatgttagatcacacagttctttgcgtctcagagggctgctgttagggactgactgaggtagcagatttgggagtattatgaaaagttaaaaggacttgtcaaagggacatcaatacttaatcccagtccagcctctggtgatggtggtggtgcctgtgcatttggacttaaagaggatgatgtgtggtgagcagctgttggaggaagaagcatttgcaggtggctggtcattggcattgctccggctgcctctgcctgtctggaagtgttgctgggaagattagaattaatctctaggaagggcctggctcttgtaggcacttaacaaatgtcagatttaacattggacgcgactgaaccctttaaacataagcctttctaaactggcctctctgtctttgactttagtcattaaagaagaaactaatcacagtgaaatggcagaagacctgtgcaagataggatcagagagatctctcgtgctggacagactagcaagtaacgtcgccaaacgtaagagctctatgcctcagaaatttcttggtaagagttaaatgtttgctgtctcttaaaaaaaaactatgtgggtgttttagatgcaagtagaaatgagttgagggtggaagaaagggaaaaaaatcttattttttcaaaaggaaaaattggtaagcttaacattccttaaatatcttagaattttttccaataagtatcttaaaaataacaaacctcccatcagtttttcctagatttgattttgcagcatctggggcctgccctgtgatctgcctgtggacatcgctcttaggggcggctgcaccagcgtgcacagggtggagagtttgggcctggctcgtccgggggacaccacactgcaggacactccaggcctggccggcttctcagagcttcagatcctcatttttcatatgaagctcctaatgctccccttatgggggactctgaagggttaatgggaggaatcatacagtgactgacccctgagaagtgtccagtgaagacagggcttagctaggattgctgttttgcctaatgctctgcgggattaaaaaaaaaaaagaagaagaacaagaccattcgtctctctaggagcattgcccagagtaggtattagacacaccaacaccaccatccagccagacgctgcagggacagtgagccagggtccgagtggaaaggcgctaggcttgggaaccagctcagagtcaatacagagccaccgccactcaccaactctgtcagcttagtaaaatggctctgcccctagagccctggttccatcctttagtatctcacagggtgattgtgaatatcccatgactccaagattgagaaaacgtttagaatccctcggtgtgaaggttaactctgtccggaaagaggaccagtaaaagcttcatgaggctgagatgcactttggaagaggaatagagtttcagcacattctaggtgttggaggaatgggggaatctaggcagatgtttaaaatcaatgagaaaccagaatgctgaccatgagggttggagtgggggcctaaggacatgacggaggagcagggtgtgttcccagcttaactcaggtacccatggggaagcaggaaaagtgaaggtgtcctaggcagctctgccacaggatgaatggcttcagatgccaggtgagcgagggacccttcattcagtcagcaggaaagaagcactggcatattttttatgagaacaaaggctaggatagtaaagacagcaagtaccaaaaaatgactggaaaagggagactgtggaggcagtggcagcaggcatggaaagaagggcttgtgaaggggaaggggtggtgtcagaggaacatagggctgggggcagggattaggtgagggaaaccatgagtcacactgattctagagtagtgtgcccttgatgaaaaggataacaccaggttctaggaaaagatggggttctgtttttgacgtgttgattttcaaggacttctggtgtttgtgacacatggggaaattgtggtgggagagaggtggggccagaacaggggctggtgaggccaagggtcccagagggcacctgttgacctgcaggatgacatgaagggggaaggacagaggcaaggccaagtcctgggcaccagcctccctcttgcagcttcaaatagggctccattttgaccttttgattaattagaggtttgtcataggttgggggttgagaggagcaagggagagaaggattcagtgtacaaaaagaatgaaagccactggctgagccagtggggagttgtccacacacacatgagcctttggaccatgagaacgagggaggccttgccttcctgaacggagtaggagtgaggtcctgtgctgagcgtaagcagtgggattcccacagcactgggcacagagcccacgggctgcctcctgagcagccagcatctgcctggggtggacacagtgacagagagatgggtggtgactggggtatgggcagagataaggcagcaagtgtgtgcaaggggagtgaagggttactgaccttaagaagcagggatggcgtcctctgtcaggtgaggagcctggagaatgctttggtgaatgaacgtttgcagccccttttagcttttggagacttgaaaccaaaggagaaattcatctgtgaaactctactggagccactccccaacccccacccttgtgagaccacaatgtgggcgttggcttgagatgcttctgtgttagtagaagaaataaacaacacagtgctctgatgaggcaaagcgaagatgaaaaaggagttcccaggggacatagtaggaacagtggacgagggtagcagaagaggagtttggagcaaaagactcacaagcagctgcataatctgttggtgcttggcagttcatttgtaaaaatgatgcctcttcc

SEQ ID NO: 149 - DNA, 3629 bp, Homo sapiens
  misc_feature (3078)..(3078): "n" at position 3078 can be any base
gaattccggcgtcgcggacgcatcccagtctgggcgggacgctcggccgcggcgaggcgggcaagcctggcagggcagagggagccccggctccgaggttgctcttcgcccccgaggatcagtcttggccccaaagcgcgacgcacaaatccacataacctgaggaccatggatgctgatgagggtcaagacatgtcccaagtttcagggaaggaaagcccccctgtaagcgatactccagatgagggcgatgagcccatgccgatccccgaggacctctccaccacctcgggaggacagcaaagctccaagagtgacagagtcgtggccagtaatgttaaagtagagactcagagtgatgaagagaatgggcgtgcctgtgaaatgaatggggaagaatgtgcggaggatttacgaatgcttgatgcctcgggagagaaaatgaatggctcccacagggaccaaggcagctcggctttgtcgggagttggaggcattcgacttcctaacggaaaactaaagtgtgatatctgtgggatcatttgcatcgggcccaatgtgctcatggttcacaaaagaagccacactggagaacggcccttccagtgcaatcagtgcggggcctcattcacccagaagggcaacctgctccggcacatcaagctgcattccggggagaagcccttcaaatgccacctctgcaactacgcctgccgccggagggacgccctcactggccacctgaggacgcactccgttggtaaacctcacaaatgtggatattgtggccgaagctataaacagcgaagctctttagaggaacataaagagcgctgccacaactacttggaaagcatgggccttccgggcacactgtacccagtcattaaagaagaaactaatcacagtgaaatggcagaagacctgtgcaagataggatcagagagatctctcgtgctggacagactagcaagtaacgtcgccaaacgtaagagctctatgcctcagaaatttcttggggacaagggcctgtccgacacgccctacgacagcagcgccagctacgagaaggagaacgaaatgatgaagtcccacgtgatggaccaagccatcaacaacgccatcaactacctgggggccgagtccctgcgcccgctggtgcagacgcccccgggcggttccgaggtggtcccggtcatcagcccgatgtaccagctgcacaagccgctcgcggagggcaccccgcgctccaaccactcggcccaggacagcgccgtggagaacctgctgctgctctccaaggccaagttggtgccctcggagcgcgaggcgtccccgagcaacagctgtcaagactccacggacaccgagagcaacaacgaggagcagcgcagcggtctcatctacctgaccaaccacatcgccccgcacgcgcgcaacggcttgtcgctcaaggaggagcaccgcgcctacgacctgctgcgcgccgcctccgagaactcgcaggacgcgctccgcgtggtcagcaccagcggggagcagatgaaggtgtacaagtgcgaacactgccgggtgctcttcctggatcacgtcatgtacaccatccacatgggctgccacggcttccgtgatccttttgagtgcaacatgtgcggctaccacagccaggaccggtacgagttctcgtcgcacataacgcgaggggagcaccgcttccacatgagctaaagccctcccgcgcccccaccccagaccccgagccaccccaggaaaagcacaaggactgccgccttctcgctcccgccagcagcatagactggactggaccagacaatgttgtgtttggatttgtaactgttttttgttttttgtttgagttggttgattggggtttgatttgcttttgaaaagatttttatttttagaggcagggctgcattgggagcatccagaactgctaccttcctagatgtttccccagacgctggctgagattccctcacctgtcgcttcctagaatccccttctccaaacgattagtctaaattttcagagagaaatagataaaacacgccacagcctgggaaggagcgtgctctaccctgtgctaagcacggggttcgcgcaccaggtgtctttttccagtccccagaagcagagagcacagcccctgctgtgtgggtctgcaggtgagcagacaggacaggtgtgccgccacccaagtgccaagacacagcagggccaacaacctgtgcccaggccagcttcgagctacatgcatctagggcggagaggctgcacttgtgagagaaaatacttatttcaagtcatattctgcggtaggaaaatgattgggttggggaaagtcggtgtctgtcagactgccctgggtggagggagacgccgggttagagcctttgggatcgtcctggattcactggcttgggggaggctgttcagatggcctgagcctcccgaggcttgctgccccgtaggaggagactgtcttcccgtgggcatatctggggagccctgttccccgctttttcactcccatacctttaatggcccccaaaatctgtcactacaatttaaacaccagtcccgaaatttggatcttctttctttttgaatctctcaaacggcaacattcctcagaaaccaaagctttatttcaaatctcttccttccctggctggttccatctagtaccagaggcctcttttcctgaagaaatccaatcctagccctcattttaattatgtacatctgtttgtagccacaagcctgaatttctcagtgttggtaagtttctttacctaccctcactatatattattctcgttttaaaacccataaaggagtgatttagaacatcattaattttccaactcaatgaaaatatgtgaagcccagcatctctgttgctaacacacagagctcacctgttgaaacccaagctttcaaacatgttgaagctctttactgtaaaggcaagccagcatgtgtgtccacacatacataggatggctggctctgcacctgtaggatattggaatgcacagggcaattgagggnctgagccagaccttcggagagtaatgccaccagatcccctaggaaagaggaggcaaatggcactgcaggtgagaaccccgcccatccgtgctatgacatggaggcactgaagcccgaggaaggtgtgtggagattctaatcccaacaagcaagggtctccttcaagattaatgctatcaatcattaaggtcattactctcaaccacctaggcaatgaagaatataccatttcaaatatttacagtacttgtcttcaccaacactgtcccaaggtgaaatgaagcaacagagaggaaattgtacataagtacctcagcatttaatccaaacaggggttcttagtctcagcactatgacattttgggctgactacttatttgttaggcgggagctctcctgtgcattgtaggataattagcagtatccctggtggctacccaatagacgccagtagcaccccgaattgacaacccaaactctccagacatcaccaactgtcccctgcgaggagaaatcactcctgggggagaaccactgacccaaatgaattc

SEQ ID NO: 150 - DNA, 1560 bp, Homo sapiens
atggatgctgatgagggtcaagacatgtcccaagtttcagggaaggaaagcccccctgtaagcgatactccagatgagggcgatgagcccatgccgatccccgaggacctctccaccacctcgggaggacagcaaagctccaagagtgacagagtcgtggccagtaatgttaaagtagagactcagagtgatgaagagaatgggcgtgcctgtgaaatgaatggggaagaatgtgcggaggatttacgaatgcttgatgcctcgggagagaaaatgaatggctcccacagggaccaaggcagctcggctttgtcgggagttggaggcattcgacttcctaacggaaaactaaagtgtgatatctgtgggatcatttgcatcgggcccaatgtgctcatggttcacaaaagaagccacactggagaacggcccttccagtgcaatcagtgcggggcctcattcacccagaagggcaacctgctccggcacatcaagctgcattccggggagaagcccttcaaatgccacctctgcaactacgcctgccgccggagggacgccctcactggccacctgaggacgcactccgttggtaaacctcacaaatgtggatattgtggccgaagctataaacagcgaagctctttagaggaacataaagagcgctgccacaactacttggaaagcatgggccttccgggcacactgtacccagtcattaaagaagaaactaatcacagtgaaatggcagaagacctgtgcaagataggatcagagagatctctcgtgctggacagactagcaagtaacgtcgccaaacgtaagagctctatgcctcagaaatttcttggggacaagggcctgtccgacacgccctacgacagcagcgccagctacgagaaggagaacgaaatgatgaagtcccacgtgatggaccaagccatcaacaacgccatcaactacctgggggccgagtccctgcgcccgctggtgcagacgcccccgggcggttccgaggtggtcccggtcatcagcccgatgtaccagctgcacaagccgctcgcggagggcaccccgcgctccaaccactcggcccaggacagcgccgtggagaacctgctgctgctctccaaggccaagttggtgccctcggagcgcgaggcgtccccgagcaacagctgtcaagactccacggacaccgagagcaacaacgaggagcagcgcagcggtctcatctacctgaccaaccacatcgccccgcacgcgcgcaacggcttgtcgctcaaggaggagcaccgcgcctacgacctgctgcgcgccgcctccgagaactcgcaggacgcgctccgcgtggtcagcaccagcggggagcagatgaaggtgtacaagtgcgaacactgccgggtgctcttcctggatcacgtcatgtacaccatccacatgggctgccacggcttccgtgatccttttgagtgcaacatgtgcggctaccacagccaggaccggtacgagttctcgtcgcacataacgcgaggggagcaccgcttccacatgagctaa

SEQ ID NO: 151 - DNA, 37135 bp, Mus musculus
  misc_feature (3625)..(3644): "n" at positions 3625 to 3644 can be any base
  misc_feature (29292)..(29311): "n" at positions 29292 to 29311 can be any base
  misc_feature (32697)..(33214): "n" at positions 32697 to 33214 can be any base
  misc_feature (34975)..(35306): "n" at positions 34975 to 35306 can be any base
  misc_feature (36024)..(36502): "n" at positions 36024 to 36502 can be any base
ttggcagcagggacaagcagaaaaactggggttttgtctccaaaatcactgagaaagggattagagaaagcagaagccaaatggggtgatatgtctagggtagcaggtgttccgagaggccccagagcccaggccagtgcacacaggcacagatatttccccctgcagggcaaggaaatggactggtatttcaacttccagctattgcttcagatgctaagaacttgcctgaccctgatgctaacctcccctccctgacccacagtgtcagaatctggtgctggtgacaggaaaaaaacaggcgggtattaggggagggagggagggaggtgtgtgtgtgggaactaataggctacctcaccagccaccccacccccagccatttctaggtcctgcacagaatgccagctgcccatggccctggtgggaggaggtttccacggtgccttgtgatacacactgggtcgctgagaggggtgaactatagacatcaggcctcagggagatcacagacttgtgtgtcagagtgaatctgcatctggggtgataagtggggttaatctcaaggtcagatctagccaatccattttcatgccaacttggccctgggtgccctgcatggtggcagctgagactcggatgtcccctttactagagatggtgccttgcctggcttgtctccccactatggttatcggtttccaatcattacctttatttctattccattacctagagatctaaggaccctgaacggtccttactgttcgctgttttaggagactcagaaaagaaatgggattgagagtgaaggctcatgggaaaggatgtccagcctgagggaggggcggagccctaacccatcaggcatctcagatagatacacaaaccagactctcagcctctttgctctgctccctggggttcatcgcactgccctatgctctcgggactcacctcaggctctgccttttacaggctgtgactgtcaccatgttcataggaagaggggggactaggaaagctctaagaataagctggagggccaaagtagactccagcaggactcagagttgctaaggtgatagagaggaggcagtttggagaggcaagaaactgggtgagttggctagctgtctttgcagcagttaaccagagactagagagtgagaaggacttccatacagggtctctggtgttggagtgcagggagtgcaatgtggctagggtggggtgggtgaaggaagatctatgctgtccttcctttaaggaggaatgtgtccagaggggactaaaaaacagaattccaaacaactcatgaacagggccaggccagcatcttcttgtccccagtccagcccccgcctctgaagcccccccccccccgcacacctctggaagccctcctcagcacccccaccccaccaaagcccacagccctggggaagctgtgtggccttgtcaccacggacccagtgtcgtgccggctgtggcttcttccttctgacctattttttaatcatttgataagatcccccctcccaaaccaaaccccggcccccgggcccgtcagctccaccgcgtgtcaaaaccacccttgtcagtttgcgttggtttcttagtccagtagcccctcccctcagggcctgagagcgaaggctaattacccagctgctgagtgcattccccccaccccaccccctgctactccacccccagccccaacagagggggccctggaggcctgctgctagaagaagctggggcctcctttccctcctattgcagggcaggaagtccttcctgctgtctaacctccattcttttctctgtcctgcccctagtggtgctgaatggcagatgcaaggactgatattctagactggaagggactttgaggcatcatctcctttaaggaaagtaaaagtcgcagcctcctgacctggatttagagatgtcctcctgggtctcacagaattgtaggggatggtctctgccaagggtctcaattacaggacagaaaactgagatgcagcgagagaaaaggacaggcccaaggtcatgttcggctggtggggtagctaggatcagaacccagacctttctgtctttctgtctgttgctgggtctccctcactccattctgtttcagtttctccctacccgtgtgtgtgtgtgtgtgtgtgtgtgtgtgtgtgtgtgtgtgtgtgtgtgtgtgttgatacacactctatgggagcttgtggaggccacaggtcagtgttaggcatcttcttcaacttggtcttcaaatacatttatttaaacattttttttctaatgcgtgcaagtgttagcatacatgtatatatgtcatcatatggatgtgtggtgcccttggccgccaaaaggggagttactgatgtttgtgaaccaccatgtggatgctgggactggacctgggtcctttgcaagagtagtcagtgctcttaaccattgagccatgtctccaaccctccccgcccacacacacttttatttttggagatggggtctctcactgaatctggagcttgccagtgtgactggtctggctggctggtcactgggtcccaggaatcctgcagcctctttcttcccagagctgggataataagtggatatgttgtgcttaacacagaggtgtgggagagttaactctggtcctcatttcttgaaacgagccctttattgactgagcccatttttcattctgtctttgtttttgagacagagtcttaccatgtagcccaggctggcctggaactcagcatcttcctaccttaaaccccccccccccagagtgctgacattctaggcatgtgacactacacccaccttattttctcagtgactcagtccttattccctgagcaaggacatcacttcgtgccccttgcgagcctcatcctcaggtctggggttgtccagcttgctccatacaccattagagattgatcactcctccagcgtgtagctgctgtcccctcttccctcagactatcagctgctccatatcaacttaccctgtcacattatcgagaagggcaaagccaagggtctgtgtgtgagagaggcctcaaaaaggaggccctgcaccaggtatacaggcatacaatagagtgcagttggactggccttgaggctctgacagacttggagatgcagagacagacagacagacagacagacagacagacagacagatacaaatccatgatagagatcacagtaagttcttggagccagggataacaggaatactcgaaaaggcagggacagagagagaccctattattcgacatcagcaggcatatttgttatgaaatataatgcggcaagggggtacctggcacaaccatgccaaggtgtgtccatgagtaactacaccacacaacagagttggtataaagaaagtttactgggagaagggagaagagcaaggacttggagcaggggtagaggcaggagagtggacatgtagacagacggacagatgggagcagactcatgggggcagagaagtggccaggagagggagcagagaaggacaggaagagggaagaaagaatgctgggaacacgtgggaacacagagagaactgggnnnnnnnnnnnnnnnnnnnnatgtaagccactgataggttcctgggaggagcctagtggaactgctgtaagctaacagtatttattgttgttttagttttaattaattttcagatagagtatactgtagtccaggctggtcttcaacttgataggtaggccaggctagcctttaacttgatcaggagtttgagatgaccttgacttcctggtcatcctgtctctacctctcaagcgctggcattatagacaagtcccaccaaggctgacaagacaggagcggttccacagatccagacagaggcagatgcggccaagacccacgaagctgcagacaggacacaaggctctagagacatgtgcaggccaccaccaccaaggccaagaaacaccaacggaaaaagctgtagtcctggtgcttaatcccagcactcgataagcagaagccggcagatctccgtgagttcgaagccagtctggcctacatagttgtaagccagccagtgctacagtctcagaaaataaaggaaggaagaagacagagagagctacagacagacagacaggctcaagagcctgggagaaagcagggctcatgcagatggtgaggttagcttgcccggcctggcactgctggactgttcaggaagctagatagcttcccgaggagacagggacagaggagtccagctacacaggagttaaggttggctctccagccttgccctggcttctctctcccttccctcctcccaggctccctttacccaaggccctggcattcccccacccccacccttggtaaccagaccctgcttcctgctgagattaaggcctgcctgccagattctggggtggggggggcaacacctcccctagggccttcctaaagcttgtgctcaccctcagtaccctggcagcctctgtgattacagggttgctccagtgatagcattaagggaaccctcatccctagacatggggtgcctgtggaaaagttaggggggaaaggaccgtagtttgggactgagttgttgttcaggaccagagggtaaacggtacccatcttaagaggtattcagagtggcaaagggtgaccctcaacccggacatgagatcctgaagcccttgaccttggagtaaaccccgggtgctggctactggggattccgacctcttgcagctgtcgcggttgggggtggggtgtgctgtccaggtgctggccactgccctgccctctccctgctaagccgtcggttccggccatgggcatagccatgctctctgaggactggctggtctgggccctgagctgggagggctccagggtgggtggataacagtgggatgtgagcagacctgaaggcaggattgaggggttatcttgaggaggactctgtgtttggcatgtttatgtacatgggaggaaccggtgtgtgcaggaacctatctgggttgccagtctgcctctgggcataagtggcctgacgtacaggcgagatctgaagtgcatggtcactcacctagctgggagctcttgggggagaaggctaattctaagttttcagagtccccaggcctagttgattacaaccggcaggaaatggtgtacggggtcaggagggaagcaggcttgcccctactcactgagaggagtctcctgaacaggttcgcttctggccccaggtcctagtggaggagggggtgagcatgaggggtcttttgtggaggacccacaaagctagatggaagacagggaagatgtgggtggctggaagcaagagacaggcagacaaggcagcacagcctgggcctccattcccttccttcctcagggcaaggctctcggcctttagagtccaaatgaatctttttcactgacaaggaaagcagagctgtcaggatgcagggcaaaggtcacccagagagtgaggcttggacttggggggttcccaccaagccacctgtggaagatattgtttccctttgtcaggcttttgataccccaaagccttttagcttctgaggtctttgctttcaagggcatcccccttccttgttctctccccccccccaggggcctgagactttctcactgagtcacagctaaggctctgacttcatggtttcttgactctgaatctctcctgagcatatcctgagccagggactccttcctctgagcgcctcgttcaatcactgttctggcctctgtggttccaaggcagagacttggctcctggtgccctgggctctgggccaccagccctacccaccccccactccgtttctatccttcactgcaaccctgggatggaggacttggtcctgcacacatgttcaggagaggatcaggcccactgatgcacctgagaagggagaatctggccgtagagtgtccaccagggcactggaacgcctgcgatgtggcttcccttgcctttcatccacctattccctgtccctggaagtttctgacttggagatagcagagaggaagagggaggatcctggacgtgggatgtgaggcatcctcaaaggctattgtcaccttaagttcttaactcaagacactgtcgggccccagcatcaacattgtctaaggagcaagtcccagaaacccacatgacagcttgctgggacaggtggtggcttagaggaatgaccagggctgtgtggccttgggagagaatccctggtactctgtgtcttagacttgaaagaagtcttgcgcacttgtagaacagcacatggtgaggagaaccagtgccaagttggagggcttaggctcagccctaagcctggggtgggaggtggcagtctctccccgctgctccctgtttccctaatcttttctaagagactatcagaccttttcttttgtgtggtgctggggatggagctacagtctcctacatgccaagtgtgtcacatatgtgcgtgcatatatacctgctataccaccatgccctcatcccttggctagttttcatttacttgacttctggaaagaacgctgggctggtcatctacctcagaccctccgccctagctctgtggctaacagggtgtgtgacttctgaagtgttctgtctcccacgttccccagggccagcctatgggtagcacgtactggcaggatgagagaggggctgggagcagcagccacagggcagagaggggatcccaagggggcctcctttcctcaatcctggcttcccacctctctagccctggagactgggaaggggggttgaggtggcagcaggaggtgtcactgtcggggttcttcttctcacccaagctggcagaggggcgggactggcagtggtgacaccagggccactcagcccccgcttttcacaagcactttcttttttgggtgaaagaaattagagggagtgggggggtgagagtggtgagaatctgaggttaataaggcaggctctatcgacccatcaggttatggggaaaccattctcgggcccccctcactccaaagatgcacttccaggaccacccagctgtgatagtcattcccttctgctctgaagagcttgttgggagcatagaacattttgttccgaagcagggggatggctcacttgacctgaggatcagcgtggaagatcagggatggaaaggctgaggaacaagactccatttggcctttcacaatgggacactcagcaaaaatgctcccccaaagagttgtcggtgttcaaaaattttacctcctggggaaatcagtcatttgaatgaatcccagaaatctattttccacaatagggagccaagggtgcaaaggtcaccttctttcaagtcctggtgtctcattttgaccaacaacacacagaagcctttatgggcgagtagggggtgagggagtgaggaggaggccagacctcgatatctgctgctgtcatggatccaggcctcattctcaagagctgtgctgattgtctgcccccacctttccctgggtcatgtctgcctcctggggtccctaacttcaccttcccctggcagcctgtctcttggttcagctctagttggaaggagagtgtccccctgggtccctacgggtgaagtcctattgggctgggacagagatgtagagatgaagtcacaccccaggggagaagtggggtggggcagagatgagggaaagaaatctctttttaacgaaataaaactgcatggaagtattttttgaagcattctttaagatgtaaatctttatatatttgacatgcaaaaaaaaaatccattacaccgtgctgagtgaagaaaaaaaccaagaacccacgtggtaaagcggactgcgaagttgatgtaaaattagacatctgtgtgtgtgtacaaaagacagagacacaggagggtctatacaagggaggtatccagaagggttttcttaaaatgttaatacgggagctagtatgggagggtggtggtttgtctgacttctgtttttcttcactgcctagattttctgtacagaggatgattttagtcctgaggccagcaagatggctcagcagttaaaggcacttgttgtccaagcctgatgacctgagttccagactcagaacccacataaggatggaaagaaaggactgaccccacacagctggactctgaactctaaacatgcaccatggcacagatgtccacacacaataacaagtaacttgcttcctggcggtgacgccctccctctgagattatgcctcactcgcaagggtctccttcatcactctccagaagaggagaagaggaaacacaagaaaaagcgcctggtgcagagccccaattcctactttatggatgtgatatgcccaggatgatataaaatcaccagtctttttttaaaattaatttatttattatatgtaagtacactgtagctgtcttcagacactccagaagagggtgccagatctcattaccgatggttgtgagctaccatgtggttgctgggatttgaactcaggaccttcggaagagcagtcaatgctcttaaccgctgagccatctctccagcccaagtaactcttaaacgatactttacttcttatttacttacttttgagataagatcccctgtaacccaggctggcccaaattgtagctgaagatgaccttaaacttctgatcctctaccaaccctctcaagtgctgggatgacaggcatgtgccaccatgccccatctatacaaagctgggggtggaaccagaagcgtgggtgtatgctaagcaggcactccatcagttgaactatatcccagaccccggggatgctttttatttcaaaagaaaactcccaatggattcattttcagttaggaggtgagattcttctcaaaatgcaggacttaccgtagttattggaatagaacagcggaggaaggactgtctgtctccatcagagcaggtgctgggctccctgtcagccagcttggactacatacctttgtttttttctataatagaatggaaacagaggcacacagacaccggttggtataaggtacacagcccctacccccaatacgaatatttatttccccagcctaccccatcaggcctgagggactttcaggcaaaggaagtgacttacccaggtcctacacacccgagtcacagtcagagtcagccctgggactctgaacactgacagccaagcgctacttcccgtgtctttcgctagctgttacgctgccacgtgaacgagcttttgtgggagcatttcagccagcccagcccaccgtgggctgctttgggtgcaatcttcttgggagacagcttccaagtttcctcctgggctagagggacaagcatcatcctcgggcctggggggtggggtgggaggctagcgatggggggtgggggcggcggacaagagacagcgagcaaacactttgtgtaaagtcacaaagcctgggcatacaggaggcagcaacaaatatctgttgactatggatagtctaagtagctctgagcctgccagaggcgtgagaatgctcagatggtcccatctggggaaagggcctttgctgtgccttccaggactggcggaacttcctgggggagagaaaccgtttctctcctcgaagtttcagagtttcaggtggcaggttgactctttcccagattggggcgacaagagacttacacttaggagtgggggtcggggcttcagtcctcaccaaaagcgaattcgcgctgtattagccacgagggggcggggcggggcggggccaaggtggcggggtgaggggacccaaggagcttcataaagccacagcaaaggccgccgcgccgctagtgacagcgcgggctgcagagaaagcccaggagcagctgcgcgcctatccaacgcgcgctcaggagccaagcgtcccagctcccgctccagtgaagtttcattggtcttcggacgccgcccccgtcgccccagccctaaggaccctcgggtctcttcgacggctgctggaaggcgcccagcccgcctcggatgggcatcgtggagccgggctgcggagacatgctgaccggcaccgagccgatgccgagtgacgagggccgggggcccggagcggaccaacagcatcgtttcttctatcccgagccgggcgcacaggacccgaccgatcgccgcgcaggtagcagcctggggacgccctactctgggggcgccctggtgcctgccgcgccgggtcgcttccttggatccttcgcctacccgccccgggctcaggtggctggctttcccgggcctggcgagttcttcccgccgcccgcgggtgcggagggctacccgcccgtggatggctaccctgcccctgacccgcgcgcggggctctacccagggccgcgcgaggactacgcattgcccgcggggttggaggtgtctgggaagctgagagtcgcgctcagcaaccacctgttgtggtccaagttcaaccagcaccagacagagatgatcatcactaagcaaggacggtgagtgaggtgcgcgccgagcgcagcgagctcgcagggcggagccggcgggagtctggcctcggtggcccgccggaacaacgactttcctctttttttttttttttttttttgaaatcaaaatttgaagctgcaggttgctgagtctttgtgttcgtagactgagcttcagttttaggagacgggggagcagggttgcggggagggcaccgcaagctccggagagccgcgggtgctgagggtatcagagggctcaaaaaggatgatgctgtgggcgcaattagaagttactttggtgcagaggaaaggatgactctcgcttcaccgagagttggccggtggggggtggggggtgggggactggagggggttaatttgctccttgcctcagtctgggatctcagtgggcagcgaggagtgtgtgttatagacctgactgaccgcctttcggtccttaggtattcgggaaattgaagtgttgggggcagaatattttttgagatctcagtgtgcctgttcctttgctactgctgtgcttagggtagctttggtgtatgggggagggggggagcagactgggatttggtgacatggagaagcggtcgccaagtttcttttccggtcttactttgagatcatatgtctagagagggagagagagagagagagagagagaggagtgtgtgtgtgtgtgtgtgtgtgtgtgtgtgtgtgtgtgttgtgtagagaggtgggaagcagcaaaacttataaaggcacaaataaatgccgagggcctgaacgtgccaagttcaagaccagttgcagctggtgtccagtcttgcactgtgctctttgaggctagtccctaaaaatatgtccactttctcacccagctattcatcagtccagcctgggggaagatggagggggtcccctaagcctgttgcattagtggtatggtttgtggctcagcctgctgcttccggatcgagtctctttgctgaagaaagagaaacttgcagtttctgaggggtcatttatagtatgcaacacctcgagtggaccctcttgtgtcttatgggaagaggcagctacctttcccagtgaggaccagccagaactttgccattagtgagttaggatgtgcggtattaggatggagactcaaaatgtaattgagagattgcaagggtggggtttctgggagggggacagaaacccttgccggatcccaggaggcactgctagagtatattcccttcggatgatgtggggagagggcagatagctgctaactacagctggtttcaggctgctgagttcttcctcgcggggatgaactgagaataaaacatttgattggtttttggctcatccttcatccgcaaagacttctgaggagtttcctctgctcccccaatccttctctgagtgtctctggcactggccaggttgctggtcctagagaatgtctgaactggaaggatccagaagtccctgtctctcactgcatagagaaacagacctagagacagcaggggactcttcggaggttccccagctgggaccaggcctcagatggcacctgtctgctccttttttctccattctccacagccacctacactgtctgaaagccctgcgtggtacacccaagtgctttcgcttccattatttctaggcgagccaggcagggctggcccgtttcatacccacgaattctgagttgctgggataaccagtggcttacgctagtcccgcagtagactaggtggggcctctaaccatgggactttctagtatgtcagcaacaggaggccctctcatcccggggcctggccagtcctctcaatgccttgtcaggcctcagctcctccagtcagagagagcatcagccacaacctcagtgatggctgagctgggctggggcctgtctgtctgtgggctgggttgctaggggaggcatttggagggacacactctatatcactggggcctgtctgtctgtgggctgggttgctaggggaggcatttggagggacacactctatatcactggggcctgtctgtctgtgggctgggttgctaggggaggtatttggagggacacactctttatcattggcctggctctatggactcctctcctgtgtgcgcctataggatttttttcccatgaccacttttgctctctcccgtttggatcggtgctcttattattttaagtgctgtaattggaacctggggcctagtgtatactagtcatgtttttttgtttgtttgtttgttttaaagccagctgtggtagtgcaccccttaagtaatgcacacgcataattggaaactagcctgtgctacatagtaactttcccctccctctttctttctctttgctatgtagcaaaggcctcctttgaacttcagctcttcctacctctgcctccccagtgctgggattacaaggatgtgccaccacgcatgtttgacactctgtctcaaggaatcaaaactagtttacttttcaatgctaagaattgaacccagggccttatgtgtgctctgcacacacagtcacactgctactgagccacatctttaacttcttttttttttttttaagatttatttatttattatatgtaagtacactgtagctgtcttcagacactccagaagagggtgtcagatcttgttatagatggttgtgagccaccatgtggttgatgggatttgaactccggaccttcggaagagcagtcgggtgctcttacccactgagccgtctcaccagcccaatttcttattatgacaaatcacactgtataaaaataaaaggccaggcgtggtggcacattcaatcccagcactcaagaggtagaggcaggcagaactctgtgagttcgaggccagcttagtctacaaagtgagttccaggacagccagggctacacagagaaaccctgtcttgaaaacatcaaacaaacacacaagaccaaaaacccaaaaaacaaaaataaacataaaagtagaaaatatatcatcaggcttggctttaaaactattcagtattggtctggtcttttttgttgtgagttattttgcttgtttggtttttgttttctttttgactcggggtctcactctacaggctcagcgggcctggaactcactatagagatggggctaaccttgaacttatagagattcctctgttcttgcctcctgagtgctgccattaaaggcatttgccaccttgtgggtattttgagataggatcttgccttgcaatcaagattggtcagcaattgttgatctttctgctttgaatctttatgtttctctgaaaatgaatttcggttgagacaagatcttaattcatgtattccagattagcctggaattctcaacccacctgcttcaccctcgggaatgctgggatcacaagtgtgcactgtaaccatgcttgacttaaaagtggaattaaaaaaaagggggggctggcaaaacggctcattgggtaaaggcacttgctgccacacctgacaacctgggtttgattgccctgtgggtttgattgccagggcccaaatggttgaaggagagaattgactcccatagattgttctctgaactccaaacatacactatgacatgtgggtattgtccaccacttgcaccatccaagaaaagaaaagtaaaaataagaaaaacaacaacaaaacaaaacaaataaaaaacaaaacaaaacaaaaaaatcaaccagggttgaagagatggctcagtcagtgaagtgcttgttttgccaacgtgaggacctggcatgaggcagagactggccggtggatctgtgtaaattcaaagccaggtctacagagtgaattccaggacagccagagctataaagagaaactccatctcaaaaaacaaacaaacaaacaaaacaaaaacaaaaaataaaaaaatagccaattacctaggtatggtggtgttcgtaatacctggccagccagcctagagtaatcagagacctttaggccaatgaaagacccttgtgtttagatagatagatagatagatagatagatagatagatagatagatagatagagtagacagacagacagacagtgcctgagaaattatatctgagttgtcttctggcttctacattgacatgggcacacatacatacgtgcaagtgcacacacacacacacatgaataaataatttaaaaaatccaattagcacacctaaaaaagaaattcctaaatgccttctgagtgtttcataagagtgtgctagcatcatgtgtgtgtgtgtggggggggcaatcctcatattttggatcctaaggccacactgcatgacatggggtccctgttggatggggcagtgactccccatcatttcctttgatgcctctcttcagatcagatcccaggggtcccatcctggaaagcagacagggaataccacatcagttcagccttaccaagccctgtggcctctgtatcttccaagtttgagctccagctatctgggaggtcctggctgtttccttttgctgagagttttgggctcagagcagagtcctttcagtcctcctgctttggcaggctggcctgtccctctgtaggtttcagtgacctgtaagtcactaccacatcacccacggctttctttctttttgaaaaattcttccatcccagacctagccacagcccctcagccgttggtcctgggctgactcagtctgtccctggtccctcctctcccacccaccctgggctcacccactagtatggatctgtggtagcgatgcttttggttctgagtgaagaacagggggatgacggctgatgagggcggttctagtggggctcagagagggaaatggagcacaagaagagtttgaggtgagccagagaaatggctcagaagtgagggtgcttcctgtaatcctgacaaactgagttcagatccccccacatactcgtgcggagtaggttaccccaacacgcaggcatacacctccctacagaataaaaataataaaatgtaatacttgtctttttctttggttccccctaccagggattttgagacaggctgccctggaactctctctgtagaccagggtggccttgaactcagacatctgcctgtctctgcctcccaagtgatgggattaaaggcatgtgccaccacctttctattagatataataccttaaaaacaaacaaacaaacaaacaaacaaacaaacaaacaggaagaagagtctggagtctccttggtgcacttttggagcaacccgggagcactgcgtgcaggctgagccagtcagtgtgtagtgaatggtaaatacaaataatagccgtaggacgaaaggctttctcagtaggcaagagaggccggtccccgtgggcgtgtgggtgggtactaattgctggtaatccccacttttctggctgtgattggttgattattataattaagataactttggggagagctggtgttaagtagctcggtttgcagatgcgcttggttatgtgacgtccgggtggcgaaggcgcttcctacttcatgtgaggtagtgccacagcgccttagtgtcttttccccatcgtctcaactctcgaaatttttaattacttttttttttttacttattattttacttctaaaattacttttactttttaaatatgtttttatgagtatatgtgtgtgggagggatcatgtatatgctatgagtatggaggagcctatagagattggaggtcagagctcctggaactggaattatataggtggtatggagcctatagagaagtctagtacagcaggcgtggtggcgcacgcctttaatccccagcactcgggaggcaaaggcaggcagatttctgagtttgaggccagcctggtctacaaagtgagttccaggacagccagggctatacagagaaatcctgtctcgaaaaaccaaaaaaaaaaaaaaaaaaaaagatgtcaattatgggtcctctgtaagggcagaatgtatttttagccactgagccatctctccagtctttcatttctttttctcttttggtaagacagaggctcactccaggctagccttgagctccctgtatccaggttacccttgaatgtgcagcacaccttttgcctcaggttcctaagtgctgagattttaagtgtaagacactgtatcccactaagctttcagactttttttttttaatttagatttattttatttgtaaatctaatgtttggaattataaaatcgaatgtttaataattactcatctaatgaatgaatgctttgctcatgtgtatgtatgtctgtacacaacatgcatgtctggtgtgctcagaagtcagaagatgatgttgaaggcagagttataggtagttgtgagccaccatgtgtgtgggctctgggtattgaacccaaatcctctgcaagaacaagtgcttcttttttttttttttgttttgttatgagacagggtttctctatgtagccctggctgtcctgaaactcactctgtagaccaggctggccccgaactcagagatccacctgcctctgcctcctgagtgctgggattaaaggcgtgcaccaccacacccggctataagtgcttctttaaaaacaaaaaaaaatatttatttttattttatgtacatcggtgttttgcctacatgtatgtctgtgttgagtgctggatcccttgaaacaggagttacagacaggggtaagctgccatgtgggtgcttggaattgaaactaggtcctcttagaagagcagccagtgctcttaagtggtacaccatctctccagcccccaaaacaagtgcatttaattgctgagccacctctccacccatggattttttgttgttggtggtgctatattaaacccagggtctcatggatgctaggcaatcaatggttttttttttaatttttttttttattttttaagtactttgatgttttgcctgcatgtatctctgtatcagggtgtcagatcccctggaacgggagatacagatacttgtgagccgccatgtgggtgctaggaatagaacttggatcttctggaagagcagccagtgctcttaaccctgagctgcctcgccaaaccctaaacatgcactcctatactgagttgcgaccccaatttaacttctcacatctttacaaaacacttgtttcaagagtcctctttctcctcctccagagtctgggcccatggactaagaatctcaaaatctcttggaaacggctactcagaaaagcctagctgttctttacctgctctgaggaggactcagctggtcaatcccatggaaagttgattgatgtctgaaactagtcattgctttgttgttggagacagtgtctcactgtgtagccttgtctggcctagaactcactatgttccctgccatgtcccacagccgtgtaaaaatcatcgctaggcgggttagccttggggcagcagagagtcatgggatcttgactctgtaagtagttttaaggaggtcaacttggtagcagattcatctccactactggtttcttcttagtaaagcaacatgtagatcagggagctatttggggattctagctgctggttatttcagtagtgtgtgtgcatatgtgtgtgtgtgtgtgtgtgtgtgtatgtacatgtacaagtgtgaacatttgtgtaaaggccattagttaaccttgaaagtcattcctctggaatcctctctgtctgtctgtctgtctgtctgtctgtctgtctgtctctctgtgtctctctttctctgtctctctctccagaatctctatatgtaggctggcttcaaactcacagtgatctgcctctgcctctcaaattctgggattaaaggcatgcgccagcatgcttggttcatttattaattaatttgtttgtttgtttatttttgagacagggtctcattagcctagagtctaccaagaaggctaggctggttgacaagaatctaaatgtctctgcttccccagttttggaattctaagtagatgtcaccacaccagatgtcaccacaccaggctgcctcttcctcttctcctcctcctcctcttcagtgtgggcactgggtactcatgtcttcgtgattgtgcagcatctcgccatcttttaaagtgaaactaagaccccccctcctttgcctttcacttacaatcttcctgtatcttttgtcacccactatcgggacaacagtaggacagatggacagaaaccgtagtgtggggtattcatcaatctctctataagcttcagtgtcttcaggtgtagagtttcaagacgttttgtttctccaaggactgtcttgatgagttggcttgtgcgtaagtggaggatggataaacatagtatgaggctgggtatggggcttagtggcagggccctagcctaacatccgcgaggccctgggttctatatttggcaccaaaaaggtgtttgctattctgttcctttagaatagaaaatatgaatgagacctggtcactaggtaagaaaatatatatgttttatgtttttttatgtgtatgaatgttacgtcttcatgcatgtgttacaggtagttgtggcccatcatgtgggtgtggagaatcaagcccaggtcgtctgggaaagcagagccatctctccagccaccttaccctcttaagacagagtctccctgtcccgtagctctagctaccctagaactgcatacgtagaccaggctggcctcagactcatggagatccatttgcctttccctcctgagtgctgggattaaagacaagtgccaagccaggcatggtgggtggacctctgtgggtcagaggccagcctggctcacatagcaaattctaggatagccagaattacatatgaaaccctgcttcaaaataataaaatacgctaggcagtggtggcgcacacttttaatcccagcacttgggaggagaggcaagcagatttctgagttcgagaccagtctgatctacagagtgagttccaggacagccagggctactcagagaaaccctgtctcgaaaaaccaaataaataaataaataaataaataaataaataaataaataataaataagcaagcaagctaggcagtggtgacacacacctttaatcccagcatttgggaggtagacccaggtggatctctaagtttgagaccagtctggtctacataacaagttccaggacagccagggttacacagagaaaccttgtcttgaaaaagaaacagggcaggagaggtgtctaatggctaagagtactgactggctgctttcccaggggtcctcatttcaactctcagcaaccacatggtggttcatgaccatctatagagagatctgatgcccttttctggcctgcaggtgaacatgcagcagagcactcatatataaaataaaataaaataaaataaagtctaaaatgttttttaaaagcaacaaatattaataaagacatgcaccaccatgcccaactccctattttttaaacttatttttatctacatgtatgtgtgcttttgtgagtttatgtgcaccgtatgtgtgcaggttcttgtgtaggccagggcctgttgaatctcctgtagagttacagacaacttgtgagctgcctggtgtggttctgggaaccaaaccctgatctacagaagagcattaagcgcttcaatttcagaaactacaatctgaatggcttaaagtgaatgggtgagggaaatggattgaaaatattctccccacctcgggttttccatacttagctcttggtctagggatgtagcaaagctggtaggattcttgtctaaaattcactatgtcttaggtggatccctaacactacacaaactgggtatagtggtgtgcaccctaatccttgcactttggaagttgaggcaggaaaattcagtcatccttagctacattgtgagtttgaggctcctctagtctataggtttcttgattaagagacaaaagctttcctatcccatgtggctccctgagaggtgggatgtgggacctaaagggatgtccagtgagtgtttgaatctgttgttctgaccacaccgctctccccgccccctccccactcccagctggggcacaaaggcagagctcagtcattggaactggtgatgcagagactgggcatggtggctgtggcagtgaaggctgtggctagagtggacagaagagatggtgatggtagcgcttggagacaagacggctgtgatggtgataatgaaagtcaagactagcgtaatggcaactgtgagtcagtggctgtaactatgatggagatggtgggtgtggtgacgggagtgacgatggccatggtcatggcggaggcgtagccagagtgagggtgggagtggtggctttgacggaggtggtggtttgagagatagaagacatggtgaaatcgatggatatattaataagattgtagagatggtagctgcagatgtggtggaggtggtgtctgtagagatggaggtagcggtgtctgtattatggtggacatggtggctgtattggtggtggtggtggggtggaggtggtactggagacaacatagctgtaatcatggtaatggcaacggcaatgattgtggaagtgatagtaacaaccctggaagttgtactggtggagacggtgtcaccgtgatggtggagatagcggtgagaatgatagtggttgtgatatggaggtggtggttgtcgtgatcgtgataatggggggcagccatggtggcggtggtggggaggcctttgcaggagagcgctcccttttctgatgctttcactttagaacaagggagggtcacgcagggtcccacccacccaccaacctgggacccaagactaagcataagaacgattagagccttcaggatgcctagggtgtttgatgagtttctgaaggccagacttggggcagggcacactatagatgtgactggagtgtgggacagggaggacctgtcagtgacttccatggggcaggagtgtgttgcagagcgggagagtcatggtggagctgtggaactcaggcacacccaccttctgggactatctttaaagggttgcctggtgcctttggcccatgcaggaagctcactaatgttagagacagtggtttccagataattatctagtaactgatcttttgagaggaaagcgttatcaaaagtctgcaggctgggatgtggctcagtggtagagtgcttgcccatcatgcattaagccttgggtttaatcagcagcagtacagaggggtaggcactgatttactgtgtctgctggtgccctgcagctgactctaagctaccaacatgacagggttgaacacagaattgggggcaatgcacagtagccattgtctctgttcttcagctgcctcagacaaagacacaagtaagctcaagccggggccacagtacaacacgtcagagcactgagaagagactcttgggttgtgtgtaccttggcttttggtagaacgtgattattgttaagtgtgaacaatttaattttgtttttgtttttgttttgtttttcaggacagggtatctctgtgtagtcctggctatcctgagacttggttttatagaccaggctggcctcaaacttcagcgatcctcctgcctactgctcttaggtgctaagattaaagatgtgttctaccacactggctagtgcaatttaactttaaaaaaaagatgtattgctgggcgtggtggcgcacgcctttgatcccagcatttgggaggcagaggcaggtggatttctgagttcgaggccagcctggtctacaaagtgagctccaggacagccagggctacacagagaaactctgtctcaaaaaaaaaaaagatatattattaattttgtgtgtgtgtgtgtgtgtgtgtgtgtgtgtgtatggacatgtgggtgtcagtggaatccagaggcattggatcaccttggagctggagttaaagactgttgtaagctgacgtgggtgctgagaactgaactcagtccccctggaagaacactatatgctcttaaccattgagccatttcttcagtcctatgaattaattttctgttacacacacacagacacacacacgtatatttaaatttatttatttatttatttcatatatgattacactgcagctgtcttcagacacaccataagaggactacagatcccattacagatggttgtgagccaccatgtggttgctgggaattgaactcatgctctccggaagagcagtcagtgctcttaaccgctgagccatctctccagcctacatctatatttaataactaacaagctagctaccttctgacacacttgtcagttggctcttgaggacaagtgaaggccggctacagcttgacacatgcacacaggtgactgccactgagccctggctgatggtccctggaacttctctgttccccacaggcgaatgttcccattcctgtccttcaccgtggccgggctggagcccacaagccattacaggatgtttgtggatgtggtcttggtggaccagcaccactggcggtaccagagcggcaagtgggtgcagtgtggaaaggcagaaggcagcatgccaggtacaagcttcgggagtggtgggcatgcgtttcctcctagacagggcgccccctggtggattactcaagcccttaccccgatgtgaaggattgaaccctacagcctatccacccacctcacccttcctttggcttcttacctcttctctaatttgatttaactgaggtggggagtgggggagggagaaagagactcactctgctcagtcctctgcccttatctgcccctgctcagcctgtctgtcctctcccttgcatctttctcacggtccactcagaagaggcaaaatcccacatctccagtgtctggtcgatacttgacaataaggttaactgtccacagggaaccgcttatatgtccacccagactcccccaacaccggagcccactggatgcgccaggaagtttcatttgggaagctaaagctcaccaacaacaagggggcttccaacaatgtgacccaggtaggattgtcagacccacctgcctatatgtctgagatctaccccctgacatttcctaagacccactttgtactgttggagtctcgtctcctctcctctcctcttctcctctcttccctacatagccaaggataaccatgaacttctgttccatctgctcctgagggtgagatcacaggcatgcaccaccaggcctgattgatgtggttcaatcagatattgcaccagactagacaaaggtgctagcaattgagctgctctatgccccggctccttttcttcctctctatgagtctttcctacccatctttgggagacaatgagatgggtggacactggatctctggcagtggttgctcctgggtcaacacaagtcagaacaacatgagggcttcttcactagatcatgatctgtcaccgagatggtcctagagcttcagggaatggatgttcagtgtgaaagtgactttacattgaacaattatgggtcttgttttggtttgttttacacatttacttcatccatccatccatccatccatccatccatccatccatccatccattcatccatctatccatccatccatctatccatccatccatccatccatctatctatctatctatctatctatctatctatctatctatctatctatctatctatcatctatctacttatgtagttatttacttagtaagttactcagttagttagttgtgggggagtaagttgctatgatgtgtttgtggaggtcagaggacaacttgctgaagttgattccctttttctaccacgtggatcccagggatcaaactcaggtcgccaggcttggcagcaaatgcctttatctgatgagccatctccacagacccagtcctgttttgtttttttgttttttgtttttttaaattaaacaacaaaacaaaacctggagctggagagaagattcagttggtaaagtgtttcccttgaaagacaaagacctgagtttcatccctagaacctaggttaaaagagaaaagaaaagccagttgtaatggcatgaaccagttatttaaacactgggagcgggtggcggggacacaggtggatccctagggctcactggccagccagcctacttggtgagttccagtagggatgcttaggggaagttgcatggtggtaaggtggtcgaagccacaagatgaactcaggcatcctttctagtctgtctcactgtggggctagtagttacgtaggagagtgcatctagagatgaggccagcttgaggtcaggaggaccttccttccagctccttccgtgaccctgtcaccccctggcccctctccagatgatcgtcctgcagtctctccacaagtaccagccccggctgcacatcgtggaggtgaatgatggagagccagaggctgcctgcagtgcttctaacacacacgtctttactttccaagagacccagttcattgcagtgactgcctaccagaacgcagaggtgagcccggggacgggcatctgccagagggagggtgggacagacttcttgaggaggaagaggggactcagagaactctatttccccgtctctagatcactcagctgaaaatcgacaacaacccctttgccaaaggattccgggagaactttgagtcgtaagtgttctgagttcaaatcccctttggtctttctgagatgggactgtggttcagtgctcaacatgccctgtctctgcttcaggggtctggggaccatcatattagaagcctaatatagccttgatctctctttctctctctctgtctctctctgtctctctctgtctctgtctctctgtatttattttatttatacgagtacacagtagctgtcttcagacacaccagaagagggcattggatctcattacagacggctgtgagccaccatgtggttgttgggaattgaactcaggacctctggaagagcaagcagccagtgctcttaactgctgagccatctctctagccccctcattcattgtttttatttttatttattttttagcatgtacgcatctgttgatacgagtgtcccctcgccacctggacccaactgtcaactgcttgggggagaccccttctcacctcttctatccaaccagtatcctgttcccagccgtttctaccccgaccttccaggccagcccaaggatatgatctcacagccttactggctggggacacctcgggaacacagttatgaagcggagttccgagctgtgagcatgaagcccacactcctaccctctgccccggggcccactgtgccctactaccggggccaagacgtcctggcgcctggagctggttggcccgtggcccctcaatacccgcccaagatgagcccagctggctggttccggcccatgcgaactctgcccatggacccgggcctgggatcctcagaggaacagggctcctccccctcgctgtggcctgaggtcacctccctccagccggagcccagcgactcaggactaggcgaaggagacactaagaggaggaggatatccccctatccttccagtggcgacagctcctctcccgctggggccccttctccttttgataaggaaaccgaaggccagttttataattattttcccaactgagaaaatgccgctgaattggaaggtgcccactaacttagaaaacagacgcggggctgagagccccgagctcttccccatcccttccctgtatagtgattggttggagaggaagcggggcaagaaggattctggggtttacttcttgtttcctggcccacaaggaaatacgacaggagtgtcccctgcccctttctctgcccgaactacagtcacgaacctggtgctgcttctgaccccatggttccatggagaacggagaatggactccagagagttttggacccagagggacttcatggctttctgcgaggtggaggggtcggggtggggagtccaggagagctgctctcttcccctgtccagtcagtaactttcaactgttggtctgacacctgtgttaatctctgacctgaaagtgaagatacacgcatttttacaacagccagccaaacagagaagactcaggtgactgcgggcggactgggccacctgcgaggagacaagagagggtgggtgcagaggaagggtttgaagggtgcacatttcaccaggcgaggtcactttgaaccggtgtgtacacacacgggtgtctcttttttatttcttcgggaggggggaggctatttattgtagagagtggtgtctggatgtatttcttctgttttgcatcactttctggaaataaacatggacctggtaaacacgccctccttctgtggctggtcggtaggaggtgtgtgtgtgtggatcaaagtttgctgatctagcaaagttgtcctgtgggctcttgattttggggggtaactgccaggaacctaaagtgaccccacttagggataaactcagagtatgtcttgtcctcagcactccagctgatggttcatgccaccacatgtgaccaaaggaccagcccctcagcctatgttgcctgctcagaaccctggagggaggcagtgtgggagcaaggttaggaccaggctgggtcgggtggagtttaggaaagccaggactcttgatttatctttgcatcactctccattttttaggagtttgttcaagtgttaaaggcataagtagaaattataccatgtgatgttgccactcttttgtaggtcacgatcaggcatacactagcaattccacatgagtcaccttagtacacactcgggcaggattagcgcttgatgaagtcctcagtgtgggagctgtcattgtgaactggtgtgcactctcctctctcttttccccccacccctcttatttagttttcattcataaccataaacttaactctgaaatccagctagacttggaggggaagaagggaaatatgggaccccaggcacttcagtgagagcagagattacagggtgttgcgagcagatgacgtgggggtgctttcctgagctacagaagaaatggtctggtgggtaagatgctcgaaagtcaaaagaattagagttgtccatggttggaagtggggatcttattttcctcctggttttgccattcctggacccccaaacattccatggcttccacgatgttcatgccttctctccccttcccctcagtcttggcaatgcaggtaaaaaaccagtgggaagcattaatgtttggtccagcatttgcatggacaagatgccaatgaccggggtgcttcaggatgaagttctcatgctcaaacttctccctgtagatggacctgccgccagtgccacggtggtgtgtgacatcaccaccttggcacatgaatcctagaattactctgtgagagtaggaacccttacacccaaatcctatctctccagacagagctcagagcacggaagttctctgctgcctttggaactgtgtctacaaacagcttcaagattatgttgtaacccaggctggcttccaattcacggtgatcctcccatctcatcctcccaagagctaggattacagacacaaaccaccatgcccagctttctagctctctgtttctgagagagagagagagagagagagagagagagagagagagagaatttgagtcaggggtaaatggctagttgcacagactgaccacccaagcttgatgccttgaattcatgcaacagctgaatctggtagcacacatctgccatcccagagctcctaagagatgggaggcagagacaggagggtgtgcttggcagcttaccagatgactggcacagtaggacagtaggaaaacagtggggaagagaacagttttaacttggcaagaagagaaccaacctcaaaagattgctctgatttccaggttggccttacaacatagaccaggctggcctcaaacttacagagatccacctgcctctgcttcctgagagctgggatcaaagatgtgccccaccacacccagctgtgtatgtgtatatttgtgtgggtgccatggaaaccagaagtgggtatcagattccctgaagctggagtcagatgtggttttgagcctccagatcagtgatagtttggtgggaaccaaactcaggccctctgtgacatcatcagatgctctcaactgatgagccactgctccacaccctaaaattaaaaaaacaaaacaattcaagccagttgaggtggcaagtgcctgcaaactcagcactcgggtgactgagacaggaaggcagacagttggagaccaacccaggctgcacagtgagaccctatagtgaggaaaagaataaggacaactgcaaatgatatcaaattttgctacacttgaataactgacattaccattcaacgggttagacaaacagaaatggtttataaaattgtgaccctacagaaatcacgtttttgtcttaatgaaaatgattnnnnnnnnnnnnnnnnnnnnaaaaaaaatagtctttgaaaggaacgctgtaaggttaagaaaggttttttgagctagagttatagatagttgtgagccactatgtggatgctgggaattgaacctgggccctctgcaggagcaaccagtgctcttaaccactaagccatctttccagtgcattaaattcttttgtattcatttacttgctcatttttatacggattagtgttttgcctgcatctatggctgtacacttgggtagagtgcctgatgcccacagaggtcagaagagggtgtcagatgccctgagactggaatttcagagggttgtgagccaccatgtgggtgttgggaattgaacctaggactctccagaagagcaaccagtgctttacccactgacctatctagctccacaccacaaactcctaaggcatttctccactatgttttagtcgataccatctctcttaggaattatgatgctattttgattcatgatcatccactttaaatgtaggtgtttctttcatcttctgtgttctgaatattgaatggcacatgttggtttgaagtcttgtggcaggctgggagtgggtatgtgcatgtgggtggatgttactgaggctcaaacccagggcctcgggtgtgctaggcaggcaccccaccagagagctacatttccagtctcatcgatgttaaaccaggggttctcaacctgtgggtctcgaccccccccttccaaagcactgatgattacgttgcgattcaaagttatagtcatgaagcaacaagatgattttgtgtgtgtgtgagggcagttctcaccacagcatgaggaattctactaaagagttgcagcattaggaaggtggagaatcagggctctggattctctttcacattgaagtcttaaatactgggtgatccttatcaactcacatttagtagcaaggctctggtagtccctttaagagcacttgggtgtataggagaagtggctatctctcacgggcttcccatagggtgatccgggagggtgaccctgcagagaagctggcagtggggtgctggatctgacctcgattagcttatgaagcctgaatgtattgaatgcggtggcacctttaatcccagaggcagttggctctctgtgagttcaagaccagcctggtctacataagtgagtttcaggacagctagggctatatattagagaaaccctgtcttaaagaacaacaacaacaaaagaccctcaggccacactcgcatgcaatctgttccttaagacaaagaactaacaggtgccagccatacctgttaagagtccttaactctgagggaaaagccagcccagcttcaccctccctccctttctctctttctctctctctctctctctttctctctctctctcctctctctctctctctctctctttctctctctctctcctctctctctctctctctctctctctctctctctctctctctctctgggacagagttgatgagaaatactggactgtggtcttacagttccaccttatagtcctgtctagtgccttttctgtgccccttgacaggtaggcaaggttagaccatgtaatatgaagcttgcccactgaaaacctgtaagtgtcagaaactgctctcttcatctgcatttgaaggaatacctctcctctttccacctttaaggatccattatggctgtgatagtgtaactgatagtctgtgagctcaagggtctgagtgagccttcatgtcccttcatgccccatcatactagacatggtgagtatctctcctaatgaggccactgtcacttctcagggccccatgtcatgaagctgttgtgaagggtgacctcatctcggctcctttctatgaatctgtccattctctcttaagttgaaacagaacaagtatagctttccctcacggcatccggtggcatcaggttggtagcttgacatcgcccatagtgggaatatttacactatgggaatagatccgtgctgcagtaaggcacagcccctcccaaagagcttgtttcctaacgcaaacttgagagttggcatcccctgcaatatgagtgcacggagagacccctcctgagaggatccattctccacaggaaagcccccagcagctgacagcgccctgtgagtggggcaggagaatggaaaaaatggaaggtcacttttttcacccccaatttctatgtgtttatggtgtgtgtgtgcatgcatgcacacgtgtgtatgtgagtgtgtgcacgtgcatgtgctatggcatgtgcactgaggtcaggggacatccttgggtatcagccctcccctcccaccttgtttgagactctattatttttctaccgtgtgtataaattgctggcttgtgagcttttagggattctcctgtcttcatctatcatctcctgggagcacagggattacaggtgtgtgaactgcgtgccaagcttctccatgagtgccggggacataaacaaaggtgtatcaccttgtatgacaagggctcttactcactgagccatctctcttgaccctctgtgacaagtgtgactttgattttcttttttccattttgccaaaccgctcttactacctttaggctcccaagtcctgcctttctcctcctctccagagaaggactctctgcttctaggtggggatgctggtgagacggctctgggcgctcagcgtgagaagcagacatgagcatcttgtcatgtctgaattcagacttctgatcatctactagttctctgcaaggggctcaaccccctccttccaccgcagctgactgccccttgggggatgaatcagctccctcgttgctaggccttttagaagacatgctaattctctgctccattttgtgcaatggtgttattcccaagtcattctcagccacatagaaagctagaggccagcacaggctccataagaccatgtctcaaaataatctgtgagatcatagtccttatttttaaaaattctgtccccaacctctccctcagtaggtcaggtttatatgatgggaaggggtctcctcttgtgcctcaccttataccttatcagagcttggtgaaaggggcttgttacatggaggagatgggattgagagtagctagcagattcgggtggccttcaaatggaggctgcgtgaactgtgttgtaatggagctgtcagggagatgggcatgtgggaggggtggggtccttagtgctgtgttgctatgaggatacaagccatgaccaaaagcacgtggggtggggggagaagtttttatatttagtttacacattctgatcttggtctattattgaggaaatataaggcaggagctgaagcggggaccatggaacaatgctgctnnnnnnnnnnnnnnnnnnnnnnnnnnnnnnnnnnnnnnnnnnnnnnnnnnnnnnnnnnnnnnnnnnnnnnnnnnnnnnnnnnnnnnnnnnnnnnnnnnnnnnnnnnnnnnnnnnnnnnnnnnnnnnnnnnnnnnnnnnnnnnnnnnnnnnnnnnnnnnnnnnnnnnnnnnnnnnnnnnnnnnnnnnnnnnnnnnnnnnnnnnnnnnnnnnnnnnnnnnnnnnnnnnnnnnnnnnnnnnnnnnnnnnnnnnnnnnnnnnnnnnnnnnnnnnnnnnnnnnnnnnnnnnnnnnnnnnnnnnnnnnnnnnnnnnnnnnnnnnnnnnnnnnnnnnnnnnnnnnnnnnnnnnnnnnnnnnnnnnnnnnnnnnnnnnnnnnnnnnnnnnnnnnnnnnnnnnnnnnnnnnnnnnnnnnnnnnnnnnnnnnnnnnnnnnnnnnnnnnnnnnnnnnnnnnnnnnnnnnnnnnnnnnnnnnnnnnnnnnnnnnnnnnnnnnnnnnnnnnnnnnnnnnnnnnnnnnnnnntctctctctctctctctctctctctctctctctctctctctctctctctctctctttctagcacagaattgtcttcccagaagtggcaccactcagagtggactatgctctctcacaacaatcagacttgcctacaggtcaatcaagtggaggcagtccctcagttgagatgccgacttcccaaatgactggagtttatgtcaagtagacaaaaataaaataaaattaaattaaattaaagcaaattaaattaaagtaaaataaaaataaaataaaatataaacactctactaggcatctatactctcatttctctggaatctgaggcaagagagtagccatgaactcaaagcaagcccaaggtattgagatgagcgtgaacctatctcagtgcacagacacaggaacacagtgttagtgttggtggccggagcaagagcacaggaagaaattccctggtcccagctcctctgaggtcgtcctgatgctccctgcgtcctgcagccactgcaggtgctggcggcagcgtccctttggtttggagtgggcgtctgaaagtcttcagcacatgtcactgaggatatcctcgcccagtcatggtaagcagtctctgtgagcaagagggcaaagacgcgatgtacgcacttccttttatgggaagatgctacccagctcttcccacagcaatatcggctacccaggctgggggtgggatggagtcagagaccacatctcacccctgtggacatcattttcagatcaagaaggtggtgttgtcgttcctagatcttgctgaagtttttgttctccttttccttttgagacaggctttcctgcagagttaaggagacagttctctgagacagggtttctctatgtagtcttggctgtcctgaaactcactctgtagaccaggctggcctcgatctgtgtgaaagcaaagcttgtggagtttgctactgtatactcctaaccatggagttaaagtcagaaagatggctagtgatttttttaaaaatatttatttgtttatttcatgtatgtgaatacactgttgctgtcctcagacacactagaagagggcatctaatcccattacagatggttctgagccaccatgtggttgctgggaattgaactcaggacctctggaagagcagtcagtgctcttaaccgctgagccatctctccagcccccgtgatgttgttcttcttgaggatgcaggtcctattcccatcacctatctagcatctcataatcaactgtaactccagtccccgggtattcgatgccctcttgtggtctctgtatgcacagatatacatgcagacaaaacacccatacacataaaaataatataatttaatttcttattataaaaactttgggagctgctatgagttcaagtgtgacctgctcttcacatggaattctgggcaggccagggctatgtagtgaaaacctgtctcaagaaacaaacattacagagtaggtccatatcttatggtgctcagaaaatgacttgtggttcattctgattgatctgccagacatgggcagtcaatttggctgtggagttggaagctgactgatgggcacaatctgggagcaaaaatgaacccagattagtttaattatcctgggtgatgataaaatgagggagatagttctttaaaggaaattcatatgagagttctttgtctatctgtccatctgtctgtctgtctctctatctctctctgggtctctctgtgtgtgtnnnnnnnnnnnnnnnnnnnnnnnnnnnnnnnnnnnnnnnnnnnnnnnnnnnnnnnnnnnnnnnnnnnnnnnnnnnnnnnnnnnnnnnnnnnnnnnnnnnnnnnnnnnnnnnnnnnnnnnnnnnnnnnnnnnnnnnnnnnnnnnnnnnnnnnnnnnnnnnnnnnnnnnnnnnnnnnnnnnnnnnnnnnnnnnnnnnnnnnnnnnnnnnnnnnnnnnnnnnnnnnnnnnnnnnnnnnnnnnnnnnnnnnnnnnnnnnnnnnnnnnnnnnnnnnnnnnnnnnnnnnnnnnnnnnnnnnnnnnnnnnnnnnnnnnnnnnnnnnnnnnnnnnnnnnnattattcacaacactgtgtgtgtgtgtgtgtgtgtgcgcatatatgagtacatacaaatataggtatgtgtgtgtgcatatacatattggagctgccaaaatggctcagcatttgcaaccaaatctgatactgtaagagtaaaacgtaaaaacaaaattctaggcctttaggcccaggcttgggaataaggcctttgtcctttgtgactcaatgttccaaggtatgctaatcctaaaacagatagcgacatccctccacccacccacttcctgggttcaaggagtattcattcaaagaaagtcaccctgacctaccctgaccattgctggaacccgctatgcaaaggtgctattgttaggggctcttagaaactgtcttgagaaataaccctcacaattaccaggtattcctcgtgactcttgtgactttgcacttccttgtgactcttaactggcatctttggtattttttttccaacaatgcccttcccacctccttgagttgtggtttcttcctttaaatacccccttatccagctactcggggcgtcaaggtcctctacccctgcgtggtgtatgaccgtgggcctgagagcgctcttgaataaaaatcctcttgcagtttgcagcaagaccgtttcttgtgggtgattttggggtgtcgcctctcctgagtcagaacgtgggggagtcctcacgttgtgggtctttcaatacnnnnnnnnnnnnnnnnnnnnnnnnnnnnnnnnnnnnnnnnnnnnnnnnnnnnnnnnnnnnnnnnnnnnnnnnnnnnnnnnnnnnnnnnnnnnnnnnnnnnnnnnnnnnnnnnnnnnnnnnnnnnnnnnnnnnnnnnnnnnnnnnnnnnnnnnnnnnnnnnnnnnnnnnnnnnnnnnnnnnnnnnnnnnnnnnnnnnnnnnnnnnnnnnnnnnnnnnnnnnnnnnnnnnnnnnnnnnnnnnnnnnnnnnnnnnnnnnnnnnnnnnnnnnnnnnnnnnnnnnnnnnnnnnnnnnnnnnnnnnnnnnnnnnnnnnnnnnnnnnnnnnnnnnnnnnnnnnnnnnnnnnnnnnnnnnnnnnnnnnnnnnnnnnnnnnnnnnnnnnnnnnnnnnnnnnnnnnnnnnnnnnnnnnnnnnnnnnnnnnnnnnnnnnnnnnnnnnnnnnnnnnnnnnnnnnnnnnnnnnnnnnnnnnnnnnnnnnnnntccttgatcccccagaagtcatgagaaaagctgagcactgtggggtgcaccccaacgcccagcactgggggagtgaggacaggctggttccagaggatggcccaccagccaacttaacttaatcaggcggagtctccctccctcccccaggcaagtgggctgcatctggggatcacagacacgcacatacaccacacatctgttcataaacccacatgcacatgagaacacacacacggtatgtttgcatgcattggctgcctttgaagacggtcgtgttgaaataggagcatcaatgcagtgttggtggaagacggagcctttgagcagtgaccaagagggatgaaagtcctctcacgggaagagcgggtccttggggaatgcgcccagtcctccttgttctgttttatatttactctcaccatcccactttctgtcatgtgacagtgccctagccagatggtgctgttatgtccgtggacacccagcttccagaaccgtaatttagaccaacttctctctgtaaattacccagttgtgaatattggcataacaacagaaaacggactgaaagctaaatatccatttacatgaaaccaaatcacagaagggaataaaatccttcttgttccc

SEQ ID NO: 152 - DNA, 2482 bp, Mus musculus
gcggccgcgtcgaccgcgcgctcaggagccaagcgtcccagctcccgctccagtgaagtttcattggtcttcggacgccgcccccgtcgccccagccctaaggaccctcgggtctcttcgacggctgctggaaggcgcccagcccgcctcggatgggcatcgtggagccgggctgcggagacatgctgaccggcaccgagccgatgccgagtgacgagggccgggggcccggagcggaccaacagcatcgtttcttctatcccgagccgggcgcacaggacccgaccgatcgccgcgcaggtagcagcctggggacgccctactctgggggcgccctggtgcctgccgcgccgggtcgcttccttggatccttcgcctacccgccccgggctcaggtggctggctttcccgggcctggcgagttcttcccgccgcccgcgggtgcggagggctacccgcccgtggatggctaccctgcccctgacccgcgcgcggggctctacccagggccgcgcgaggactacgcattgcccgcggggttggaggtgtctgggaagctgagagtcgcgctcagcaaccacctgttgtggtccaagttcaaccagcaccagacagagatgatcatcactaagcaaggacggcgaatgttcccattcctgtccttcaccgtggctgggctggagcccacaagccattacaggatgtttgtggatgtggtcttggtggaccagcaccactggcggtaccagagcggcaagtgggtgcagtgtggaaaggcagaaggcagcatgccagggaaccgcttatatgtccacccagactcccccaacaccggagcccactggatgcgccaggaagtttcatttgggaagctaaagctcaccaacaacaagggggcttccaacaatgtgacccagatgatcgtcctgcagtctctccacaagtaccagccccggctgcacatcgtggaggtgaatgatggagagccagaggctgcctgcagtgcttctaacacacacgtctttactttccaagagacccagttcattgcagtgactgcctaccagaacgcagagatcactcagctgaaaatcgacaacaacccctttgccaaaggattccgggagaactttgagtccatgtacgcatctgttgatacgagtgtcccctcgccacctggacccaactgtcaactgcttgggggagaccccttctcacctcttctatccaaccagtatcctgttcccagccgtttctaccccgaccttccaggccagcccaaggatatgatctcacagccttactggctggggacacctcgggaacacagttatgaagcggagttccgagctgtgagcatgaagcccacactcctaccctctgccccggggcccactgtgccctactaccggggccaagacgtcctggcgcctggagctggttggcccgtggcccctcaatacccgcccaagatgagcccagctggctggttccggcccatgcgaactctgcccatggacccgggcctgggatcctcagaggaacagggctcctccccctcgctgtggcctgaggtcacctccctccagccggagtccagcgactcaggactaggcgaaggagacactaagaggaggaggatatccccctatccttccagtggcgacagctcctctcccgctggggccccttctccttttgataaggaaaccgaaggccagttttataattattttcccaactgagaaaatgccgctgaattggaaggtgcccactaacttagaaaacagacgcggggctgagagccccgagctcttccccatcccttccctgtatagtgattggttggagaggaagcggggcaagaaggattctggggtttacttcttgtttcctggcccacaaggaaatacgacaggagtgtcccctgcccctttctctgcccgaactacagtcacgaacctggtgctgcttctgaccccatggttccatggagaacggagaatggactccagagagttttggacccagagggacttcatggctttctgcgaggtggaggggtcggggtggggagtccaggagagctgctctcttcccctgtccagtcagtaactttcaactgttggtctgacacctgtgttaatctctgacctgaaagtgaagatacacgcatttttacaacagccagccaaacagagaagactcaggtgactgcgggcggactgggccacctgcgaggagacaagagagggtgggtgcagaggaagggtttgaagggtgcacatttcaccaggcgaggtcactttgaaccggtgtgtacacacacgggtgtctcttttttatttcttcgggaggggggaggctatttattgtagagagtggtgtctggatgtatttcttctgttttgcatcactttctggaaataaacatggacctggtaaaaaaaaaaaaaaaaaaaaaaaaaaaaaaaaaaaaaaa

SEQ ID NO: 153 - DNA, 1593 bp, Mus musculus
atgggcatcgtggagccgggctgcggagacatgctgaccggcaccgagccgatgccgagtgacgagggccgggggcccggagcggaccaacagcatcgtttcttctatcccgagccgggcgcacaggacccgaccgatcgccgcgcaggtagcagcctggggacgccctactctgggggcgccctggtgcctgccgcgccgggtcgcttccttggatccttcgcctacccgccccgggctcaggtggctggctttcccgggcctggcgagttcttcccgccgcccgcgggtgcggagggctacccgcccgtggatggctaccctgcccctgacccgcgcgcggggctctacccagggccgcgcgaggactacgcattgcccgcggggttggaggtgtctgggaagctgagagtcgcgctcagcaaccacctgttgtggtccaagttcaaccagcaccagacagagatgatcatcactaagcaaggacggcgaatgttcccattcctgtccttcaccgtggctgggctggagcccacaagccattacaggatgtttgtggatgtggtcttggtggaccagcaccactggcggtaccagagcggcaagtgggtgcagtgtggaaaggcagaaggcagcatgccagggaaccgcttatatgtccacccagactcccccaacaccggagcccactggatgcgccaggaagtttcatttgggaagctaaagctcaccaacaacaagggggcttccaacaatgtgacccagatgatcgtcctgcagtctctccacaagtaccagccccggctgcacatcgtggaggtgaatgatggagagccagaggctgcctgcagtgcttctaacacacacgtctttactttccaagagacccagttcattgcagtgactgcctaccagaacgcagagatcactcagctgaaaatcgacaacaacccctttgccaaaggattccgggagaactttgagtccatgtacgcatctgttgatacgagtgtcccctcgccacctggacccaactgtcaactgcttgggggagaccccttctcacctcttctatccaaccagtatcctgttcccagccgtttctaccccgaccttccaggccagcccaaggatatgatctcacagccttactggctggggacacctcgggaacacagttatgaagcggagttccgagctgtgagcatgaagcccacactcctaccctctgccccggggcccactgtgccctactaccggggccaagacgtcctggcgcctggagctggttggcccgtggcccctcaatacccgcccaagatgagcccagctggctggttccggcccatgcgaactctgcccatggacccgggcctgggatcctcagaggaacagggctcctccccctcgctgtggcctgaggtcacctccctccagccggagtccagcgactcaggactaggcgaaggagacactaagaggaggaggatatccccctatccttccagtggcgacagctcctctcccgctggggccccttctccttttgataaggaaaccgaaggccagttttataattattttcccaactga

SEQ ID NO: 154 - DNA, 32874 bp, Homo sapiens
accatgttggccaggatggtctcaatctcctgaccctgtgatcctcccgcctcggcctcccaaagtgctgggattacagacatgagccactgtgcctggctgatacttaacttttttatatctcagtttccttgtctgtaaaatgggaacaatggttcccacccagttgccttcacaccattgtgaagtctaatgaaatcaaaggtatattgactagtcttaaccaaaaaaaaaaaaaaaaaaaagaagagagagagagagaaagaaagaaaggaaataaagggtacgagttgcctggggatgttctttttttttttttttttgacagtctctctctgttgcccaggctggagtgcagtggtacagcctcagctcactgcaacctccgcctcccgggtccaagcaattctcctgcctcagcctccctagtaggtgggattacaggcacctaccaccacgaccagataggtttttttgtatttttagtagagatggggtttcaccatgttggtcaggctggtttcgaactcctgatctcaagtgatctgcccacttcggcctcccaaagtgctaggattacaggcatgagccactatgcctggccgggatattctcttatctcatcctttacccctcaacccagagtggtgataggaggagggggttaattaggaagaactggggtttttacagtttccaaactcactgggagtcaaggattgagacaaagtacaagctagatttggcaacatccagggtcatgcatgggaacctgggagccccatgccccactgcctatttgcagggccctgggtcttgggtggccctagttcagtgtgtgcatgtgtgtgaaatgcaaggtgatgaggtcagtatctcaactcccagttactggtccagttgctaagaacttgcctgaccataaccatcctttcccaactcacagaatgtcaggttctgatgccagtgattggaaagaaatggcggtgagcaaggagagggggcaatgctgggcagccatgccacctttatgtcccctgtggccagagacgtgggtccagggcccttctcagtgcccagctcggtccagccagctgcccatggccctggtgggaggaggtaggctggacgccttctgacacttcctgggtaactgagcggggcaagcagcaaacagcaggctcctggggaaatctcagacttgtgtgtcagagcggatctgtgtctggggtggtaagtggggttaaactcaaggtcagacctagccaatccattttcgcgccaacatggccttgggtgtcctccattccagtggctgggacccaggtgcccactcagctggagacagcactgctgggagcctaatgcctggtttgtccctctgcttcacacactggttgcttgcctgatttctgcctgtgcctaggatttataaggaagggagttgtggcatgtggatcccaggcctccgttctactcccaaatttcaggtgctaatctctccatgagtttcagtgacctcagaaaaggaaatgggattaagctgcaatttaaggggttgtgggaagacagctgaaagaatgtcccagtcttcagtagaggaggtgggaggtggctgtaaactgcctaaatcgggggaacactaccaggaatctcaaattgctgtacaatgcagacacagtcaatcagcctccacctacttagatctctaagtgcttagagatcaccaacctgtcccaggctcctgagtctattacctcactcctccttgttctctgcctttcccaggctactgtggttatgatttgtggcagaagttgggaaggcagaaaaggagagaaggagggaaaaggacaatctgagaacaagctggagggccaaagtggaccccttgcagagttggcaagatggcaaaggggatgcagtggcaggtgaattagttcagatgggcaagaaatgtaggataagtcagcaagctgcctttgcgcaggagatccctaggtgagaaggtaagaagggcttccacatgcggcagtagcctcagtgtttctggaatggagtttgtatatatgttgtgggtggggtagggggaacagaagaagagctgcagcatcctgcctttgaggaggaagatggtacaacaggaaggccaggaggtgggctgcaggtaaaatgtccccgtgagacagggttgagggaagcagagggccagctgctgggcctgcagccttcttgcccccactcccagctcacccgcccactgcgaacactcctcagctcccccaccccattctggcccacagccctggggaagcgacatggcgttctcaccacggacccagtgccggctgtggcttcttccctctgacctattttttaatcatttgatgggatttttcccccccaaaccaaacccccagccccctgggcccgtcagctccaccgcgtgtcaaaaccacccctgtcactttgcgttggtttctcagtccagccagcccctccccgcagggcctgagagcgatggctaattacccagctgctgaacgccccccactcctgcccctccacccctagccctgacagaggggccctggaggactgctgggagaagctggggcctcctcaccctcccactgcttggcaggaagtccttcctgctgtctaacctccattcttccctctgtcctgcccctagtggtgctgaatcgcagacacagaggctgttggtactataagggtctttgggatacctccttaagggacagaaaggggcaactagtcttctgtcctgggtttagggatgtcttctgtcactctggctctctaacagaattctaggggatggtccttgctgtctcattttacagagcagaaaactgcgacacacagagggaaagggcctagcccaaggtgatctacgccagtggcggagccagaatcagaacctagagttccatgtttgtctttccacctgtttctgggtcctgtttctggtatgtagagggcccacccccacataccaactaggtctgtttctgtttctgtgcaactccgctgccagccctgagcaggtgtgttccctgccatgccctctctcccttgccccctggccacacagagcttcaccctggcatttcagggctgggcagcttgcttcaggcactatttaggaatgggactctttcccccaataccacccatgcccttttccctcttcctctctcattcatccctaaccaagtccgtaagtctgctctgtctcacccgcaccctgagacattaaccaggtggacaaggcaaaaagctctaggccagacacaggaaggccagagccaactcacagatgaggcctagtcccagatggacagatagacatgcaggagatacatggagcgctggatagccctggagacacggacagtgacatgaagatgcagagacagacacaaacacgctacagagacaaggcaagttccgaggcccacaggtaacagacagacacagagacgcagacagaggcacagaacctacactcaggaccagcgtgcagacctctcacaggtcccagggataggagtggacgtaaagaggatacacaagacgcaggcaaaaacacagggacccagagaggggccgaatcagaccagaggaacccagacactcaggagccctgagagacatgggcacacagggctgcccacagatcccaggaagccagagagaaccttggggagagaggaggccccagggggtgggtggccctctgaaggacagcgaggcctggcctggcagagcctgactgtgccaggaagtcatgccaagatggcaagatgggaagcagagaggagcttggcagcgtgggggttaacccctcagcctgtgccctccctccaagtcccttttccttggctcttctttttcttccctcctctcccagctccttttacccaaagccctggatatttcccgcctccccagcccaactcctggtaaccagaccctgcttcctgcctgagattaagggcctgtctgctgagaggcaggaagggtgggggcacagcctctccccagtgcctcctgaagcttgggcttgcccatccatactgtggcatgccctcctgataacagagttacccaagtacctgatgtctgaatatcccttcaggagggcgcaggagccctagcctgggagtgcagcgggggcggcctactgcatgcgtgggtgtgcatggagggtgtgggtcttatgtgaaatgctggcaggggtgagagcagctagagatagagagaggatagatgattcaaaataagatgccacggagaaggaggactgaaaggcacccaggcctggcctggagcccaggggtaagggccgctcaggcttggtggggggtgtgtggggaagggtgacccagcctgcagatgagagcctggagcccttgaccttgggaggagccctctgttctgtgttcacactgaccacctggtgctgggtgctggggactcggaactcctgcagctgtcacggggcgggggggttctacaggtgcttgtccctccccttcccccctctctggctgttaatctgatggttccggccatgccctctgaaggactggcagtctgggcccagagggggaggggattcagggcacgcggggtgggcagagtcagatgctgaaggagctctgggatgctggatgtggggcaagagcaggcggtggggctgcagggactggatcgcagagatttccctagcatagctctgcatggggtgtgtgtgcacatgcgtggatgatggcgtgtgtgcacgtggtgtgttgtgagtctacaccccaggagcaagagggctgagggggtcactttgctaggagctctttgggggcagggactgaccctaatttatctttgtgatcccagatctccaagggcctggcttatcccagcgctcaggtacccagggaatggtatatgggtatcaggaggggaagcctgtccctttctaatatgtgagtcttatgaacagaggggctctcttttggccccaggccctgagtggaggctgaggatggacctgaaggacactttgtggatgagccactaagccagagggaggaaagggcaggtgtaagtggctgggagtagaggaaagagggcttagcacagtttatgcctctgttttgtttcagccttaggacagcatccctcaaccttcacatgacagacccagtcagtcctggcagaggtctgatagctccatttactgacaaaaaaaacccagagaggttaagatactttaataggtagcacagccagtaagggttgggattgaggttccaacccagccacccaactaagtctccccaccccatttctctctgccccagctccagcacccccaggcctctctgcctctgcagactttcctcccattggcccatctctgtctgtctcctttctttcatgcccctctcgcaggcccagcctgagactttcccactgagtcacgatctgggtccctgactttgtggtccctgtccctctctgggtctaaatctttctttcagaaatgcaccctaagcctctcactttgctctctctttcttttcacgccttctccccaactcgctgccccctctcttttactatctaccctctcacagcctctaaggctctgcccagcagggtggagggtggaaatcctgggtcctggtgccatgccatgctccactaacagtttccagtaggctgggcgtggtggctgatgcctgtaatcccaacactttgggaggctgaggcgggcagatcacgaggtcaggagatcgagaccagcctggccaacatggtgaaaccccatctctactaaaaatacaaaaaattagccggtcgtggtggcatgtgcctctagtcccacccaccacgggaggctgaggcaggagaattgcttgaacccgggaggtggaggttgcagtgagctgagatcgcaccactgcactccagcctgggtgacagagcaagtgactctgtctcaaaaaacaaaacaaaacaaaacaaaacaaaaaaacagtttccagtaatagccgctcctccccagctgccccaccaaacccatccaagagccttccaggtgcctagggagctcagcactccatacgttttcaggagaggacccaggtggctggtagactctggggtgaggaatcatctggtcctagagcatcaataaggaaatctcaatgcctgcagccaccctcctcaggcatgaaacctcctccaccgccctcagtgtgcatacccagcaagctcaaggcacactgactcgcaggatgggacttggagatgggacagcaaaatgggagggagcctgagagtggggtgcatggactccctgaagtccaacgcatcacctggagtccttaaacatacagattctagagacccgccacaggcctgggcctcagaatctctagaagcaagtcccagaaatccacatcgttgtggcttcctggcatagtctgcagcccacaggtgaagcaagtgctgtgtgaccttcggggagcctctctcattttgagtcttcatgggaaacagtttgaaaggaagccctgaacgtttgcagaggacaacagcgtggagagaaccagtgtctaggctgtgggattaggcatgattttcttttctgttttctaaaccttttcttttctttttctttttgtttctttgagaccgagtctccctctgtcactcaggctggagtgcagtggcacagtctcagctcactgcaacctcctcctcctggggtcaagtgattctcttgcctcagcctcctgagtagctgggattacaggggccagccaccacacctgctaatttttatttttgtttttgtttttgttttgagatggagtcttgctctgtctcccgggctggagtgcagcggcacgatctcggctcactgcaacctctgcctcctgggttcaagtgattctcctgcctcagcctcctgagtagctgggattacaggcgcccatcatgcccagctaatttttgtgtttttagtagagatggggttttgtcatgttggccagggtagtctagaacttctggcctcaagtgatttgctggccttggcatcccaaagtgttgggattacaggcatgagccaccacgcccggcctgttttctaaaccttttccagtgttagtatgattcttcctcattcttgtgggaagagcactggcctgggagtcaagagacctgggttctagcttcagctctgccacaaatgcactgtgtgagtttggtgtcttattccattttgcatagttaccatccaccgtgtctcataaaatgtgatgctggttggaggccatgtctctctcattcctggacacttatcttgtgtttcttcactccggtctcaccaggaccagcctcataatgctccctgtattgatgggatagagagggctgggaggagcagccatggggaagtgaggggatcccagggggcctcatctcctcactcctcttctcccacctttccagccccagggcccgggaggagggtgaggtggcagctggaggagaaggtgtcactgccagggcccttattctcacccaagctggcagaggggcgggactggcagcagtgacaccagggccactcagcccccgcttttcacaagcactttcttttttgggtggaagaaattggagagagggggtgagaaatcggggattgaggaaccaggctgtaagaccctataacagcctgtcaggttctagagagaccacccccagccttcctcttcctccagaggcatggccccagggccacctgattctgagattcataattccacctgccccagaaagctgggtgggagctcatgtcatcctgttcagaggcaaggggatgaatcacttgacctgaggattaatgtggaaaagaggagggggagagagagggaggagcaagactccatttgatcttcaacagccaagcactgagcaaaaatgtcccccaaaggggtgtcagcattcaacagtctcacatctcctagggaatcagtcattcaggagggtcttactgaaagctctcatgtttccccaaaagtagtgaaggatcccaaggtcaccctctcttccaagcaatgctgccccactttgaacatcaggcagaaacttccctgttccttaaggtacggagaaatggtgggtaaggtgttggggaggaggccagtcctgtgtttctggtactgtcatgtatccggtctccaacctcaaaagatgtgctgattctctctcccccaagcctccctgggtcatgcccacctcctggagtccccagctttgcctttgcctgccaacttgcctcttggttcagctctatttgggagcagagagtccccataggcccctaagggtgaagccctgtcaggctgggacagaaatgtagagctggggccagttcccaggggagaactggggaggactggggtgaaggtagagagaggagaagttaaactttaacatgacaaaaatattaaagtatttttcaaagtactcttaaaaatgtaaatctttatctatatactgatatgcaaaatattccatgacaccttgtggagtgaaaaaaaagtacacattataaagcagcatgtgtagtgtttatataaattatatatttgtgcatgtgtgcaaaagacagagacagagagtatataaggagtgaggtctcagagggtgttcactgaaatgttaatcctgtttggctttagggggtggaatttggggtgatttatacagtctcgtttttacttttctgtgctgcttaaatttcctatataagtatgtttcatctttatacacaggaaaactcccaatgatgctattttcaattggggggggggaaacggatagttttcatcataaaaggagtctaatacattagttaacataaaaggaaaatggagaaagaaaagcctccatcgtcctatctccgaggcagcccttcagagcatgtggtgggtttccttcctgtcagccggctctgaatctgttcaaagcagcttttccatccaggtataataatagattggaaagtgctgcacacgtacaccctctcatgtaaggcttgcagcccccctgaaaagtagatctgtttatttcccccagtctatggatgaggcacgtgaggttgactttcaggcaaggaaaatgacttgcctgggtcacatatacctggcaggcagagccagacctgggactctcagcactggcagcccaatgctacttccagtgcccatgactgccatgcagggtaggggagcttttgtgggccctgccaggcccagctcagggccctgcaaacccctggctgctgctgatgcagtgcgctttaaggaacatttcctgttgtccatcaggttccaggtctgcccccagggctagagctacaagatgcagccaactcagcacatgtggacctctggtggggagaaagagggcaacccgaaaggtcacttagcacagagtctgggcacacagtaggtatcaataaagatcgattgaatgttcatggtcaaagttgcttctagtgtgcccgtgctccgagcctctgagtgccaggagaatgcccagcgagtcccacttgggccatctcggaaggcttcctgtaggagagggcctttgagctgagacttcaaagctgggctgaatttccccgagggtccagaagagagccacgggctggtgtgtcaggcagcggagctgacactcccagaaagcaagatcttcgaactacagggtgcgcgcaggctctcgcttctctccaccatggggggccctgcagtactcgccaagagcgtagaatttgcctagtattagccacgagagggcggggtggggcgaggcggagcagggccgaggtggcggagtgggggggagccggagagcttcataaagccacagcaaagcgctgcgactctagtgacagcggcccgctggagaggaagcccgagagctgccgcgcgcctgccggacgagggcgtagaagccaggcgtcagagcccgggctccggtggggtcccccacccggccctcgggtcccccgccccctgctccctgcccatcccagcccacgcgaccctctcgcgcgcggaggggcgggtcctcgacggctacgggaaggtgccagcccgccccggatgggcatcgtggagccgggttgcggagacatgctgacgggcaccgagccgatgccggggagcgacgagggccgggcgcctggcgccgacccgcagcaccgctacttctacccggagccgggcgcgcaggacgcggacgagcgtcgcgggggcggcagcctggggtctccctacccggggggcgccttggtgcccgccccgccgagccgcttccttggagcctacgcctacccgccgcgaccccaggcggccggcttccccggcgcgggcgagtccttcccgccgcccgcggacgccgagggctaccagccgggcgagggctacgccgccccggacccgcgcgccgggctctacccggggccgcgtgaggactacgcgctacccgcgggactggaggtgtcggggaaactgagggtcgcgctcaacaaccacctgttgtggtccaagtttaatcagcaccagacagagatgatcatcaccaagcagggacggtgagtgcggcgcgccggcccttggggcctctgtgcccgcgccggaacaagaacgtctcgtctgtttttctggctcgacaatgcttctgactccgtgtccctcactgctttggcttcagcgtagggagacaggggaatggggttgttaggaggacagggaaagctccggaggggcgtctgtgcccaggctgttgcaccaacagccagaggactcacaagggagacgggtgagtgcgggacagtgagaagtcaccttgatttaggggaagggtgactgtggcttcacctagaattggtgtgcgcccctgccccactctctactgtagaggagtcgcagcgggcagtgaaagcctgtgctctgggcggacaggacgcctgggcctcctgtgtgggaaactggaggggaagggagccccttatctccgggccccctgcgcccacctcccccggctcctttgctgctggtgtgctcaggtcagctttagtggtggtagtggtggtggtagcggtggtggtggtgtgtgtgtacggggggagattgggatttggtgacatggagaagcagtcgccaagtttcctttccggtcttactttgagatcatatgtctggtgtgtgtgtgtgtgtgtgtgtgtgtgtgtgtgtgtgtgtgtgtgtgtgtatgtgtgtgtgggtgtgtgtgtatgggggctagtgcagtaaagcttgtagggggcacagatcccttccaggcacaaatgcccacgggctgggcagatgaagctcacccaggggtccagcctggtagccagccccacactgcaccctttgaggctggtccagtgaaaaccttccccacactcctgtccagaaattcaccggttcagcctggagaagtggggaaggggtgtcccatggcttcatggctcagggttcctgagccccgtgcgtgatggggagagtttggggctgagggtgctgcttccggatagagcctcctgcgcaaggaaagaaacagaaacctgtgacttgtgtggtatttgtttagtaagcaacccccggagtggactgtgtctgatgtgggctgtgcgcacccacccttcccagtgcggcccatgtgagcaggggaccagcgaggaccagtgtggaagggctgttgtcattggtggacctgggatgctgggtcccaggtccgagaggtgtggataccaaacgtggggcttggggtggaggggagagggagaaggccatgttggaccccagaggttggtattcgatctgggcattgctggaacattcttccctccagatgatttttgtggggtagcctgggactggggaacctgttgccagccacaactggcttcaagttactgagctgttccactttccctgggatgaacccaggaaagttggcgtgttctttgatggctcagccttcatctcttaagccttctgataatttctctctgctccccccaaccctagtcaccctttgggtgtacccagacacagcccaagcttctggtcccaatgtgtctgaattggaagggacccagaagatcctgtccctctcactgcacagacagggaaacaggcccagagatagcaagagactcttccaaggtcacacaacacactcattgcaggcagagctggcactacagcccagatagtatttgcttgggtttctttctctggccccctacggccaccagtaaaaacagccacccacgctctctgaaggccctgatgcattcagagtgctttcacttccattatttcactgtgcgttaggtaggccaagcagtctccccattttacagttgaggtcactgagttgcagggtcagctaggggcttgcactccatcacacagcagaccagaagtggggcctcttaaccttccactctgttgtgtggtcaggaggacttcccaccctgggcccttgctggggtctccccacagcctctgccaggcctctgcctcctcctgccagtcttgagggatggggtggatggagcatcagccagcactctagggagttggccagtgctagggggctgcctctctgcctgtagagccagcttcagggaggctgtagagcacttcagggaggcacttgaggggatgattctcgaagtgtgtatcaccatctctactcccatggcctcctttccttggtgttcctgctgagtaattctcacttgacaagtttttttgtcccccttttagatacatacacttacatttttttattatgaaaaattccactacatacaaacatggacagaagaatgtaacagacttccatccccagcttccacagttgtcaatatgggtccaatcttgtttctgcatcctcacttcgcttcttctgtctgcaactatattagtaatatagtaattactaagtacattctagatattattttatctctgcacctctaaaaatgactttttaaaatgaatgcattaccattagcaaacctgaaaagaatttcctaaatatcaccaagcttctctgattgcttcataaatgtgtgtgtgtgtgtgttttccaatcctcacactttttgctccattctgaggggctccatacgcggggtccctgttgaaggaggcagtggctcttcactgtttcttttggtgctttttcttggatcaggcttcatagaccccacgctgccatggaggggacagaggacacacaaccccaattcagtcccactagccccaggttacctccataccttctcagcttgggctcctgagatctgggaaatcagtggccatttcctctcaaaacaggcttttgggcttatagcacagcttcctttccgtcttcctgcttttgtgggctggcctatccctccgtgggttccagtgacccaccagtcacaccacatcacccatgaccttcttcctttttgaaaggttctcccacctcaggcccacctacagcctacagccccacggctttttgccttgagctgactcacgccgtcccggattcttcctctcccacccaccctggatctatccctcggtattgaccagcgccagtggcatgctcttcccaacgggcagaaatggggcagggcacagggggtgattcctgggtctggagattgatcaaggcagctcagatggggctgagagaggggaactgagaacaaaacggtggattatcccagtaggagactttggtgtctacgtttgtgtctggagatttggggcagcctgataatgccccacacaggcttgtgcgagggtttctgtgtggcagtgtgtgtgtgttgcgaatgtgttggcgagtatataatagttgatggtagacattctcagtagaggaagagagaggcctgtgtctctgtgggtgtgtgggtgtgtattaattgctggcaatccccactttctgggtgtgattggttgattattataattaagataactttgggtagctgtgttgtgttaagctcaatctgcatttggatttgtgcatgtgaagacagaggttggtaaaacaacaatttcagtcccacactatccttgctatcctcacagtcattacaatttttttttgtctccactttcccaactccaagaactttaatttttttatttgtaatatttttcatgggccaggaagtggacttgaacctcccacatagataactttagtcgataactttctacatctttttttttttttgagatggagtctcactctgtcccccaggctggagtgcagtggctcaatcttggctcactgcaacctgcacctcccaggttcaagtgattctcctgcctcagcctcccaagtagctgggattacaggcagaagccaccaagcccagctaatttatgtatttttagtagagacggggtttcgccatgttggccaggctggtcccaaacacctgacttcaagtgatcccccgcctcggcctctcaaagtgctgggattacaggtgtgagccaccgcacctggcccaacttttcagatcttaaaaaattttttttaatttattttttatggagacagaatattactgtgttgcccaggcggtctcaaatccctgatctcaagcaatctcccgcctcagcctcccaaagtgctgggattacaggcatgagccattgtgcccagctaaaaacattttttttaggcttaagcatgcttaactggtttcatttgtcttggggcaagtgaaaacaactttaattaaaaattttttttaaatgagacatggtcttgctctgtcacccacgctggagtgcagtggtgcgattatggctcactgcagcctcaacctgctgggctcaagcaatcctcccatcccagcctcctgagaaactgggactataggcgcacatcaccatgtccggctaattgtttctattttttgtagagatggggtctcactatgttgcccaggctgcagctttgctttttgtctggctgtttgccagtggctgtctgagtctattaagtggatctgaggttggtaagacgaggagttcccttgatgcccaagcacattttgtactttggtaggtacgacacattgccagaataccctcccaaaaggtgctaccaatttacgcccacaccaatagtctatgagaggacccattttctcacagcctcatcagcagtagatattatcacattttttttttttttgagacaaagtctcgttctgttgcccaggctgaagtgcagtggcatgatctctgctcaccgcaacctccgcctcccaggttcaagcgattctcccacctcagcctcccaagtagctgggattaccggcatgcaccaccacgcctggctaatttttgtatttttaatagagatggggtttcaccatgttacccaggctggtctcaaactcctgacctcaggtgatccacctgcctcggcctcccaaagtgctgggattacaggcgtgagccaccacgccgggccaatattatcaatttttaaacattgaccaatatgactgagaagaactatctatctccttgctattttaatttgcacttaattacagtgaagcagagcctgtgccaggagctccgaatctgggagaggtatgacgaccctgtgaaccatcccaaggctacttagttcttagggccagcagaggaatttggggtcttggaccctgtcttatgagggtgggatggtaagtggcctttagggacgctcaatttgacaccagacccatcaccactctcggttccttcccagcaaagtgtcatgtaaatcaggggctattttgggattccagctggtggtgattctagacttttagggagaaaccgagatctcctttctcttctcccttttccccagcctcttcctgtgtctccatttccctctactagtgataaaaacaggatgagctgggcatggtggtgagcacctataaccccgctcgggtgactcgggaggccaaggcaggaggattgcctgtgcccaggcatttgagcagagcctgtgcagcatagcagactccatctcttaaaaaaaaatcagtatggcctgggcgcggtggctcacccctgtaatcccagcactttgggaggtcgaggccagtggatcacctgaggtcaggagttcgagaccagcttgattaacatggtgaaaccccgtctctactaaaagtacaaaaattagccaggtgtggtggcgggcgcctgtagtcccagctactcgggaggctgaggcaggagaataatggcgtgaaccttggaggcggagcttgcagtgagccaagatcacaccactgcactacagcctgggcaacagagcgagactccgtctcaaaaaaaaaaaaaaaattagccaggcgcagtgttgggtgcctgtagtcaaggagaatctcttgaacctgggaggcagaggttgcagtgagccgagatcacaccactgcactccagcctgggggacagagcgagactctgtctaaaaaaaaagaaagaaaaaaatgaatatgaagaaatggggaccacagagcacagcatgcactctgcagtcagaagacctcacctctgctctcccaccgaggaccgtcaccaaacctctcggagcgtcagtttcttcaaatataaaattggaaataacattttattttttattttttctttgagatggagtctcacactgttgcccaggctggagtgcagtggcgccatctcgggtcaccgcaaccttcgcctcccaggttcaagcgattctccttgcctcagcctccaaagtagctgggactacaggtgcatgccaccacaccaggctaattttctgtatttttagtagatatggggtttcactatgttggccaggctggtctcgaactcctgagctcaggaaatccaccctcctcggcctcacaaagtgctgggattacgagtgtgagccactgtgctgggccatctttcgaactttttaacagctttcagaggaaagatggacaggagttagactctccatttacatgtgaagaaactgagatttgggctgggtgcagtggcccatgtctataatcccagcactttggaaacctgaggcgggtagaccacttgaggtcaggagttcgagaccagcttggccaacgtgaaactccatctctactaaaaatacaaaaattagccgggtatggtggcacatgcctgtagtcccagctcttgggaggctgaggcaggagaatcacttgaacctggaaggtggaggttagagtgagctgagatcacgccactgcactccagcctgcatgacagagcgaaactccatttcaaaaagaaactgagatttggcttgagaattaacttatccagggtcatagggtagtaatctatttttctcaactcaggaaagtcaggggaagacaggcgtgtgacagcacccttctaggacaccttcccaaggttgttaggtaagttgtcctggggacctctggggattagaagtccctcaaaaacagttcctaggcccctggaaccctccctcctccaggtttcctgactcagataggtccctttttcctcatccttcagggcttctcatgagaggagggggaagtgtgtggaaatgaaaaataattctgatgaggattagcttctgccattctgaaaactctgctcttcctgcttgtgttagaagagaaaggctaagccattggagctggtgatggaattggtgctggtggaggtggtggttgtagtgacggtactactggtggtggttgtgacggtgaaggtggtggctgtagatggtggtgcccgtgctggtgctggtggagatcgtggttatcgtgatggtggagggggcagttgtagtgacggtggttgtgatggtggtgatgggtggttacagtgctactggtggtgatggtgctggttgtagtggtggtggtgacggggctagtgaaggtgttagtggtggagatggtgatggtagaagagtgcttcttttctgaatctgttactctggcacaacagcggaatcatacagcatcccaccccctaacttcctctacttttcctggaaacaaggactttgaacatgagccccgtgttcaatagagccttctttcaggtggatgggaagctccctgttcaactaggatgtgtgcaacttctctaaaggctgagggcagactataccgcaggtggcagacccaggagcatgggagagggagggcctgtgagtgggtgtcatgggtctgggagtgtgttagcactgtgagagccacggcagagagggtggctgaggaactgaggcgtgaggaccttccaggaactgcctgtggagagctggtggtgccccctcctaggaagcagctaaggttagagacaggggtgtgcaggtagatgtcgagcaactgaccctctgaaagaacattttaaaaaactctgatttgtagtgtttgctgatccctgtggtgtaaatactcctgctatggatgatttcaagcgactcatgtgagtcattgaacacagagccgggaagagactcacagtgcactgtgatttagtacctcctccatgcagctgcgatagacggaagtaacctcgacagtgcagacaatagtaaaacgtaaaataactgggcagtgatgattttttagtttttactccttttttttttttttgagatggagacttgctcttgtcatccaggctggagggcagtggcgcgatctcagctcactgtaacctctgcctcctgggttcaagccattctcctgcctcagcctcctgagtagctaggattacaggcgcccacgaccacacccagctatttttgttgttgttgttgtactttttagtagagacggggtttcgccatgttggccaggctggtctcgaactcctgacctcaggtgatccgcccgccttggcctctcaaagtgctgggattacaggcatgagccactgtgccgggcctactttgactgttaatatgtcttgaattgcaagtttatataatttaatttttaattatggctgtgtttaaccactggctggcaaactccctaaacaccttccagctggttcttgtgagtgggaggaagccggctacagcacaccactgatgcctgggcactgttgcaggggggactggctgtcaagctggagctgatgggtgctgggggctttctctcttctctccaggcggatgttcccattcctgtcatttactgtggccgggctggagcccaccagccactacaggatgtttgtggacgtggtcttggtggaccagcaccactggcggtaccagagcggcaagtgggtgcagtgtggaaaggccgagggcagcatgccaggtgcgcgcgcccctgggagcggtgggctctgtttcgctgggactgggcgccccctggtgggcccaccaagcccctacccctaattcctagacctttaaccccctcccactccatcccacgccattgcatccctcctgtttctggcttcctgctttgctctagcctgtcctctgctgagtcctctgcccttccctgcctggtcctccccctgtgtccttccttacgtccctctcgggacaggcaaagccctacatcaccagggttctgtcccgggggctgcatgtcaaagaggtgaactgtccacaggaaaccgcctgtacgtccacccggactcccccaacacaggagcgcactggatgcgccaggaagtttcatttgggaaactaaagctcacaaacaacaagggggcgtccaacaatgtgacccaggtaggacctgctcttcaaaaggtagcctcgccctgctccccaccctgggtctgagacctccaaggccacaagggtcctgcggggccagtttggttcattttttcttccttcctacaggaaggaaggttcgtttttcttctgtcctaaacgaagggtcatttttcctccttcctaaactctggctgtttctcacccaccttgggaggaagatgagatgggatgaagctgaatcttggacgggggtcatattcaggccacacaggccaacccagcctcagggtttcttcaccaaatcatgggttgccattgctccggcaccatgaaaggcacagagttggccctgtggtcccagggaatagatgccgagtttctctaggttgaacaatcctgttaaaagtgcccttgctggctgggtgtggtggctcacacccataatcccagcactttgggaggccaaggcgggtggatcacaaggtcaggagttcaagaccagcctggccaagatgatgaaaccccgtctctactaaaaatacaaaaattagccaagcatggtggcgggtgcctgtaatcccagctactcaagaggcggaggcaggagaatcgcttgaacccgggaggcagaggttacagtgagctgagatcatgccattgcactccagcctgggtgacagagtgagactccgtctcaaaaaaaaaaaaaaaagaaaaaagaaaaaagaaaaaaaagtgcccttgccctaaagccctgtttgtgctgataccttggtctcaattgacatctggaggtagaagagggggcaagaggctagaattggtgccccaaagagtccggacactggagttggaaagcttgggggaagttacatggtggcagagcaggggaatggacaggatgacctcaaggtgcttgctagcctcacgtggggccagctgttggtgggggtgatgggatcctcgaaatccttcctccccacccctacaaccgtcttgctctgtctacagatgattgtgctccagtccctccataagtaccagccccggctgcatatcgttgaggtgaacgacggagagccagaggcagcctgcaacgcttccaacacgcatatctttactttccaagaaacccagttcattgccgtgactgcctaccagaatgccgaggtgagggctgcctgagccccggtggggaggagggcagagtggggcccactgtcttccttgggagggatttggaaagttcccgagccccagactcaggactcaggtgactctatttcccttctctctagattactcagctgaaaattgataataacccctttgccaaaggattccgggagaactttgagtcgtaagtgccactgggttcaactcagctttggtccctcctgagacacatcctctccctgcccctgaaaacaggagggtgggggacagatgctacaggtgggcaggccagggaaggagggtcggagaaggaatgtgtgaaacaggtaggctcacaggtgactggttctgcttgtgacccgttttcttgccttctatttttttctagcatgtacacatctgttgacaccagcatcccctccccgcctggacccaactgtcaattccttgggggagatcactactctcctctcctacccaaccagtatcctgttcccagccgcttctaccccgaccttcctggccaggcgaaggatgtggttccccaggcttactggctgggggccccccgggaccacagctatgaggctgagtttcgagcagtcagcatgaagcctgcattcttgccctctgcccctgggcccaccatgtcctactaccgaggccaggaggtcctggcacctggagctggctggcctgtggcaccccagtaccctcccaagatgggcccggccagctggttccgccctatgcggactctgcccatggaacccggccctggaggctcagagggacggggaccagaggaccagggtccccccttggtgtggactgagattgcccccatccggccggaatccagtgattcaggactgggcgaaggagactctaagaggaggcgcgtgtccccctatccttccagtggtgacagctcctcccctgctggggccccttctccttttgataaggaagctgaaggacagttttataactattttcccaactgagcagatgacatgatgaaaggaacagaaacagtgttattaggttggaggacaccgactaatttgggaaacggatgaaggactgagaaggcccccgctccctctggcccttctctgtttagtagttggttggggaagtggggctcaagaaggattttggggttcaccagatgcttcctggcccacgatgaaacctgagaggggtgtccccttgccccatcctctgccctaactacagtcgtttacctggtgctgcgtcttgcttttggtttccagctggagaaaagaagacaagaaagtcttgggcatgaaggagctttttgcatctagtgggtgggaggggtcaggtgtgggacatgggagcaggagactccactttcttcctttgtacagtaactttcaaccttttcgttggcatgtgtgttaatccctgatccaaaaagaacaaatacacgtatgttataaccatcagcccgccagggtcagggaaaggactcacctgactttggacagctggcctgggctccccctgctcaaacacagtggggatcagagaaaaggggctggaaaggggggaatggcccacatctcaagaagcaagatattgtttgtggtggttgtgtgtgggtgtgtgttttttctttttctttctttttattttttttgaatgggggaggctatttattgtactgagagtggtgtctggatatattccttttgtcttcatcactttctgaaaataaacataaaactgttgaatgtgcctgcctcagtgccagcatggggggacatggatggggactcagttggggttgtacccaagctggtgtacccaaggtgttctgtcagctttcatttatggggaacctgctaagaccctgaaatgactccagctgagttacagcaaggccacatgtcctaccttcagcactcagggggttggttgatgctacctcttaaggcatcttgggacggacagagaagaatcccttgccctgtgtgcaccctgacattgaaaggaggggtgtgagggcaaggccaagggctggactgggagcgggggtgcagggcgctgtgaggcggtggcacttgatttttctttgcatttctagcagccctccacctttatctctagggttattcaaggattaaagaaataaatataaaatgagccatgtgaaattaccatttttgtaggtcgaaaagccaaatattagcaattttatgtgactcaagctaatacatgtaaagggtttaagaacattgcctgacaaacagtaagcactcactgtgtaagctactgttaccaacagtttctagctgtttctgtctgtctttttatacacactgaattgtgtttgtaaaataatacatacttttttttttttttttgagacagagttttgctcttgttgcccaggctggaatgcaatggtgcgatctcagctcactgaaaccttcgcctcccaggttcaagtgattctcctgcctcaccctcctgagtagctgggattacagatgtgcaccaccatgcctggctaatttttgtatttttagtagagacggtgtttcgccatattggccaggctggtctcgaactcctgacgtcaggtgatctacccaccttggcttcccaaagtgctgggattacaggcgtgcgtcaccacactcagcctatacatgcttcttttaaataattcaagcaaggaagaaaagtataaagacaacaataaattatctcaaatcttacccatcaagaattatcattaacattaggtgggttagacagaaatagttttataaattggaaccatactgaaaaggctttttcttaatgaaaatggttaaattttagcttatagaatttagtcacacacacacacacacacacacacacacacatcaagacaagcaaaacctctcaaactctcaagtgaaatgaagggagttgctaaacttaagataaatttttcttcactacaagaaatattttcttggttttttttttttttgagacagagtctcgctctgttgcccaggctggagtgcagtggcacgatctcagctcactgcaacctccacctcctgggttcaagcagttctcctgcctcagcctcccgagtagctgagactacaggcgtgtgccaccacgcccggctttttttgtgtttttggtagagacggggttttcaccatattagccaggatggtctcgatctcttgacctcgtgatctgtctgcctcggcctcccaaagtgctaggattataggcgtgagccaccgtgcccaggcaagaaatagtttctaaaagaacactctcaggctaagacaggtgcttataggaaacattaagaagttagagttactatgttgccccaccacagtccagggtgcaccccattctaatggggaaacatcatcatgggctttgggtagttctcccagttctgtttaaggtctggaaaacctgttttttttttttttttttttttggtcacagttcacatcccatccttttttgctctctactcagaggcaccttctagttagaaggaaaaaatacggtggcatacttggctccctttcctttgaatttggaatctcataattttgtaaatgacaggagatctgccacattgtgctctgtgagttcagattatttgtccccctactcctaccccgtggctgtcactttctaaagttaatgggttgggtctatttcctttcttggaggaactgtggttgataattataatactcttttcgctcaccatttaaaaatgatttttgctcccttcattagatatgaagttaagtgacttgtgatcaagccatactttaccatcttttctagaagtctgactgcatgttttgatgtggtgttatttgactcataaaggttcattactattatttcttcactattagatgtaccttttactgtatatactgtgtatatatacacataccacatatatctataatatatataacctaaataccacacaactcaagatatttcttcaagatttaaacaccaataatatcacaactatatttcctccatctaatctcctgcctttccctcatagataaccagtatctttaattttgtgttttgcttttcttgccttttatttgttatattttttatttttatttttgtagagatagggtcttgctatgttgcccaggctggtcttgaactcttgggctcaagagatcctcccaccttggccttccaaagtgctgagattacagtcatgagccattgcatccagcccctttcttgcttcttaaaattaagtgttaacactttatgtaagtctaactactatgctatgtagttttacttgtttttaactttataaaataatatatatgtgtgtgtgtgtatgtatacatacacacatatatgttttgatttttgactcaacactgtttttaagattcatccatttgtggcaggtagctatgtatttcattcatttttcactattttatgatattccactatgtgtatgtttgctataatttacttatctattttcctgttgacaatttacacatttttgttattatgaacagtttttaaaatatttttaatgtgtcttcaggcacacaagtgctaaaatttctcaagtcaagtctgtatctagaaatgggtagggtatgtgaatgtacaatttaacaagagaatgccaaattactttaccaatttacactctcaccagtaatgtacaagagaacatgttgagtttctttctttctttcagcagtagtaaggttgagcctttcttcatatgttttctaatcataggtttgtaaaatgatttgttcatatctttcgctcatattgctattagagtatttgtctttttctcattggttctggttctttatatattcttgacttgatatcaaccattatttggttatttatattgcaattatcttcctctagattattgttcctcttttcattttctttaaagtggttttctgatgaacaaaaatttgtagttttaatgtagctaaatttaacaattttactttttttttttttttttaagagacagggtcttgttctgtcacccaggctagaatgcagtggtgtcattatagctcactgcagctgcaaactcctggcctcaagtgatccttccactcagcctccccagtagttaggactacaggcatatgccaccatgcatggctaatttaaattttttctgtagcgatgaggtctcgctatgtcacccaagctcatcttgaactcctgacctcaagtgaccctctcgccttgacctcccaaagtgttggggtggcatgagccaccacacctggccaacattttatagttagtacttttccttgtctcatttaagaaaactttttctgcttgagggttagaaagatattcatctgtatttttttttccataggatttgaagttttgcatttgacatttaattccttttagtgtttggtgtgaaggattcatttttgttttcgttttccaatttttcctgtttgtttttgttgaatagtctttcttttgcccatggtagtagtctcacatactacttctggtagagcaacgtcctctttttaaagtttcttcttctgaagtgctttgactatgcctagctctttgcccttctatatgatatatataataacttggaaattttcataacaaccagactgagatttttattgaggttggactaaatctattgttcgatttgagagaagagataactttgtgatattgtctttctatgcatgaacatgggatatttcttcatttatttaggtcatctttaaggttctttagcaaagttttccaatttgtaggtgtaggacttttatatcttttgttaaatttattcttgggtatttctttttttctctgtaaaaggcatattttaaaatatatgtttcctagctgtttgttactagtttgcagaattacaattgatttttgtatattgatcatgagatccagccatgttgctaaagtcttttattattttgggggaatttcctataacttctttagagctatctctgtggccaatcatattatttgaaaaaatgagagttttagccgggcatgacggcgggcgcctgtagtcccagctactcaggaggctgaggcaggagaatggcatgaacccgggaggcggagcttgcagtgagccaagatcgcaccgctgcactacagcctgggtgacagagcgagactctgtctcaaaaaaaaaaaaaaagagagtaaaaaaaatgagagttttatttccttgtttctaatcattatgcttctaatttattttccttatcttattcgactggtcataacctcaagtgctggttttttgtcttttgggggatggtttctttcactattttttgaccccacctctgatggggtctcactccgtcactcaggttggagtacaatggtgtgatcatagctcactgcagcattgaacttctgggttcaagtgatgcttctgcctcagcctcccaaatagctaggactacagatgtgcacattatgaagcctagctaattaaaatttttttttttttttttttttttgtagaaacagggcctagttatattgtccaggctgctcttgaactcttggcttcaagtgatcctcctgcattggcctcccaaagcactgggattagaagagtgagctgccatgctcagctcagttttcccctatttattacacttttttttccttttacttgtttgcatttctataatttatttattttagtggcttatctatacattttaataagtatatttaataatgaatgatgttttatcctcccttctcgtcagtaagataattttagatcactttaattctgatcttcctccttctgacttactgttcctccttctgacttactaataaaaacttacttccttcttctgacttattgataactcttatattatcattttagtagccattctaataaccttttttcattcatgtttttctcctctcaacttactcatttcagttctttctttttttaacccctaaaaattagactcctttattattttattgagactatgctttgtctggacttacctttatgttaccattctttttgttcattttcccttttttgcatttctcttttttgggggatcatttacctatatctttaaatcctttataagttcttttagagaagttctctttgtaaacttcccctgggcttgtttcttataaatgttatcattttccctattggtattgagtgattgttttgctgaatacacaattttgggtgaatagtattttatttatttatttttttttttttttgaggtgaagtcgtactcattgtgtcacccaggttgaagtgcagtggcacgatctcggctcactgcaacctctgcctcccaggttcaagtgattctcctgactcagcctcctgagtagctgggattacaggcatccaccaccatgtctggctaattttttttatttttttttttatttttagtagagatggggtttcaccatgttggccaggctggtcttgaactcccgacctcaagtgatctgctcgccttggcctcctgaagtgctgggattacaggcatgagccactgcacccagccttttcttatcattttatatgagtaattccactgtcttctggcttcattgttgtgagatctgctgctattctaattatcattctttgttaggtcttctgtgttttttctctgctttccagatcttctatttatattcatgccctaaagattcactacgatgtgagaaggcatgattttatttttccttatcctatttgggatacattgtgtttcatggatctttgcattcatcattttcatgagctctgaaaattctcagtcatcatctctttaaatattgcttctttctattctctccaatttcatcctttaggactccaatcagatgggtgtcttttttttttttttttttgacagggtctggctctgttgcccaggctggagtgcggtggcactttcttggctcactgcaacctccacctcctgggcttaagccatcctcccacctcaacctcctgagtagctgggactacaggcatgcacgaccatacctagctaattaaaagaaattttttgtgtgtgtgtggagacagggtctcgctatgttgcctaggttggtcttaaactctgggctcaagcgatcttcccactttggtttcccaaagtgctgggattacaggtgtgaaccatgtttatccttataattgcattatttgtttttgtaaacattctatacctagctattctgtattttcaacatctgctgtccttgtagggggtgatgatagggttgttgtctaaatctgttgtttcttctgattctcaatgatagtgggtttgccttcttccttgcttggtggtcttctttctttgtttattaaattttgctaaagaaaatcttcaaggagtctttaggcaataacacttctgagtatttaacatgtctttattttacttacacatgtgagtgatagcttgacccagtataaaagtctaggttgaaatcactttctctcagaattttttttcttaaagaccagtatgatagtactctcagatttttttttttcctgagatggagtctcagtcgctctgttgcccaggcaagagtgcaatggtgccctctcggctcactgcaaccactgcctcctgggttcaagtgattctcctgcctcagccactggagtagctgggattagaggtgtacgccaccacgcctggctaatttttatatttttagtagagatgcggtttcaccatgctggccaggctggtctcgaactcctggcttcaagtgacccacctgccttggcctcccagagtgctgggattacaggcatgaaccatcgcacctgccctacttacagaatttttaaagcatttttttcattgtcacttagtttttagtattgctcttaagaagtctgatgccattttgattcatgatcctttttggtaggtttttagatcctctcttgcttcccagtgttttaaacattctgtattatataccttggtctgaagccctttttcatttgctattctggcacacccaatgagaactatcaacccagaaacgctgttcttcattcttagaaagtgtctcttccttgctggttcagtggctcatgcctgtaatcccagcactttgggaggctgaggcgagcagatcacttgaggtcaggagttcaagaccagcctggccaacgtggcaaaactctgtctctacaaaagtacaaaaattagccgggcgtggtgatgcatgcctgtaatcccagtcactcaggaggctgaggcaggagaatcgcttgaacccaggaggcggaagttccagtgagccaagattgcaccattgcactccagcctgggcgaatgagtgagacactgtctcaaaaagaaagaaagtttctcttcctttttaaaaaacatttttcatatttttaattttttttttttttttttttttttttagagatgaagtctcactatgttggtcaggttggtcttgaactcctggccaaaaaattcttcaagcaagagcatacttcctcccagagagctggtttactaccacaccactgggagctgatttattaggctggggcccccacaatgttagtgtgtagagatatgagttctcctaaagagacttttccaaatttcttaccagctgactggagaatattgtaggagtgaaatatgagaagagaaaccgaggggctaatttttttcttttgcaagctttcacttacattttcttcttccagctttgcctcacccttcctagacactgtctttggtatccccaagtcccatgtctttttctttcattttctttagaatgacactctatacttctaggtggtagtggtagtgaaatagttattttgttgctcagggcgggaagcagtcatgggcatcttgatacatctgatttcagacttttagccaatccaccaattgtcagtaccatgcctcaatcccagcttccactgtgccaagttctgagcctcttaagcattctttcgggctaaatcagttcactcattgttaatcctgtttgtagacactgtgggctatagctccatgttgcttaatcatgcactactcctccgtctgctttctagtttccaaaaacttgttgaaatgtattgtctggttccttttcctctgctgttctctttgttcctgtggtttcatacatttgaaaaattcctatattatcattttagtaaccaatatacaattttttttttttgagacagagtctcgctctgtcgcccagactagagtgcagtggtgcaatctcggctcactgcagcctctgcctcctgaattcaagcgattctcctgcctcagcctcctgagtagttgggattacaggtgcgcaccaccatgcccggctaatttttgtagttttagctgagacggggtttcaccatgttggtcaggctggtctcgaactcctgaccttgtcatctgcccgcctcggcctcccaaagtgctgggattacaggcatgagccaccgcgcccggcccaaatatacaaattttaacctaaacactcttcatcaattttgaatggaacttggtacattttttcagccttcatggattggccttcttctttctctaccccacacccccaaatttcagacaagttttcttctattttgtctccgattacctcctatccagctagtatttatttttcagagacattcattactcttcgactagatctcaaccctctgtttctctccattttctttctttctttctttctttttttttttttttgagacagagtctcactctgttgcccaggctggagtgcagtggagtgccgcgatctcggctcactgcaagctctgcctccagggttcacaccattctcctgcctcagcctcccaagtagctggaatcacaggctcccgccacgccaccacacctggctaattttttgtatttttagtagagatggggtttcaccatgttagccaggatggtctccatctcctgaccttgtgatccacctgccttggcctcctaaagtgctgggattacaggcgtgagccaccacgcccgacatttttttttttttttttttttgagacaggatctcactcctgttgcccaggctggggtgcagtggcgctatcacagctcactgccacctcgacttcccaggctcaggtgattctcccacctcagcctcctaagtagctgggattacaggcacatgccaccatgcccagctaaatttttgtgtttttagtagggacaaaatttcatcattttacctaggctggtctcaaattcctgggctcaagcaatctgcccgccttggcctctctaaatgttgagattacaggcgtgtgccactgcacccggcctttgtttctcttcctattacttagttttcattttttgactttatattctgtcctctgggagagatttccaaagttatcttagtagtggcatattaacttggggatggctgaagattaatttctaaggagagagtgatccagaaggataaatatctgtacttatgatttacatgaatgcctttctgagtgtctgtggttacagctatctcttaatatgccatattttgtaagagtttatatggcaagagttataaacagct

SEQ ID NO: 155 - DNA, 2589 bp, Homo sapiens
cggcccgctggagaggaagcccgagagctgccgcgcgcctgccggacgagggcgtagaagccaggcgtcagagcccgggctccggtggggtcccccacccggccctcgggtcccccgccccctgctccctgcccatcccagcccacgcgaccctctcgcgcgcggaggggcgggtcctcgacggctacgggaaggtgccagcccgccccggatgggcatcgtggagccgggttgcggagacatgctgacgggcaccgagccgatgccggggagcgacgagggccgggcgcctggcgccgacccgcagcaccgctacttctacccggagccgggcgcgcaggacgcggacgagcgtcgcgggggcggcagcctggggtctccctacccggggggcgccttggtgcccgccccgccgagccgcttccttggagcctacgcctacccgccgcgaccccaggcggccggcttccccggcgcgggcgagtccttcccgccgcccgcggacgccgagggctaccagccgggcgagggctacgccgccccggacccgcgcgccgggctctacccggggccgcgtgaggactacgcgctacccgcgggactggaggtgtcggggaaactgagggtcgcgctcaacaaccacctgttgtggtccaagtttaatcagcaccagacagagatgatcatcaccaagcagggacggcggatgttcccattcctgtcatttactgtggccgggctggagcccaccagccactacaggatgtttgtggacgtggtcttggtggaccagcaccactggcggtaccagagcggcaagtgggtgcagtgtggaaaggccgagggcagcatgccaggaaaccgcctgtacgtccacccggactcccccaacacaggagcgcactggatgcgccaggaagtttcatttgggaaactaaagctcacaaacaacaagggggcgtccaacaatgtgacccagatgattgtgctccagtccctccataagtaccagccccggctgcatatcgttgaggtgaacgacggagagccagaggcagcctgcaacgcttccaacacgcatatctttactttccaagaaacccagttcattgccgtgactgcctaccagaatgccgagattactcagctgaaaattgataataacccctttgccaaaggattccgggagaactttgagtccatgtacacatctgttgacaccagcatcccctccccgcctggacccaactgtcaattccttgggggagatcactactctcctctcctacccaaccagtatcctgttcccagccgcttctaccccgaccttcctggccaggcgaaggatgtggttccccaggcttactggctgggggccccccgggaccacagctatgaggctgagtttcgagcagtcagcatgaagcctgcattcttgccctctgcccctgggcccaccatgtcctactaccgaggccaggaggtcctggcacctggagctggctggcctgtggcaccccagtaccctcccaagatgggcccggccagctggttccgccctatgcggactctgcccatggaacccggccctggaggctcagagggacggggaccagaggaccagggtccccccttggtgtggactgagattgcccccatccggccggaatccagtgattcaggactgggcgaaggagactctaagaggaggcgcgtgtccccctatccttccagtggtgacagctcctcccctgctggggccccttctccttttgataaggaagctgaaggacagttttataactattttcccaactgagcagatgacatgatgaaaggaacagaaacagtgttattaggttggaggacaccgactaatttgggaaacggatgaaggactgagaaggcccccgctccctctggcccttctctgtttagtagttggttggggaagtggggctcaagaaggattttggggttcaccagatgcttcctggcccacgatgaaacctgagaggggtgtccccttgccccatcctctgccctaactacagtcgtttacctggtgctgcgtcttgcttttggtttccagctggagaaaagaagacaagaaagtcttgggcatgaaggagctttttgcatctagtgggtgggaggggtcaggtgtgggacatgggagcaggagactccactttcttcctttgtacagtaactttcaaccttttcgttggcatgtgtgttaatccctgatccaaaaagaacaaatacacgtatgttataaccatcagcccgccagggtcagggaaaggactcacctgactttggacagctggcctgggctccccctgctcaaacacagtggggatcagagaaaaggggctggaaaggggggaatggcccacatctcaagaagcaagatattgtttgtggtggttgtgtgtgggtgtgtgttttttctttttctttctttttattttttttgaatgggggaggctatttattgtactgagagtggtgtctggatatattccttttgtcttcatcactttctgaaaataaacataaaactgttaaaaaaaaaaaaaaaaa

SEQ ID NO: 156 - DNA, 1608 bp, Homo sapiens
atgggcatcgtggagccgggttgcggagacatgctgacgggcaccgagccgatgccggggagcgacgagggccgggcgcctggcgccgacccgcagcaccgctacttctacccggagccgggcgcgcaggacgcggacgagcgtcgcgggggcggcagcctggggtctccctacccggggggcgccttggtgcccgccccgccgagccgcttccttggagcctacgcctacccgccgcgaccccaggcggccggcttccccggcgcgggcgagtccttcccgccgcccgcggacgccgagggctaccagccgggcgagggctacgccgccccggacccgcgcgccgggctctacccggggccgcgtgaggactacgcgctacccgcgggactggaggtgtcggggaaactgagggtcgcgctcaacaaccacctgttgtggtccaagtttaatcagcaccagacagagatgatcatcaccaagcagggacggcggatgttcccattcctgtcatttactgtggccgggctggagcccaccagccactacaggatgtttgtggacgtggtcttggtggaccagcaccactggcggtaccagagcggcaagtgggtgcagtgtggaaaggccgagggcagcatgccaggaaaccgcctgtacgtccacccggactcccccaacacaggagcgcactggatgcgccaggaagtttcatttgggaaactaaagctcacaaacaacaagggggcgtccaacaatgtgacccagatgattgtgctccagtccctccataagtaccagccccggctgcatatcgttgaggtgaacgacggagagccagaggcagcctgcaacgcttccaacacgcatatctttactttccaagaaacccagttcattgccgtgactgcctaccagaatgccgagattactcagctgaaaattgataataacccctttgccaaaggattccgggagaactttgagtccatgtacacatctgttgacaccagcatcccctccccgcctggacccaactgtcaattccttgggggagatcactactctcctctcctacccaaccagtatcctgttcccagccgcttctaccccgaccttcctggccaggcgaaggatgtggttccccaggcttactggctgggggccccccgggaccacagctatgaggctgagtttcgagcagtcagcatgaagcctgcattcttgccctctgcccctgggcccaccatgtcctactaccgaggccaggaggtcctggcacctggagctggctggcctgtggcaccccagtaccctcccaagatgggcccggccagctggttccgccctatgcggactctgcccatggaacccggccctggaggctcagagggacggggaccagaggaccagggtccccccttggtgtggactgagattgcccccatccggccggaatccagtgattcaggactgggcgaaggagactctaagaggaggcgcgtgtccccctatccttccagtggtgacagctcctcccctgctggggccccttctccttttgataaggaagctgaaggacagttttataactattttcccaactga

SEQ ID NO: 157 - DNA, 30848 bp, Mus musculus
  misc_feature (6564)..(6583): "n" at positions 6564 to 6583 can be any base
  misc_feature (20848)..(24868): "n" at positions 20848 to 24868 can be any base
  misc_feature (27132)..(28373): "n" at positions 27132 to 28373 can be any base
caggggcgggcactgctgcttgtctcgtcacgattcctcgtgattcatcttagcatgtcaagtctgaaaatgtagagtgccactctgcccgccctatgggtggggttgcccagcccctccgttagagtgttgtccacccgattcacctactgatgtgccttttcctttcttttttttgtttttgaggtccagggaactgatagcagggccttgtgccttctaggccagagctctaccagtgggccgtgtctccaactccttctcattctgtgactagtaagaagcgtgcaaaggcaagaacatcctgtgcccagagatggatgttatctatggcttctgcagctttgatgctccttgtctgagtctactgtgtgtgtgtatgtgtctgtgtgtgtctctgtgtgtgtgtctgtgtgtatctctgtgtgtatctctgtgtgtgtctctgtgtgtgtctgtgtgtgtgggtatgtctgtgtgtatctgtgtgtgtgtctctgtgtgtgtctgtgtgtatctgtgtgtgtgtgtgtctgtgtctctgtgtgtgtatctctttgtgtgtctctgtgtgtgtgtctgtgtctctgtgtgtatatctgtgtgtgtgtctccgtgtgtgtgtctgtatctctgtgtatgtatctctgtgtgtgtctgtgtgtatgtgtatctctgtgtgtgtctctgtgtgtgtgtctctgtgtatctctgtgtgtgtccaagtgcacgcatgtatgtgcacaagtctatagaggccagagatcaatgttgggtgccttcctcaattgctttacagcagcagttctcaacctctctgggggttgaacgaccctttcaccaaagcccatgagaaaacaccgatatttatattacaacgcgtaacagtatcaaaactacagttatggaatagcacaaaaatagttttatggttgggggctcaccacaacatgaggaaccatattaagggtcgcagcgttagggaagttgagactgggtatctcagtgagcctggagcttgcccactgagctgtgggggccagcaagctccaaggatccttctgaatgccttcccagaactgggagcacaagtgcctgctgttctttaacatgggtcctgggaattgaactcagatcctaaagacagcacagtgagtgctttgccaaccaggagccgtctccccagcccagcctgctttctttttgagggagcacgtgttttaatataaacatggttgtatttaggtgagaagtttaaatatgcgagaatccactgatgtgtgcttactctctgcacgcagcaaatagccacccaacccccgcgccccccttttaccttctgtcctgtccttctgttcattacctctcttcttcccaaagcgacacacggtgggtgaagatttatgactgtcttcccagaattttattatctgtgttgcccgggcaaattttttccttttttgtttctttgtgggccactttcactcctgttcccttctcatgggcttatgattttttttttctcccctgaaagagaatcttctttctggttgcttataagctagtggttaggttgttttgttttgttttgttttgtttaaagggcagatggtgctagtattgacctacttttagatgtggtcatttaccctaaccttgctcggtcaggccagtatgaacacagtcttaatcttctaacactgtgtttcatattttctgtctctcaaagtccttgtattcggtgaccactcaacacagtaatgatgttgacattgacagtgagagcatccacatgaccagagacctggtcccttatccccctcccaggatccctcagttctcagcgggtgctgggaggtttaaccatttgcaatgctggcaccttgcctggaacttttcagatcagaaccaatgtttatccattgagtccatctgccaactgtccctagcctttgctaaaaccagagtctcccaacactgggtttctcctctctctttaaattattaagtgtgacaacgtgtgcacaagcacagagggtgacatgacaactcaccacaagttctcaggacacaggcggtgctgggcagtggcaacagggcactgcacagtcagggcctcttggcactgagagatggggtcatcttggtaatggcattaagggcatgtgccaccaggcctagcttttttctctttttcagttacagctttattgagatagaatcacgtgttataaaattcacctttttatttagtttggggtgtgtgtgtctgtctgtctgtaccatggcatgcttgtggaggtcagatgacagctaatggatgtttgctcttcactccactatgggtttcaggggtcaaactcaggtcatcagacttgaatgaccaatgcttttacctgagagccatttccctggccccatcaacattctaaaatgtccagaattcagtctcccgggcgttgtagtccattaccactgtccagcccagccttaatgtgttttcctcacttcctcgcttccccaaaagttcaacctcactcttttctgtggctctgaatttgcctattgtagaatcacagtgtagttcaggaagtttgtcctccacagttttcagtgttctccttctgagttgggggaacaggactcacagtgcccctgccccacccttccataggttcttgtctgtaaagcccttgtgtcagcgggactgattaagaaatcagagtatctgggactggagagatgacttagcaattaagagcactggctgctcctccacagatcctgagttcaagtcccagccaccacagggaggttcatagccatctataatgtgatctatacataaaaagggaaggaaggaatgaaagaagggaggaagggagggaggaaggaaggaagaagagtattagggccagcaaaatgactcagtggataatgatgattgccaccaagcctgacatcctgagtttgatccccagcacaacacacagtaggagaacaaaccccctacaagttattctctaactgccaaaggcgtgctatggtgtgtgcgcacacacgtgcatacgcgtgcgcacacaaatgcaataaaaataagaaaaagaataccttattcttaaaggaaggtaacttttgtcctgtggagcattaggaagcaggaggatagcaggagctgctcatcaatcagatgaagtttggaaaagcttgttggtggggtgaagatggaggtggggagaaggaagtgctaagtgtaagtgtgaaagaatcattggctctcctcaggggctgaccacactcaggctctgtgttacatacttacacacacacacacacacaactcagaagttatagaaactccgaatagtaaaaactaacctggcaaaccatatctctctgtgagtgttttaaaccctcatctctcctcaagccagaatttgttcagtccattggcagagtttcgctggaagcttccagcaagagagcctgctttccgccagggaagttacagcaaaacagtctctggtgttctgaaaaccttcagagtaatggctttgtttgcaaacgcttctgcttggggctgggagtgtgcctcagttggtagagctctcgactaacaggcacaaattgacccccagaactagagtaacagaacacacctataatctcagtacacaggaggtggagcaggaggagcaggtattgaactacataatgagtccagtgccagaggcaagcctgggctacccagagctgacctaaatatatttgttaaagaaaaagtttctgatagaatgttagctattgatacaacataacactgatcaccagcatagtagatatcccttcctttggtttccaataagcctgtgaagttgaggtttttataaacaggtacttctggccccttatttaaccttctccacccttggtctaggtgttctgggtcaacataggtgctgggtgtgtttagccggtatagcactctgtgtccaggccctggccaagctgtgaactccacaagtgtgactgcacagagctcggctgactgtcaacactgtcctaaaaatatgatggtgaatccagttcccagggtttagagcggcccctgtgatgatttaccagcgatacaaaccacttcccttgtcagaatgtcacgaactgaaaactgagctgccgggtcaataagcagagaagagcatgcgcatgcgcggggtaggctgtctccatgcgggtggaggagccgcccggtggctggattgaccatgggtacagggccggtgggggcccccccacttacacctgtgtgcacaatgtttcctggtgagtgtggagagttctgacaggcatgggagaaaagcactaaccagaccacaggtcttgagcatttaaactggtaaggagtgggaagagttttttgtctggagtgagttacttagcatttaggaagtggaggcaaggagctataatgggtacaacagtaaccttcataaatctatgtggataaaacccacagtttaaaagtaaaacggacatgactgtactatttagtgtggatatatatatacattttttttattttaactgacacaactgggaaagggcatgctccctcatacagtgtgcgatgatcagatcagcttaattgtcagatctgtcactcaacattgatgatgtgtttgtgctgggagcgttcagattccttctcctcgtgacggatagtgagcaaaatccacaccggagctctattttctatccctattaaagtacttttatgtcgtgaaactatgctgtatttttcaagataaggcaattaccactttgtatttaccagctattatccttcaaatactgtactattaaaaaaaaataccatgacacgctcagaattggaaacataaaaatattctgaccaaaaaattaatatatatattttttttctgacaaattctcagagctcagcattctactctttaataaaaactaagaacaaatataaaacctgaaacacaaattgcctttataccatgcagctccctagagttcttcttctgtttctgcaatattgtttttacatcttttgaagctggacacacctttactacccacatgagtgtaagtgtgaggtaaagataggtggatttctgtgagttcaaggttagctggtctacatgttaagttgcagaccagccaggtctactgagtgagactcagtctcaaaaaataaacaaaggcgtttgggttttttttaggtttggtttggtttggtttttgtttgtttgtttgtttgtttgtttgagataaagagagagagagagagagagagagagagagagagagaacgtatcatcttgtaaacccaggctggccttaaaccttgacctgtttaccaagtgctgggattgcaggtgtataccaccccattaagctgtttctctcttaaaacaacaataaactccggaaatatgctcagccaacaggacaggtaatagatttgtgtatttgttcatttagcctatcggttccctaccagtgtaggtcacaacccttttggggattgaatgactttctcacagggtcatctaagaccatcggaaaacacagatatttacattacaattcataacagcaaaattacagttatgaaggagcaatgaaataattttagagttggcatgaggaactgtattaaagggttgtagcattaggaagagtgagaaccacagatttagcaaatacttgtttactgctctctgtgctgggctgctacacatgcattttggggacagggcagttaagacatgtcctcttctattgcggttcagtggaaggagacaaattaaaacaaaagaaaactagacagaaaaatgacaggcctgtgtgatgaaagagagatcacccacatagagtcacccgagttatacagttatagctgaggagctcattaaagatgtttcattctacactgtagaatttcttcttcttttaaaaaaaatttgtttgtttgtttgtttattatatgagtacactgtagctgtacagatgggttgtgagccaccatgtggtcactgggaattgaactcaggacctttggaagagcagtcagtgctcttaactgctgagccatctctccggccctacaccgtagaatttcatactcatgttatgttctgtaataactttgaaaagagctgatctgaagctggagagacgactcagtcgttaagaggctgcccttccagaggacctgggttgtattcccagcaaccacatggcaactcacaaccatctgtaactccagttctaggagatctgaccccctcttctggtctccacaggtactacacacatgtggtccacagaccaacatgcaggcaaacacccacacattaagtagatcggaaaaatatatatcttaaaaaaggaaaaagcagacatgtccaattgtgtttgctcatatttgtttattaaagcaacaacaacagaatagtactgcttatctgccaagcacctatgtacataaagttatcgtgtgtttagtaaagatgatgcatgccagacagnnnnnnnnnnnnnnnnnnnnttggtgtctgttggaatcactcaaattttcattaagggagctactgtgaggccccacttccatcttgtcctagggctgagtgtgtgggcgtgcatatgtggatctgagtgtgtgtgtgtgtgtgtgcgcgcgcgtgtgcatgtgcgtgtgtgtgtgtgtgtgtgtgtgtgtgtgtatacttatggaggcttgagctattcacctcttaattttatttttgaaacagggtctcactctgttgccctggctggcctgaaactttctatatagaccaggctgaccctcaaactcatgaacagccacctacctctgccttgtgactatgacaccatacgcagccccttccctcgatgtcttttgagagagtttctaatctcctggagttcctgtctccatctcccagctctgagattacaagtgtccaccaggctttttacttggattctaggatttgaacttgggtcctcttgcttgcaaggcaaacactggctgaatcaccttcctagcccagtctgcatttgtttgttttcatatatttatgttgacttgctgtgtatgaatgttctgcacacatgtatatttgtgtactatgtgcatgcagtaccctggaaggccagaggagggcatcagatactctgggtctggagttacagatggttgtgagccatcaggtgggtgctgggaaacaagcccaggttctcctcaagagcaacagtgctcttcaccactgagccatctctccagcacccccctccttgttcttaactaagaaagagtgctacccgagccccactcttcgtctgtcaggcctctgcatgcttaaatctccagtctcctccactcccaatctctttactcttcctccaaaatcatgagctgctcctggtctgatttggagacttcactaaaacattgtacagttgtcttccagatgtttgactgggatgcagaattgctctcctgttccagttttcctgtgatgaactcacacccactgaactttgcagtattggaaaatctcactgttatctcagccctggagcctgaaagctccgagttaaaccatccaagtatcctatagccgcacacacatctaaaataggtaaccaaccggcacccaccctacacctcactgctagctaactgacctgccccataaatagctcagtgttactcgatccgacagccactgctcacagagagatctttgtttcctggcacacatgtgcgtgcagtctctgggagtcaacaaaacccaggtccagtgcactggaccatggctgtaacacaatccttaggcgaactgtgaaaatcagtagctaagtcattttgagattggattcaagacgcccagatccgtattaccaaaagcagtgttacagcaagtctggttttaatgtctgaagttcctattaacatagcttctccactctggggaatcccaggtctctgccaaatgcacttaattctcaggtctgtctgaaagggctcctagtagtttcagaaagcatctatttgtttgtttgtttgtttgcttgcttgcttgcttgcttgtttgtttgcatacactgtagctgtcttcagacacactagatcccatgacagacggttgtgagctatcatgaacttaggacctctggaagtatagtcagtgctcttaactgctgagccatctctccagcccccagaaagccattttctaaagcgtgtttttgttggtgcagcttgttttggttttgatgttgtttctttaagaaagagtcacaggaagcccacgctggccttgaattcttgatcctcctgccttcacattctgagttctgggattaaaggttctaccacaagatcctgttaaaaagaaaaaaaaaaaaacagataatctcactattgctgggactagtggcgccaagcctgtagtcttaggttaaattagaagacagcaagtttagtgggccatggtggaacaggcctttaatcccagcactcggaaggcagaggcaggcagatctctgagtttgaggccaacctggtctacaaagtgagttccaggacaaccaagagaaatcctgtctcaaaaaataaaacaacaacaaaaaagaaataatataaaatgaataaataaatgaaataaaataaaatgatgataagttgggctggagagatggctcagcagttaagagcactgactgctcttccaaaggtcctgagttcaaatcccagcaaccacatggtggctcacaaccatctgtaatgagatctgatgccctcttctggcatgtctgaagacagctacagtgtccttacatataacaataaataaatctttaaaaaaaagatgaaaagtttaaggtcagcctgggctacagagcgagtgcatagtcagcctacacaacttagtgagacactgtctccaaatagaaagtccaaaaggggcctggaatacaggtcagccatggagctcttgcccagcatggcccaggtcataggttcaatctccattacaaaaggaaacaacaaaccctacagaaaaccagccctgccgctcaccattgtcacacagcaatccattcttctcctagtccacacatactatttctgtgttgaactgtatgtatgtgcaaattccatagcagtaactccagaggtgaaagaacattggggagcttggcctgataagcctctgctctgggtaagagaatggccactaagccactaagataacacacaggcctcagtctgtcccgagattctccggtctttcagatcctgttcaaatcttcctgttcatcttccatttcacaaaacccaaataccaaacctagagttagttttcagttcactccgccgatcattcacgatgactgttggaaaggatgcttataacccacggcggtttcaagcaaacgccaagaccaggtctaggatattaaagctgttggcgacgccttcctgaatgccgctggttttgatggttctgctgcaatagtctatgcttcataggtccatttggggcccttcccacggccatgctgagtgtctgcattttgaaaacctgacaaagctggaagtcagttcgagaatattgatcctgggtagctgagatggttcagtgggtaaaggcggttaccgagcaacctggcaacctgcgtttgatccctcgaacccacataaagatgcaaggaaagaaacagctccataaagtcatcctctgacctctacacattcaccgcggcacgtgtgcgcctgcacacacatcacatacgataataaagaaaaaaatttttaaagatttgacctttagtgtaccaaaaggagagaaagcattcattcacttttaaaccccgtgcatatttactccagtggctttgaagggaatggggacaaacaaacaaacaaataaatcaaggtctttgtttaacaggttgtgaaccatggctatgtggatacaggctcagcagctccagggcgatgcccttcaccagatgcaggccttgtacggccagcatttccccatcgaggtgcgacattatttatcacagtggatcgaaagccaagcctggtaggtgaacagcttctagatcatcttttgggaagtacgaggatattgaactttgatgagaaaaatgttctaactgagactttaaaagttgtgagtaacctaggcttagtggtccccacctgtaaccgtcatgatcctagctgaggcagaagggttgcaagtttgaggccagcctgaattgcagagtgaggccctgtccctatcttggaagaagaagaagaggaggaggaggaggaggaagaggaggaggaggagctctgtgtgtcgggctgggtgtgtagctcagtggtaaagtacaggcatgaggctctagactcagccctcaggacctgtctccaagaaaagctgtttgaaaatcttcatgtaattcataaaaaggtattcagccttcttttagatgcagggagacgaaataattcttggagttttaatttttgttgttttttaaattatgtatatatgtgcacgtctgtgtatggatgcgtacacatgagggcacctatctgcagaggccagaaaacagctggagctggcgtttcaagtggttgcgaaccacctggtgtggccgctgggatctgaactcaggtcctcgggaagagcaggaagctctcttaaccacacaggcctctctccagcctctgagcttgccttgttttggtttgtttgtttgtttgtttgtttttgagacaaggtctctcactttttgagacaggccctggctgtcctggaactcaaaagtgctgagattaaaggcaagaaagaaccatgcctggcttttttttttccccccaaggtaaagtttcaccgtgtagttatgagtggcctgcattcactatatagaccagactagtcttggactcaagatcagcctttgtctcccatgtgctgaaatttatatcttataaatcagatatttaacatattgatttaataatcaaaacattcatagctctctggttttttgtttttctgagatagggtctcatactatatagctctggctgtcccggaactcactaaatggttttttttttttttctttttaaaaactaataatggttacatttcagtgttgacttagccaacatttttatctctattatgaattatatacttgagctttaaaattgttagatcggtataacacagttcagtagcaatgcatcttaccgtgcagtgctaggacaaagcttacaacacacgagacagctgtaccactgagcggctgcctcctcagccctgccgcatcctcaccagccatcagcggtgcccagcagcgtgcagggcagggagcttgcccgtcgttggcctcagtctgtccgtgagtgtccaagttcatcacaagttcatcagactagccaggctttgaccagggtggtgagctcctctttggagagccagccttgttgctgctgggagaaggctgtccctacccactggagatgttgccttacagtaattgctacagcttgttagcaaggctccgttcagaaacaagcctgccgaaggaaggcaattaaaaaaaatcccagcttcatataattaagagggggaaaaactgactaaatatgagaacatcaaacacacctcaattagtccagtccttttccttttctttctgttttaatgatttgggagatttcggaaaacattaataggaagtttctgctgattaaaaatctcacttagaggctagatcagcggtagagcattcgtccagctaagcagactggctccataccacaaaagagagaacaaaagccaactttcgtttattcgagtacaacagcgcattcctgtaattccagctactcaggaagctgaggcaggggaattacttaagcctaggaactcgagacagtcctaggcaaatgggctttcagccagcagatctcctgagtagtctacttattgaataagctttgggaaattggggttgatattaaggaaaacgtgggttttaggtagggttttgttttttccccatagagaaatagagatatcaccgaagagtttccagctctccgtattgaagctgtcatgaagtctctgattgtaggctatggttgagtccaaattgagaaccagactcctgtgttctgttcaaagactggatcctctcagccgggcagtggtggcgcacgcctttaatcccagcacttgggaggcagaggcaggtggatttctgagttcaaggccagcctggtctacaaagtgagttccaggacagccagggttatacagagaaaccctgtcttgaaaaaacaaacaaacaaaaaaagactagatcctttcaacagtgggctcccagtcagaacagaggagcaaggctgtgcctgcagcccgtctagccttccacttcatacatattttcttcaacccatagagaatacacttctaaaaattggctttgtccctaccctttccagacacaggttgggtggtctctggtaaggtcgtctcagggctttggtgcgcgtctgcctagctgtttgccaccagccacttgctaacttcagggatttgtgggtggctgtcttttagctgccgctggctctcttccctggctgtggacctggtcagcagtaattagatattatttcagcctgacagctgtttggtttgtcagcgtgctaagtcacttaagtattacccagcagcaattgttgcctaacttagtagacaaaaatcttttaaggacaaaaagaaagaagataaggaggaagtggacccaacccctgtcaccagctgaacagctcaggatgacacgaggtctggggactggcttctcgccttcactggaggagtcagtgttatttccaggtcccatatctgcagtgatgacagactattctcctgggtgtgaatacttgtaggcatcttctgtcctgatgcctcccttccagggtcccttaggaagggcagtgactgggggcctggagccagtcaaggttggaaagaacatgcagaactatataccctgtcccacataccctggagatacgagtataaactggaagttagaagaccccttattccctttattcctaggagggggtgggttaatatcagagtcagtcagtaaagggaagggaggaaggagtatttagagaaagaagtgtaaagctcagctaaaagaattgtagagtcaggcattgtagacatttagccaacttatgtcggggtgtttcttaacccgtgaattatagaagaaatcacgttccagactcccatgatggctcacacctataatcccagcacccacaaaacaaatgtagtatgtaaaggctgcatgtgtacaggctcctatgcatgtatgtatacagattgtgtaatttttttcccctagggactcaatagatcttgataatccacaggagaacattaaggccacccagctcctggagggcctggtgcaggagctgcagaagaaggcggagcaccaggtgggggaagatgggtttttgctgaagatcaagctggggcactatgccacacagctccaggtgggtacaaacactggccacacttaggccctgccctcttgaggacttcttcatttaattttctgtagacacgtgttctgatctttaacccggcatcgtagaaatgtgtgtttcacgcacatggttttgattggctttgtggttgcggctgttaccttctttgagacaagagtctcaccgtggggctggagagttggttctgtggttaagagcgcttcctgcttgtcttagggttattattgctgtgatgaaacactatgaccaaaagtgaattgaggagaacaccgtttatctggcttacacttccacatcacagttcgtcattggtggaagtcgggacaggaacccaaacaaagcaggaagttggtggcagaagctgatacagaggccatagaggaatgctgcttactggcttgctccccattgcttgctcagcctgctttctcatagctcccagaaccaccagcccaggggcggccccacacacaatgggctgggccctcccacatcaatcactaattaacaaaatgccctataggctttcctacaacccaaacctatcataagaaggcatttttctccactgaggcgccctcttctgatgactctaatttgtgtcaggttgatagaaaaccagccagcgtgctgctattgtagaggacctgggttcagctctcagcacccacatcaggaaactcacagtaacctggggcttggagccctcttctgacctcaacaggcatccacccacaagtgacatacagacacagaaataaaaatagaaactaatctttatttaaaaagaaatgaaaagtttcactatttaggtcagattggcctcaaactggggatcctcctgcatcaattccactccacccccagtatgggctgtaggtaagcaccactcccagccatgacttttactctcttttaacttcttatttcaaaataattttgaatttgcagaaagttgcagcagaggtacaacaaggcccccttcatatgctcaggttcatttacatcatcatctctctcacgctcctctctccctttcccgcccccacaccttcatgtacacatgtacacatacacacatacacactctcacacatacacacatactcatacaacacacacacatagttacacaatacacacacatacaaacatacacatacagatgcagacacatacacacacataccttcacgtacacatgcacacacacacacacacacacacatacacacacacacacatttctagttgcgagtaagttacatacatctctcccctgagtatctcagcatgtatgttctaagaacatgaacttcccttacagggtcacaatacagttattcaatttagtgtgtttaacattcacacaaacttttacttactattctgtctctattatccatttgtcaactgactcacaagtgtccctccagtccagggtccagtccaaagcctcatatgatatctagttgacatatctctttaatgttttatctggtttggtttcaactttgtgacgtgtctgttttggagatagggcctccatagtgttgtagcctatgctagtcttgaacgttaagcattgaacattaagcagtcatcttgtcccagcagtcctgtccacctttcccttttctttaacctgaaaacattcatttttcgaccttattttggctttgatattaacattttaaaataatcacttattcccttacttttaatatttttacattttatttttaaatttgtgtgtgggtatgtatgtgcacatgagtgtagtgccctcaggggtcagaagagggcatcacagcccctggagttggagttagaaatggttgtgagctgcctgaggtcggtgctgggaattgaactcgggtcttctgtgagagcattatgaggtagggcctcaccatgttgtctaagctgatctcaaattctaaataacggatgcattgtccttctgcaatgccccatccagagaaagaagatgccggtcttccctactgtgacagtaattctgattctaactgacaggaaatttcccagtcctgtgtcttgtctgctgtggccttttaaagactcacccgtttccaagaatgttgctgtagtgcttttggcattgaggttcagaaagtaaagcagccttaccttcttagtgcaactgcattttcataatgtctttctctccatcccgcccacaccggggaacagcactgcccatgactccatggttaccgcatctctaccatgagtgctccctgccctgggtccggttaacccacaacagagtggagcaaagtgatgtctgctgttgtcctctttcagagcacgtacgaccgctgccccatggagctggttcgctgtatccggcacattctgtacaacgaacagaggctggttcgcgaagccaacaacgtgagtgtgcccatggttgtgggagaggagttggggtgcccttcttgagccgtttccccctggatcccactttgttgaggtgacccaatatgcactagtgtctctttagggagctgaccttagctttataacttaagtgaggctacaaccacaaagcaaggtgaacatgtgcaaactaacttaaccaaagcaaatcagttttgtgttgaagcatgctcacaatcagggaaattacttagtagaaatttcttcacactctctgggccagctgctgaaggagtggatcatacctagtcacttaaacagccagatccacagggaccttgtgcatgcctcccccatcacttcctctgaggggctacagacacctaggagccttcgggtgtggcttcatccacggtagaagcaaatgggtagaagcaaatgatttcagcaccagtctgccttgagatagatacagaccatgttttattcccaatgtgtccccagcgaaatcacagtcatggtattggatcaatgagtgaatgtggaatcagggttatcatcatcaggaggaagacccaagtgacctctggggcatgtggagttctagtttctcaaaagaattgggcacacacatcctctgtgggacactcatgtggaggccagagctgaaacagaagtaggtttttaccgtgaagaaagcctgtcgagtcaaccgcctccactcgctttccattctaccccgattctcacatgtggcatttgtgatgtcttctgacctcaaatttaaccttgggggtcttagcttcacctagggattaagaccgaaggcttcttcccaccctcccacactggatctccccacctgtccccagggcagctctccagctggaagtcttgctgacgccatgtcccagaagcaccttcagatcaaccaaacgtttgaggagctgcgcctgatcacacaggacacggagaacgagctgaagaagctgcagcagacccaagagtacttcatcatccagtaccaggagagcctgcggatccaaggtgaggctggcagtggaatcctggaagctccgggggtgggagtaaggtctaggagcaagctctgaggaagcagaagagatcctggttccattctgagctgtgcctttgtctgagcagagtggaaccattcaggctgaagaaggagctgggtagcttagggagagaacatggcacctgatggggagagtgcagggtctcactcaggccttcctgttctcatgaagtttggggtcgctgtagaagatgtttcctttttgagatttaaggtgttcatgggctggagagatggctcagtagtggaaagcactggctgctcctccagaaggcctgagttcaattcccagcaaccacatagcagctcacaaccatctgtaactgtagtcccatagcggccaatgccctcttacggtgtgcatatatgcagacaaaatatgcatatatataagtaaataaatctttgccaggcatggtggctcacatctttaatcctagcatttggaatacagaggaaggtgactctatgagtttgagaacagcctggactacaaagagagttccaggacagccagggctattactcaggaactctatctcaaaaacaagcaaaaagcattcatagcttaataaatagcttacagaggacatattataattgtatatagtaaacattttctttttttaaagatttatttatttattatatgtaagtacactgtagctgtcttcagacactccagaagagggcatcagattttgttacggatggttgtgagccaccatgtggttgctgggatttgaactcaggaccttcagaagagcagtcagtgctcttgaccatcttgccagccccaaagtaaacatttttagagtaattgtttgtttgttttagacagggtttctctgtgtagccctgggtgtcctgagactcactttgtagaccaggctggcctcgaactcagaaatccgcctgcctctgcctcctgagtgctggtatcagaggcgtgcgcaaccactgccgggcctagtgtaggcattttatgaatgcagccttgctgggatgggaagtaggaagtacatcacatctaggagtgtgggtgtagctcagaggtagaatgctttcctaatgtgtgagagcctggcctccatccccagcactggaggatctctatttgtggtgcctgccattgagttgtatgcagttattcaagactttcctgtgaccctgtatgccttctggacagtgttccctagcctttgttctaaggcacacagaatttgagaattcttccaggagttgtggagcctccgcagcgctccctcttaaccctacgctttcttctctatgcgggcgtgcctgcctcagacagacagagggggctggggccatggcactagtgattaagagcactggcctcttttgcataggagttggatttggttcccagaatccacttggtggctcaaaactgtctgtaactccacttccgagtaatccaggaccctcttctaacctctgtgggcaccaagcatgcacgtagtacacagacatacacgtatgcaaaacactcatacgcgtgcaataaatctaacaccaattttaaaaataagactctcagaagaaacctgtccccacacccgcctaaggtctcctaaggtcatgtgtgtaaagcatagcgcattgctatgttgacattatttactgcctcccaggcttcccagatgataaatcattgagaaggaactctgtctattagctctgtgccctgaggccagcataaattacagttgcgggcttatcctggctgtcttagtgttgcttttgtccatcccagcttgtgtgtccctggggcaaggacaaggtcattgtgacatggttttcagaggccagccatgagcttcaatgagacatgcccgtatgcacaaattcttggcaagaccagaataaggatgctgggctactcaagggccaccggaggaaacaataatgccaggactccggtctttttctgggcatggagcaaggaacaagaaggtttgcaggcagtgatagtggacaggtagttcaacccaggacgtacttgatggagcagagccgatgaggactctatgtgactctgtgtcctgcttctgtctcccgggtctgtccattcgtattgaaaggtaccaaaagaaaaccgacgatgtagctcagttgggggagtgcttgcctagaatgcaaaaaaaaaaaacaaaacaaaaaaaaaaaaaaaaaacctggttttatccccagagcagcctcctgagccgctgtcaagagtctcccttcacagatggaagactgaagcgggaaatacagggatttacccaagttcgaccagctgataaaccacagggccacttgcacacataggctaacttcaaacctgtggggagggcaggatgccctctgtgtggggagtgtggaggcacacactactaagcagttgcttccccaacaaacacctgctcccggcctaggagaggccaggtcaggagaaccttgatccgccttctgagagagccccttcatcatgggacacccattgcgagctggaactctgacttactgttgatggggtgtctagatgaccctgagagtgggtgatccttcagacttcttactggacacaagaattgatggtggtgggtgtcctgtcccctcctccagctcagtttgcccagctgggacagctgaacccccaggagcgcatgagcagggagacggccctccagcagaagcaagtgtccctggagacctggctgcagcgagaggcacagacactgcagcagtaccgagtggttagtgcgtgccctgcgaccctctgccccagagggagctctgtcacctgagattcagggcaccaggtgggggacagagcctggatgggagcagggcccctctctcctggggtggagcgggtgtgagggggccaggccctgggttctaggccaggcactgagggatgctcgccgggagccagagagccgctgttccctcgcacaggagctggctgagaagcaccagaagaccctgcagctgctgcggaagcagcagaccatcatcctggacgacgagctgatccagtggaagcggagacagcagctggccgggaacgggggtccccccgagggcagcctggacgtgctgcagtcctggtgagggtgagaggtgggcggggtgggcagcttgggcaaggatgccagctgcctcttctgtccctgccgtggcgtgagcagcagatgcccactgtctgtgacagctctcactttagcagtatcttggctcttgatgggactcggctcttcagacctgtgccacctcccacaagggacagtggtgccttgggatgggcagggctacccttgagctggttggttccaagttggggccaccctgactgtcttctgcttttgaaaagtgggactctgctcagtgtgcctgtgcaggagagcggtggccaaggccagcacctttctggggcggggggtgctttggtgggaaggaggaagagtagcatgcatcttcctcccctggcctgggctggaacagcagccgccatccccctgaaggccccgggctccttgcaggtgtgagaagctggccgagatcatctggcagaaccggcagcaaatccgcagggctgagcacctgtgccagcagctgcccatcccatgccccgtggaggagatgctggctgaggtcaacgccaccatcannnnnnnnnnnnnnnnnnnnnnnnnnnnnnnnnnnnnnnnnnnnnnnnnnnnnnnnnnnnnnnnnnnnnnnnnnnnnnnnnnnnnnnnnnnnnnnnnnnnnnnnnnnnnnnnnnnnnnnnnnnnnnnnnnnnnnnnnnnnnnnnnnnnnnnnnnnnnnnnnnnnnnnnnnnnnnnnnnnnnnnnnnnnnnnnnnnnnnnnnnnnnnnnnnnnnnnnnnnnnnnnnnnnnnnnnnnnnnnnnnnnnnnnnnnnnnnnnnnnnnnnnnnnnnnnnnnnnnnnnnnnnnnnnnnnnnnnnnnnnnnnnnnnnnnnnnnnnnnnnnnnnnnnnnnnnnnnnnnnnnnnnnnnnnnnnnnnnnnnnnnnnnnnnnnnnnnnnnnnnnnnnnnnnnnnnnnnnnnnnnnnnnnnnnnnnnnnnnnnnnnnnnnnnnnnnnnnnnnnnnnnnnnnnnnnnnnnnnnnnnnnnnnnnnnnnnnnnnnnnnnnnnnnnnnnnnnnnnnnnnnnnnnnnnnnnnnnnnnnnnnnnnnnnnnnnnnnnnnnnnnnnnnnnnnnnnnnnnnnnnnnnnnnnnnnnnnnnnnnnnnnnnnnnnnnnnnnnnnnnnnnnnnnnnnnnnnnnnnnnnnnnnnnnnnnnnnnnnnnnnnnnnnnnnnnnnnnnnnnnnnnnnnnnnnnnnnnnnnnnnnnnnnnnnnnnnnnnnnnnnnnnnnnnnnnnnnnnnnnnnnnnnnnnnnnnnnnnnnnnnnnnnnnnnnnnnnnnnnnnnnnnnnnnnnnnnnnnnnnnnnnnnnnnnnnnnnnnnnnnnnnnnnnnnnnnnnnnnnnnnnnnnnnnnnnnnnnnnnnnnnnnnnnnnnnnnnnnnnnnnnnnnnnnnnnnnnnnnnnnnnnnnnnnnnnnnnnnnnnnnnnnnnnnnnnnnnnnnnnnnnnnnnnnnnnnnnnnnnnnnnnnnnnnnnnnnnnnnnnnnnnnnnnnnnnnnnnnnnnnnnnnnnnnnnnnnnnnnnnnnnnnnnnnnnnnnnnnnnnnnnnnnnnnnnnnnnnnnnnnnnnnnnnnnnnnnnnnnnnnnnnnnnnnnnnnnnnnnnnnnnnnnnnnnnnnnnnnnnnnnnnnnnnnnnnnnnnnnnnnnnnnnnnnnnnnnnnnnnnnnnnnnnnnnnnnnnnnnnnnnnnnnnnnnnnnnnnnnnnnnnnnnnnnnnnnnnnnnnnnnnnnnnnnnnnnnnnnnnnnnnnnnnnnnnnnnnnnnnnnnnnnnnnnnnnnnnnnnnnnnnnnnnnnnnnnnnnnnnnnnnnnnnnnnnnnnnnnnnnnnnnnnnnnnnnnnnnnnnnnnnnnnnnnnnnnnnnnnnnnnnnnnnnnnnnnnnnnnnnnnnnnnnnnnnnnnnnnnnnnnnnnnnnnnnnnnnnnnnnnnnnnnnnnnnnnnnnnnnnnnnnnnnnnnnnnnnnnnnnnnnnnnnnnnnnnnnnnnnnnnnnnnnnnnnnnnnnnnnnnnnnnnnnnnnnnnnnnnnnnnnnnnnnnnnnnnnnnnnnnnnnnnnnnnnnnnnnnnnnnnnnnnnnnnnnnnnnnnnnnnnnnnnnnnnnnnnnnnnnnnnnnnnnnnnnnnnnnnnnnnnnnnnnnnnnnnnnnnnnnnnnnnnnnnnnnnnnnnnnnnnnnnnnnnnnnnnnnnnnnnnnnnnnnnnnnnnnnnnnnnnnnnnnnnnnnnnnnnnnnnnnnnnnnnnnnnnnnnnnnnnnnnnnnnnnnnnnnnnnnnnnnnnnnnnnnnnnnnnnnnnnnnnnnnnnnnnnnnnnnnnnnnnnnnnnnnnnnnnnnnnnnnnnnnnnnnnnnnnnnnnnnnnnnnnnnnnnnnnnnnnnnnnnnnnnnnnnnnnnnnnnnnnnnnnnnnnnnnnnnnnnnnnnnnnnnnnnnnnnnnnnnnnnnnnnnnnnnnnnnnnnnnnnnnnnnnnnnnnnnnnnnnnnnnnnnnnnnnnnnnnnnnnnnnnnnnnnnnnnnnnnnnnnnnnnnnnnnnnnnnnnnnnnnnnnnnnnnnnnnnnnnnnnnnnnnnnnnnnnnnnnnnnnnnnnnnnnnnnnnnnnnnnnnnnnnnnnnnnnnnnnnnnnnnnnnnnnnnnnnnnnnnnnnnnnnnnnnnnnnnnnnnnnnnnnnnnnnnnnnnnnnnnnnnnnnnnnnnnnnnnnnnnnnnnnnnnnnnnnnnnnnnnnnnnnnnnnnnnnnnnnnnnnnnnnnnnnnnnnnnnnnnnnnnnnnnnnnnnnnnnnnnnnnnnnnnnnnnnnnnnnnnnnnnnnnnnnnnnnnnnnnnnnnnnnnnnnnnnnnnnnnnnnnnnnnnnnnnnnnnnnnnnnnnnnnnnnnnnnnnnnnnnnnnnnnnnnnnnnnnnnnnnnnnnnnnnnnnnnnnnnnnnnnnnnnnnnnnnnnnnnnnnnnnnnnnnnnnnnnnnnnnnnnnnnnnnnnnnnnnnnnnnnnnnnnnnnnnnnnnnnnnnnnnnnnnnnnnnnnnnnnnnnnnnnnnnnnnnnnnnnnnnnnnnnnnnnnnnnnnnnnnnnnnnnnnnnnnnnnnnnnnnnnnnnnnnnnnnnnnnnnnnnnnnnnnnnnnnnnnnnnnnnnnnnnnnnnnnnnnnnnnnnnnnnnnnnnnnnnnnnnnnnnnnnnnnnnnnnnnnnnnnnnnnnnnnnnnnnnnnnnnnnnnnnnnnnnnnnnnnnnnnnnnnnnnnnnnnnnnnnnnnnnnnnnnnnnnnnnnnnnnnnnnnnnnnnnnnnnnnnnnnnnnnnnnnnnnnnnnnnnnnnnnnnnnnnnnnnnnnnnnnnnnnnnnnnnnnnnnnnnnnnnnnnnnnnnnnnnnnnnnnnnnnnnnnnnnnnnnnnnnnnnnnnnnnnnnnnnnnnnnnnnnnnnnnnnnnnnnnnnnnnnnnnnnnnnnnnnnnnnnnnnnnnnnnnnnnnnnnnnnnnnnnnnnnnnnnnnnnnnnnnnnnnnnnnnnnnnnnnnnnnnnnnnnnnnnnnnnnnnnnnnnnnnnnnnnnnnnnnnnnnnnnnnnnnnnnnnnnnnnnnnnnnnnnnnnnnnnnnnnnnnnnnnnnnnnnnnnnnnnnnnnnnnnnnnnnnnnnnnnnnnnnnnnnnnnnnnnnnnnnnnnnnnnnnnnnnnnnnnnnnnnnnnnnnnnnnnnnnnnnnnnnnnnnnnnnnnnnnnnnnnnnnnnnnnnnnnnnnnnnnnnnnnnnnnnnnnnnnnnnnnnnnnnnnnnnnnnnnnnnnnnnnnnnnnnnnnnnnnnnnnnnnnnnnnnnnnnnnnnnnnnnnnnnnnnnnnnnnnnnnnnnnnnnnnnnnnnnnnnnnnnnnnnnnnnnnnnnnnnnnnnnnnnnnnnnnnnnnnnnnnnnnnnnnnnnnnnnnnnnnnnnnnnnnnnnnnnnnnnnnnnnnnnnnnnnnnnnnnnnnnnnnnnnnnnnnnnnnnnnnnnnnnnnnnnnnnnnnnnnnnnnnnnnnnnnnnnnnnnnnnnnnnnnnnnnnnnnnnnnnnnnnnnnnnnnnnnnnnnnnnnnnnnnnnnnnnnnnnnnnnnnnnnnnnnnnnnnnnnnnnnnnnnnnnnnnnnnnnnnnnnnnnnnnnnnnnnnnnnnnnnnnnnnnnnnnnnnnnnnnnnnnnnnnnnnnnnnnnnnnnnnnnnnnnnnnnnnnnnnnnnnnnnnnnnnnnnnnnnnnnnnnnnnnnnnnnnnnnnnnnnnnnnnnnnnnnnnnnnnnnnnnnnnnnnnnnnnnnnnnnnnnnnnnnnnnnnnnnnnnnnnnnnnnnnnnnnnnnnnnnnnnnnnnnnnnnnnnnnnnnnnnnnnnnnnnnnnnnnnnnnnnnnnnnnnnnnnnnnnnnnnnnnnnnnnnnnnnnnnnnnnnnnnnnnnnnnnnnnnnnnnnnnnnnnnnnnnnnnnnnnnnnnnnnnnnnnnnnnnnnnnnnnnnnnnnnnnnnnnnnnnnnnnnnnnnnnnnnnnnnnnnnnnnnnnnnnnnnnnnnnnnnnnnnnnnnnnnnnnnnnnnnnnnnnnnnnnnnnnnnnnnnnnnnnnnnctcactttttatggagtactgggcctagaccccagagccttgtgcatgctgggcaagcattctaccagctgaactataactatccccagcccatgatgaacattttcagaatgtctccatgaggaggggtccttattgcatgctgttagaagaacttaactctcagaagcgtgataaaagtgtcctcgttattcgacacatccaagtctgtctttctctagtgtgagactcttggctcttcaactgtcatctttagagaaccgggctttattgcaaaggcagggtttttatgagatcttccctgtgtgtgctgcaaaagcagagtttagactcctaaaaaataaaaaaaaaaattaaaaaaaaaaaggccacagtacactgctttcaaagtttcaaagccttatggattagattgcttcacctccatccctgttgtccacgaagctttctgtaaccttgacgtgccctgcaatgtgtaaccagtagggtatcttgtccaaataatatgaaattttttacattctcagtgatgctgatgactaagttatcttgaatgctatttaaaaataaatacagaaagtttgatagagtcgaccatctcagtacttgggcagccaggactacatagagaaaccctgtctcaggaaggagggggggcgagggagagagagagagagggagagaaagagaaagggagagagaggtgttatgcatgttggaatccagctgtgattctgggtcctccatttcctccctctcggagtatccagacaccactgtatgctgggatttattcaggataggcttgtatgcattgtatgcatacacactttattcggggtgaaccagggctgtgtatatgaacctaggagagtggaaaggggttcttcttaaagtgaaattacattggctgaggcttgggggtacctcatttgcatggagaggcattccttgaatttcaccatggattatgtgacctcccccagagtatggtttgggctccccagatcagaagaagaggaagccctgcttagagaaggttgtttttttgttttgttttgttttgttttgttttgttttgttttgttttgtttttttggttttggttttttgagacagggtttctctgtgtagccctggctgtcctggaactcactttgtagaccaggctggcctcgaactcagaaatccgcctgcctctgcctcccgagtgctgggattaaaggcgagagccaccacgcccgactggttgttcttcattttacaccaagctcagggaagctgtccggacatggtagactatataaccttagtagtgaggtacaacagacagacagacagatgataggtagtcccctgaacagtcatggtaatgcactcctgtaatcttagcccttgggaggtagagtcagaaggatcagaagttcatgtttatcctggctatatattaatttcaagttcaaggccagattggcctgcatgagacctatcccaaactaagaaaggggcttgggggatggcttagtaaagtgcttgccatgcaaatatggagacatgagtttttatattttattttatacatgtgagagttttgcctacatgtatatgtgtgtagcatgttgtgcctgtggcccatgaggccagaagagagcatcagatcccctggaactggggttacagatgattgtgagctgccatgtgggtgctgcaaaaacagccagtgctcttcatcacttgagctatctctccagccccaataataaattttaagaagtggagaactcatgaaaaaagacacctgaggttgacctctgacctccacctatgtgcacatatgtgcttcaccctcacacacccccacagggaggggaggaggaaggaagcaggaaggtgaagagagaggaagtcccctctcctggccatcttggtcactgccctgtgtggtgcgagcaccagaccacatccctctggccctaactaccctcgtacctactgaccagccagctgaatagaatgagaggcagtgtattacaagttcatattctaactgtttctcaatcaagttgccaactagaaactttccactcctccatgccaagttgcttcactgtgagctagagttcttggcaggtgtcaaggacaagcaagtattatacttggggctgcacatgtgtgccctccctctgctcacttagaaagccaggcttgtctgtctgactgctctctctctctctctctctctctctcactcccttcttccctcnnnnnnnnnnnnnnnnnnnnnnnnnnnnnnnnnnnnnnnnnnnnnnnnnnnnnnnnnnnnnnnnnnnnnnnnnnnnnnnnnnnnnnnnnnnnnnnnnnnnnnnnnnnnnnnnnnnnnnnnnnnnnnnnnnnnnnnnnnnnnnnnnnnnnnnnnnnnnnnnnnnnnnnnnnnnnnnnnnnnnnnnnnnnnnnnnnnnnnnnnnnnnnnnnnnnnnnnnnnnnnnnnnnnnnnnnnnnnnnnnnnnnnnnnnnnnnnnnnnnnnnnnnnnnnnnnnnnnnnnnnnnnnnnnnnnnnnnnnnnnnnnnnnnnnnnnnnnnnnnnnnnnnnnnnnnnnnnnnnnnnnnnnnnnnnnnnnnnnnnnnnnnnnnnnnnnnnnnnnnnnnnnnnnnnnnnnnnnnnnnnnnnnnnnnnnnnnnnnnnnnnnnnnnnnnnnnnnnnnnnnnnnnnnnnnnnnnnnnnnnnnnnnnnnnnnnnnnnnnnnnnnnnnnnnnnnnnnnnnnnnnnnnnnnnnnnnnnnnnnnnnnnnnnnnnnnnnnnnnnnnnnnnnnnnnnnnnnnnnnnnnnnnnnnnnnnnnnnnnnnnnnnnnnnnnnnnnnnnnnnnnnnnnnnnnnnnnnnnnnnnnnnnnnnnnnnnnnnnnnnnnnnnnnnnnnnnnnnnnnnnnnnnnnnnnnnnnnnnnnnnnnnnnnnnnnnnnnnnnnnnnnnnnnnnnnnnnnnnnnnnnnnnnnnnnnnnnnnnnnnnnnnnnnnnnnnnnnnnnnnnnnnnnnnnnnnnnnnnnnnnnnnnnnnnnnnnnnnnnnnnnnnnnnnnnnnnnnnnnnnnnnnnnnnnnnnnnnnnnnnnnnnnnnnnnnnnnnnnnnnnnnnnnnnnnnnnnnnnnnnnnnnnnnnnnnnnnnnnnnnnnnnnnnnnnnnnnnnnnnnnnnnnnnnnnnnnnnnnnnnnnnnnnnnnnnnnnnnnnnnnnnnnnnnnnnnnnnnnnnnnnnnnnnnnnnnnnnnnnnnnnnnnnnnnnnnnnnnnnnnnnnnnnnnnnnnnnnnnnnnnnnnnnnnnnnnnnnnnnnnnnnnnnnnnnnnnnnnnnnnnnnnnnnnnnnnnnnnnnnnnnnnnnnnnnnnnnnnnnnnnnnnnnnnnnnnnnnnnnnnnnnnnnnnnnnnnnnnnnnnnnnnnnnnnnnnnnnnnnnnnnnnnnnnnnnnnnnnnnnnnnnnnnnnnnnnnnnnnnnnnnnnnnnnnnnnnnnnnnnnncagcaagcagcaagtgagggggggtggcggggcggggtggggggagtcctgtttacttagcagtggattccctgaagagcagtaaagtagaagtgaaggggggaggcatggcagggaggggggatccatctctcctgaggggtcagaggaggtttctgaggaagtgacacgtgaatagacttgaacaaagtaaggaaactggctttgcagagacccagaggacaagcatcctaggctgagagagaaagcccagctggggtggctgaaaagctccccagagcccctaggctgcctccagccaagcaggaagttggtgatgggaactgaggccagggcacctcagtaatggaggtcggggtgaaaggtcaaagcgtgcataatcctaagtgccctgatttcacacacacacacacacacacacacacacacacacacacacacacacagagttgcaggtcagtaatgcattcatgtagcactgtcttcaggattgcacaggattccattacctagtgactttcgaagatcacggttaggcaattgagattcttagtatttaatttacttcattttcactaatgactgatattgagataacctagtacaagtaccttgttcaactattccttcagataaattcctaagcagaattaggtcaaagggcataagctttataagcttttttttttttgacgcatccaaaactgcattcaaaaacccaaattcacatttcccacagctctctgttggacatctgcttctctgtctttttgccaaccacagaatagcctccattcatgtctgccagtctggttggcatgaaaatggtacattataagtcctgtgtgtatttatctgattctaggcaacctttgcatatgatgattaataattccagattaattagcatggtagcagaagctagcatttgctggatggctctgagtttcctagagtatccgtcttagtcactgttctaccactgtggagagacaccgtgaccaagacagctcttacaaaggaaaacatttcattgagagctggcttatagtgtgactggaactcctcttttacaggaaactgaggcatagggaaatcaaataatttgccaaagatcccaggactgggaaggggccaagccagggtttcagcttggcttagctcctgaacctagattcttcatccaccaatggccagctctggccattgataatttttttctgtgaaaaacatgtttgtatttcttccttggttttttgaagttatatttttatatagaaaatatactcatctgagggtgagatgctcagtctacagagtacttgctgcgagtttaatccctagagcccatactttttaaaaagccaggtgatgtggcacttgtaatactagtgtatgtgttcctccacatgcctgggcacacacatgcatgtacacacatgcacataaatatgccgcacagaaacatgtgtgtatatacacacacacaagaaaaatagttaatcccctattgatttatctatacagaaaatcttttctctgtattaagttttattttctcaagaacaaagacttgtgatttccatagaaacccaatctgtctgtttttagtgtgtgtgtgtgtgtgtgtgtgtgttacacacatataccatggtgtgcatgtggggagtaggaagacagtcactgggagtcggcagtcttcttccactgtgtgagtcccaggggtgggacttgtgtgatcaagctttgtgacaaggacctttacccactgagctgtcttgccagctccaactgtgaagttttcaaagcttttatttttcaattatgcctgcaagcacagtcatagtctcagtttgggaggctgaggcagcaagatccaaaatgcaacacctgcctggggtagagagtgagttcaaagccagcatgtgcaacttagcaagacactgtctgaaaagaggtggggggatcttaggggtagagcttttgcctagtatatacgatgccctagtatatacgatgccctaggttcttcagtccccaataccagacaaaaagtcagacatagtcataaattcataaggtagagacaggcagatctctgtgaacatgaaggcagcctatcctacatagtgagatcctgcttcaaaagaaaaaattttttttcacaaatatgcaccactagaagttaactacacgcgcatggaagtgtctgccttctctgtggggactttctaaaccgtgccagctgacctggaaggtggcccaatttgtactttcagtgcctcacatcggcagcaagcctcccagaagacagaaatgttacctgctgtgtcggtcatgttctgagttgagattaagaggctgtgtcctaaccctagaaaagataagttcttgagggaggtgtctctgaggtccctggttttcactgttcttctccccggcagcgaaagcagctgacggatacgtgaagccaca

SEQ ID NO: 158 - DNA, 2574 bp, Mus musculus
aaggtcctgcaacggggagggagcgagcgggcgtgcgagagagcgtgcgggaccggagagaccctggctctggtggggcagaacgaggttgtgaaccatggctatgtggatacaggctcagcagctccagggcgatgcccttcaccagatgcaggccttgtacggccagcatttccccatcgaggtgcgacattatttatcacagtggatcgaaagccaagcctgggactcaatagatcttgataatccacaggagaacattaaggccacccagctcctggagggcctggtgcaggagctgcagaagaaggcggagcaccaggtgggggaagatgggtttttgctgaagatcaagctggggcactatgccacacagctccagagcacgtacgaccgctgccccatggagctggttcgctgtatccggcacattctgtacaacgaacagaggctggttcgcgaagccaacaacggcagctctccagctggaagtcttgctgacgccatgtcccagaagcaccttcagatcaaccaaacgtttgaggagctgcgcctgatcacacaggacacggagaacgagctgaagaagctgcagcagacccaagagtacttcatcatccagtaccaggagagcctgcggatccaagctcagtttgcccagctgggacagctgaacccccaggagcgcatgagcagggagacggccctccagcagaagcaagtgtccctggagacctggctgcagcgagaggcacagacactgcagcagtaccgagtggagctggctgagaagcaccagaagaccctgcagctgctgcggaagcagcagaccatcatcctggacgacgagctgatccagtggaagcggagacagcagctggccgggaacgggggtccccccgagggcagcctggacgtgctgcagtcctggtgtgagaagctggccgagatcatctggcagaatcggcagcagatccgcagggctgagcacctgtgccagcagctgcccatcccaggccccgtggaggagatgctggctgaggtcaacgccaccatcacggacatcatctcagccctggtcaccagcacgttcatcatcgagaagcagcctcctcaggtcctgaagacccagaccaagtttgcggccactgtgcgcctgctggtgggggggaagctgaatgtgcacatgaaccccccgcaggtgaaggcgaccatcatcagcgagcagcaggccaagtccctgctcaagaatgagaacacccgcaatgattacagcggcgagatcctgaacaactgttgcgtcatggagtaccaccaggccactggcacgctcagcgcccacttcagaaacatgtccctgaaacgaatcaagagatctgaccgccgtggtgcagagtcagtaacggaagagaagttcacgatcctgtttgactcacagttcagcgtcggtggaaacgagctggtctttcaagtcaagaccttgtcgctcccggtggtggtgattgttcacggcagccaggacaacaatgccacagccactgtcctctgggacaacgcctttgcagagcctggcagggtgccatttgccgtgcctgacaaggtgctgtggccgcagctgtgtgaagcgctcaacatgaaattcaaggctgaagtacagagcaaccggggcttgaccaaggagaacctcgtgttcctggcacagaaactgttcaacatcagcagcaaccacctcgaggactacaacagcatgtccgtgtcctggtcccagttcaaccgggagaatttgccaggacggaattacactttctggcagtggtttgatggcgtgatggaagtattgaaaaaacatctcaagcctcactggaatgatggggctatcctgggtttcgtgaacaagcaacaggcccacgacctgctcatcaacaagccggacgggaccttcctgctgcgcttcagcgactcggaaatcgggggcatcaccattgcttggaagtttgactctcaggagagaatgttttggaatctgatgccttttaccactagagacttctctatccggtccctcgctgaccgcctgggggacctgaattacctcatatatgtgtttcctgatcggccaaaggatgaagtatattctaagtactacacaccggtcccctgtgagcccgcaactgcgaaagcagctgacggatacgtgaagccacagatcaagcaggtggtccccgagtttgcaaatgcatccacagatgctgggagtggcgccacctacatggatcaggctccttccccagtcgtgtgccctcaggctcactacaacatgtacccacccaacccggactccgtccttgataccgatggggacttcgatctggaagacacgatggacgtggcgcggcgcgtggaagagctcttaggccggcccatggacagtcagtggatccctcacgcacagtcatgaccagacctcaccacctgcagcttcatcgccctcgtggaggaacttcctgtggatgttttaattccatgaatcgcttctctttggaaacaatactcgtaatgtgaagtgttaatact

SEQ ID NO: 159 - DNA, 2361 bp, Mus musculus
atggctatgtggatacaggctcagcagctccagggcgatgcccttcaccagatgcaggccttgtacggccagcatttccccatcgaggtgcgacattatttatcacagtggatcgaaagccaagcctgggactcaatagatcttgataatccacaggagaacattaaggccacccagctcctggagggcctggtgcaggagctgcagaagaaggcggagcaccaggtgggggaagatgggtttttgctgaagatcaagctggggcactatgccacacagctccagagcacgtacgaccgctgccccatggagctggttcgctgtatccggcacattctgtacaacgaacagaggctggttcgcgaagccaacaacggcagctctccagctggaagtcttgctgacgccatgtcccagaagcaccttcagatcaaccaaacgtttgaggagctgcgcctgatcacacaggacacggagaacgagctgaagaagctgcagcagacccaagagtacttcatcatccagtaccaggagagcctgcggatccaagctcagtttgcccagctgggacagctgaacccccaggagcgcatgagcagggagacggccctccagcagaagcaagtgtccctggagacctggctgcagcgagaggcacagacactgcagcagtaccgagtggagctggctgagaagcaccagaagaccctgcagctgctgcggaagcagcagaccatcatcctggacgacgagctgatccagtggaagcggagacagcagctggccgggaacgggggtccccccgagggcagcctggacgtgctgcagtcctggtgtgagaagctggccgagatcatctggcagaatcggcagcagatccgcagggctgagcacctgtgccagcagctgcccatcccaggccccgtggaggagatgctggctgaggtcaacgccaccatcacggacatcatctcagccctggtcaccagcacgttcatcatcgagaagcagcctcctcaggtcctgaagacccagaccaagtttgcggccactgtgcgcctgctggtgggggggaagctgaatgtgcacatgaaccccccgcaggtgaaggcgaccatcatcagcgagcagcaggccaagtccctgctcaagaatgagaacacccgcaatgattacagcggcgagatcctgaacaactgttgcgtcatggagtaccaccaggccactggcacgctcagcgcccacttcagaaacatgtccctgaaacgaatcaagagatctgaccgccgtggtgcagagtcagtaacggaagagaagttcacgatcctgtttgactcacagttcagcgtcggtggaaacgagctggtctttcaagtcaagaccttgtcgctcccggtggtggtgattgttcacggcagccaggacaacaatgccacagccactgtcctctgggacaacgcctttgcagagcctggcagggtgccatttgccgtgcctgacaaggtgctgtggccgcagctgtgtgaagcgctcaacatgaaattcaaggctgaagtacagagcaaccggggcttgaccaaggagaacctcgtgttcctggcacagaaactgttcaacatcagcagcaaccacctcgaggactacaacagcatgtccgtgtcctggtcccagttcaaccgggagaatttgccaggacggaattacactttctggcagtggtttgatggcgtgatggaagtattgaaaaaacatctcaagcctcactggaatgatggggctatcctgggtttcgtgaacaagcaacaggcccacgacctgctcatcaacaagccggacgggaccttcctgctgcgcttcagcgactcggaaatcgggggcatcaccattgcttggaagtttgactctcaggagagaatgttttggaatctgatgccttttaccactagagacttctctatccggtccctcgctgaccgcctgggggacctgaattacctcatatatgtgtttcctgatcggccaaaggatgaagtatattctaagtactacacaccggtcccctgtgagcccgcaactgcgaaagcagctgacggatacgtgaagccacagatcaagcaggtggtccccgagtttgcaaatgcatccacagatgctgggagtggcgccacctacatggatcaggctccttccccagtcgtgtgccctcaggctcactacaacatgtacccacccaacccggactccgtccttgataccgatggggacttcgatctggaagacacgatggacgtggcgcggcgcgtggaagagctcttaggccggcccatggacagtcagtggatccctcacgcacagtcatga

SEQ ID NO: 160 - DNA, 94720 bp, Homo sapiens
  misc_feature (23326)..(24418): "n" at positions 23326 to 24418 can be any base
  misc_feature (87811)..(87830): "n" at positions 87811 to 87830 can be any base
agccctcccgtgcctcccaccctgaccctgtgcccagtggctgtgcccttggttgaccatccctcatttggtctctgactgtaaggccccgaatatctgtgtctttcattgcacatttccccttctgggttttttttttttttttttttttgagatggagtttcgctctcgttgcccagactggagtgcaatggcgcgatcttggctcacagcaacctccacctccaaggttcaagcgattctcctacctcagcctcccgagtagctgggattacaggcatgtgccaccactcctggctaattttgtatttctaattttgtatttttagtagaggcggtgtttctccatgttggtcaggctggtctcgaactcccgacctcaggtgatccacccgcctcggcctcccaaagtgctggaattacaggcatcagctaccatgcccggcccccactctggcttttattctctctgtgtctctcccttgtctccttaggtctccatctggttctctgattctgtctgggtttctctccatttcttcaggcctgttctccctttgagatgcagtggggaggaggaggagctatggaactttcccaggatgggcaaagggcacccaagggagtagagggaagggtgtcagagttgggttgggaagaggtgactgtagtcgtggctccagataacacaactacccagaaatgtcaaatttggggtttctttttgctttcagtccccttgtttgtccccttgtgtgggtgatttcccaccacaaagtgccctggtgattttggggaaccaggctgtggaggagaaaactgaggccacgggatgggggttcaggaagatcagaaactgtcaagggtctgactgagctgcggtccgaggctggcctccttgcccctaactgctcttcacccccaaatccaagtcacagtattagatggggagtgaggaaggattttagaaatcttacagaaatatattccccaggctaggtgcagtggctcacgcctgtaatcccagcactctgggaggctgaggtgggaggatcacttgaggccaggagtttgagaccagtctgaccaacatggtgaaacctcgtgtctactaaaaatacaaaacaattagctgggcgtggtgtcacgcacctgtaatcccagctactcgggaggctgaggcacaagaatctcttgaacacaggaggcggaggttgcagtgagccgagatcataccactgcactccagcctgggcaacagagtcagactctgtctcaaaaaaaaagaaaagaaaaaaaaaaaagcaatatattctccaaaagaagacctcctatattttattaggaataataatagtctgcagcctaggcttcagttggcacactatattcgtatcctgaactacatcaaggcacatttgtgtacagacatggttgtgctcttcaactcaacggatcctttcaataaccttgaaggcagtcagggccagaatcacaccctttgattagtccatgaaagaaacctgcccaaagctgtctggccagtaagtgcacagatggcaccaggatccaagttgccgggccttgtgggcagggtctcagtataacctttctaagcttccccaagcccagcacacaccggcggagtgaagaggcctccctgggctgggctagcccaccatttttctgcggtgcggagcatggcatctccattctcgcccagcctacacccctgctctattgaatgggacagtgtgctctgtgcacacttacatgaaggtgggtttgagtttatggattaagagaattatcccaaagggccgggcatggtggctcacgcctgtagtcccagcactttgggaggctgaggcgggtgcatcacctgaggtcaggagttcgagatcagcctggccaatatggtgaaaccccgtctctactaaaaatccaaaaattagctgggcgtggtggtgcacacctgtagtcccagctactcagtacgctgaggcaggataatcacttgaaccagggaggtggaggttgcagttagctgagatcacgccgttgcactccagcctgggcaacaaaagcgaaactccgtcacaaaaagaaaaaaaaaaaaagagggagagagaaagaattatcccaggtcccctttctgccttgcccttgacgatcaggtctgcccatgcccctaccctggggagaacagattgaggtcaccttgacttgaccttccttggggggtggagggaggtggtacagagatgcctttgtttcctgtgctccaagtcccttcttcaaggagagttcctgttacatgggagccagaggggaggtggggtaggggtgaagggccttcccaagaaagctggaggctttctaggaagtatcttttcaccctgcggcaaaggggagaagccctggagcacttaaacatcctgtttcacccccaccttgcctctgcttggacagcctacctgcactccagcccccaccggagaaggcttctagaagtggggccatgggcccatgctcagagtataccccacctctgaggccaggccctggtacctccctatagaaatgccacccccattcttgtccaagaagacagatcaggacctagggagggtgtgtgtttatatgcacagggtgaggacttctgtgcaaatctgggggaagggaaggagctgccggagcttgggtgaagcccgttcctgccgctgtcccctatccaccactcttcagggaagtcactttacagtgaagtcaccaagagaacacaaggccatcctgcctgaggcatagtgactgtcctctgtttctgggaatagcatgaggggaagggtgtggggctggacagggtgggtaggagaggagtcctgcttcctctgcccagctgcccagcctgcctgccctgggggagaggcttgtaggccggtttctttctggacgaagagaagaggatgcagagtctgtgccaggttcacatttcccagccagtcaggtgggcaggaggagcccaccctttgcagccccctcattgcagggccaggcccaggagcctggagagaggagagagggcacacagagccaggcagctgagtggaattggcactgtcctgggcagccctgggtcaagcctggcttctcatcctcatccatgatgactatcaggccgctcttcccgctgagctagtttctcctccttccagcccaacaagaaatcttttgtgccttggccagcccagtacccaacctcaagccctctgggggttgtgtgcgagggggctgagcatcttccacgacacctcccagtactctgccactttcctttgttatgactggagggggttcctttctgtagaatctgtttctcattgtttcttcgtttcttaagtctcagatctacccacatcttccttgctccaagcctcaaaaaagtgcttcggccaggcttttccccttacgctggcctctcaactccaagcactagcccctttcattccatctacctggaatgtcattcctcccttggccacctggtgaaattggcctcatctttcctagggttagtgtggcctagaggaaaacacaaaggctttggagtcataaggtcctggtgcagaccctggctctgctgtaggatcttgagtgagtgagtctgcctcttggatctaagcatcctcacttgtaaagaaatagcaagacccactgctgggatttctgttaagacccagtcacaggcccggtgcggtggctcaagcctgtaatcctagcactttgggaggctgaggcaggtggatcacctgaggtcaggagtttgaggccagcctgaccaagccagcacagactcagcatggtgaaaccttgtctctattaaaaataaaaaaattagccaggtgtggtggcagatgcctgtaatcccagctatttgggaggctgaggcaggagaatcacttgaacctgggaggcagaggtggcagtgagatgagatcacaccactgcactccagcctgggtgacagagcgagactctgtctaaaaaaaaaagactcagtcacagtggctggtgcattgtaggtgctcagaggccttggccagtagagctgggtgttttttcctctgcccttcaatcccatctgtattacaggccccttcttatggccctaacacattgcctaaagggctatgtcccactgcttgtccacaatagagtcttcataaatatctgttggattaatgaaggcccctaaaccagcacagaacttccggagctttgacggttcagggcagccccctgttcactgaccacccccaccatggttcccagaagactctccccctgctgccctggcctctgcctgctctggtcccactgagctgcttttctacacacagtggcagcagcagcctcatctttgcctggtgctgggctgaattttgagttcttaacctgcctggcaagccagcaagatactggctgcagtggcactctgctccctcctctgcgtccgccccaccctccctggataatgctgcatcccccaggactctgggtggagagagcccagtgaccctgtcccaagaggcggggtcgggggatccttggcctttccagagagcccaccctttagcctttagctctggctggaagggagcccagattggtgaggcacacaggagcaagactgagagcaggtgtgtgagactctccaggtggcgagtcctccatgcacctgcacatccatcgctcccgtcctctcccctcccctccatgtgacaaagcaccagctctctcctggccagcacactggctgggattaggctgagggaaagaaagagagaaaatgcttttttatcaagtgccaggcacagtgcttagttgccttcacaaatgctctcctttttcctttaaaaaaactgtctattttactaatgttttaatagggagcatctgcacatgatatatgtattttgtaacaaaagattcaaaagggtatgtggtgaaaagttagtctctgccctttcctgtcccccagggcccttctggaggggcaacaacagttgctggggtcttttgtgcatttaaatgcacggaaggattctgtggatttgaaacatatattacactctaccccctaactatgatttacacgtgatgggaaactgagatcctcagagacattaagtacctagaccaaagtcacacagctagtttttttttgtttttgtttttgttttttttttttgagacggaatctcgctctgtcgcccaggctggagtgcagtggcgcgatctctgctcactgcaacctcagcctcccgggttcacgccattctcctggctcagcctccggagtagctgggactacaggcgcccgccaccacgcccggctaatttttggtatttttagtagagtcagggtttcaccgtgttagccaggatggtctcgatcgcctgacctcctgacccacccgcctcggcctcccaaagtgctgggattacaggtgtgagccaccgcgcccggccaacagctagtaagttagcagagctgggatttagaaccatatctaacttttcaccaccaatgctctggcagaagtaagcaggggcactgacagagccctccgaaactgcagagcccattccaaaccgaggccacgccattctgaggccttggagatctggcatccccgccttcttttctgttgagcatcctataccttctccacatggctccagggtcctgtactgacctatccccctatggaaggattcatccccacagggaaaaagggacattcccacagtgccctttcttagcaaatgtgtggccggtggttgcccagggtcagcctgactcctgggatgcaggagggaagccataataacgaaggcctctggtttctggccagaggggatcatggttgtggcttcagtgacgttcccagaaaatggcctcatgatctctggggcaggagtgagggaggatgtgaagcagggaagctgccccctctgaaagccatgtgttcatctatgagagagagaggggaggaggctgtaggatgggagcaggggcatgcatggacaagggctgtggactagacccccaggctcttcccccaagcctctctcctgggtcaggctggtgcactaagggatgagaccctccagtggacattgctgcatctccaggtaccttcttgggtcattcctgatgggttggactgtggggtctttcaggatcctagcttcctgttcagtttctttctttctgtcatgtcttaagtctggtgtcccctcaatttaagggaatatgtccccgaggcctagaagaagagggtcccaccccatcagaactgtcaagcagagaagcaggtgtcaggccttcccatcccaggatgacaacattctgttttgctgaggtagtgacccagaacattctgtcctcagcatctgtgcacacacccagccaggtctagcttggtgcctggtgaccatcagtcagagatgtgcctagagctgcaagaatcaagaggcattcccacccacccttcaggacatttttttttttttttctgagatggagttttgctcttgctgcccaggctggagtgcaatggtgtgattttggctcaccgcaacctccgcctcccagtttcaagtgattctcctgcctcagcctcccaagtagctgggattacaggcatgtaatcctgtaatggcaccaccatgcccagctaattttgtatttttagtaaagacgaggtttctccacgttggttaggctggtctcgaactcccgatctcgggtgatccacccgcctcggcctcctaaagtgctgggattacaggcgtgagccactgcgcccggcccccttcaggacatttaaactagcgccctgtggctgccacaaaccagctggcttgagtcctagaccgccggtcttgggaagaggagtattcatcttagctgctactaaacaccacagtagtagttaaccgctatacagtgctttacagtgaagcactttacatgtagtaaacacttatttcccgcaacccgatgaggtaggtactgtctctatcaccacattacaaacgagaagatagaggaaaacacactcaagattacccagctcaaggaattgacagagtctggtttgagaacctgtacttttttttttttttctttttttgagacaggtctcactctgtcgcccaggctggagagcagtggcacaatcatggctcactacagcttcaggctgggcacagtggctcacaaatgtaattccagcactttgggaggctgaggagggagggttgcttgagccataagttcttgaacagcccaggcaatataatgagaccctgtctttacaaatatttttttttttttgagatggagtctcactctgtcgccccaggctggagtgcagtttcgtgatctcggctcactgcaacctctgcctctcgggttcaagcaattctcctgcctcagcctccccagtagctgggactacaggcgcgcaccaccacgtccagctaatttttgtatttttagtagagacagggtttcaacatattggccaggctggtctggaacacctgacctcgtgatccaccgaccttggcttcccaaagtgctgggactacaggcgtgagccaccgtgcccggcctacaaataattttaaaaaattaatctgggagtagtggtgcacgtctgtggtcccagttactcataaggctgaggcaggaggattgcttgagcccaggaggttgccttgagctgtgattgtgccaccacaccatgagacctttttctgtgagactgtctccaaaaaataaaaataaaaaaaaatcatcacacccttgacctcccaggctcaagtgatcctcccaccttagcctcctcagtagctgggaccacaggtgtgtgtcgccacaccgggctagaccctgtcctcttaatgactgcatagtccttgtaacctccatttgcattcctagagcatagcatttgttccaaaaatatttattgagtgtctgttctgggcttgaacacgagtaggaggatttaaaagtgaatagcatattgcgtctgcccttggggacagagacagaaacatgaaaacatgaaattgtccttcaacacaagaagtgctgtaatagaggcatgaataacgcggtgggaaacaaggagggaggtcatgctgcctgaagcaaatgtcaccgaagggcagacatcaagaaggcaggacattccaggcagagggaatagcatgtgtgcagggatgaaagctcacaagaaagagaaacatgagtcaggtgcggtggctgatgcctgtaatcccagcactttgggaggctgaggcgggcagattacgaggtcaggagttcgagaccagcctggccaacatggtgaaaccccgtctctactacaaaaatacaaaaattagccggatgtggtggtgtgcgcctgtaatcccagctactcaggaggctgaggaaggagaatcacttgaacccaggaggtggaggttgccgtgagctgagaccgcaccatttcactccagcctgggcaacagagagagactccgtctcaaaaaaaaaaaaaaagaaaagaaaaagaaaagataaaagagaaatatggagaacatggagcacctgagtgtcaaaacatcatgggcagtaactgtcagggagattgccagagagctcggggttggttggcgcatccatcctgcttcctgcttccttctctggcctccaagctccctgaacctactctgtgcaaagcactgtgccaggtgttggcccagagtatgggactgcagcagtggcctgggtagcggagaagggttttttgaccagctggagacctttgtggctggtgtcattctggaggtgaagagaaggccgctggaaagagctgcccagggaggactatgggagaacttgcagctctgggccatctctggacatgaacgttttgcatacacacaggggagctctgtgtgtctgagtgggggcgggaggggtccttctctctcttttggcccctgcagcttggcttctggagctttcctatgtcttgctttagtgctagcccttggagggttgccagggaaaccgctggccagctccgggagatagacgtagcagaggaaaggagagtgggtgactcagcctggcttcccacaaccgcaaccccctcctcagcacgtggaaaggatctgggggacccccttcccctggatcctacagatgaccctgtttattctttcttctctagagagagcagtccctcccgcagctctgactggtgggagccagccagattttcccaggaagggaaccggccccaggcgccccgtcccccgtaggttcaccctggaactcggacaggtgaattcggcctgggcgaatgtgaattcctgccgtgcccatgcaggcggcaggagccctggctgagacgccctcccgggggcaaacccaggataattattgatcggggcccctgtggacttctgacctcggcctcggcgggagaggacccggaacgcgggcctgggctcccagggagagaggtgggcgggccgcggagggggccaaccaaaacgaccacgacagtgcgccctagccctgctagtggtggtcgacccaacccaaacaaagcagcatgtgcttgcggtgcggcgtcggctagggagccgagccgggaagacaccccaccgccgcagaaagggggtgcgcgcggcgccggcaccggcaccgccgagcgcgccgccacctcgggtgtgccgagggggtccgggtccttcaagggcggtcgcggagggggcgcgagggacagcgggctagcgagcgcgcgccgggcggaaccaggaagcggggcgcgctccgggttgccagcggcgcgcgtccctgggcctccgcgcgtgagcggcgcgcgcgcccccgcgggccccggcgggaggagagtcggcggccggagccgtcaccccgggcggggacccagcgcaggcaactccgcgcggcggcccggccgagggagggagcgagcgggcgggcgggcaagccagacagctgggccggagcagccgcgggcgcccgaggggccgagcgaggtaggagctgcggggcgagccctgggcccggggccgggggagccaggccggggagccagcccgggcggggcccgcgctccagccgctcagccgcccgtcagggccgcgccgccgccatcactcccgggccgcggtggttgcgcgctgggcgaggggcgcgcgcggggagagggggtccgggttggctgccggggaggctgagggcaatgcggggtgcgcgagggggacttgcgaacgccgcggcgccgcggggggcgtgcgctttaaaggctgcgtgcgcgtgtgctgagtgggtgtgtggggaccccgcgccgaccccataggagctcagggggctgctgtcagccgcctcacaccttcacgttgcaattccgaatatccccagccgtcttccttgctttaacttctttctttcaaaagaggttcccgggactccggggatgggatgagcctgcgggggtgcctggtgcggtggggggtattagcaaagcttcaagaaacagggccttataaggaatcaagacaacaaatacgaacgtttcgataagactctggggggcgggatcccacatcaggacccgccaggcctgggctcgtgcgtgtggccgtgggatgcagtgtgctttttctttctagtcagggataaagggttaaaagtgctcctggtgtcggggggtagatatggagagtcggaaggggagttgtatcacaaaagctggtctgaggctaaaggaatctggcaagatggtcggggtgaacaaagaggaaagaactcacacggagcaagaggcggttgcaaacacttgtagccagcagtgatggaaaagccaaagaagaaaaccaagtgtcagcttttagaaagacgggattaatgaaaagcacaagaattttaaagactaaaagagataccgattctctctttgccaaagagccagagtcagttcttttcttcttggtccctgtgatcccgccatacctcgtatcaaataaatagtgccaaaagtgggtcaaagaatgttagagctggaaaggaacccagcgatgatgccattcttttattgtacaaatgaggaaactgaggcccagataggtggagtaagtggcctgctcaggtgacacggctgtttgttgagtatccagggattgaaacttcaaggactctgagattcgtgctcttcccaaagcatcgtgcagtatacagatctttgcctagatacaattccatacattttctctgcagtgtcctcagggaatgccctttgaaagggccagcgtgacactgaatatcatacttgggcttatgtcatttttttcagtcttcaagtggtgtttatggtctgcttggatcttaggtttccaaagctgttggatagccgcctgggccataataagctttcagctgttgggtctacattatttcaaataattttgttatctttcaattaaggtaatagaactgtgcctctctccccaacattctattgttgtccatttgcttatgttatattgcgttatgttcattgcctgtgagttcctaggtgaggatgtattttattgagtgtgcctttcatgttttaaaatttcattttgtaacactgtaaatattggagtggttctgatcacttcaaatggggagaatcttattgattgattttattttaaggctttgggttgttttgtttattcatttgggtaccagtttccatctcatggaagatcacagttgttagaatggacatggctaaataagagaaggggctgctgattttaagaaaaacttcctatgtgacaatttgtggtatctgttacgtttaattcaaacaagtccacaccttgggtcaggtaagcgcgttatctaggagatgacttgtttgctactgtagcctctggaagatgaaatttcaagctccagattgagacacagggaaggaatggagaggttttttttttttttttttttttttttgtaaagcaaaccatcagaaaaaaaaagttgatttctatcaccagtagtttggttattgcataacttgaagctaaactctgcacaaaataatctttgctatatacccaactaggtaaactatcccaccttctcatcagttctcaccttttcggtgcttgtattttttgcccacgggatattaatatggattgtgttcagaaatttaaggtgtgtacttcatagtatgtatgattgtaggagaaaaatgtgctatcatcgtttggagtgttacaacataaatattttggtcaacacttcctatcctgctctgacttttcatctcatctccattttcttcctctcttgattgtttttatgtcatttacatatgtaaaagccacatcaagactaaagttgccatttattactttttgatacttaagtcgagttttttcaaatcatagtattgttagtattcaaattgtctgtaatttttgttaggcttatatattatgaatccatttgttgtggtttatttggcttgttgttatgtaggtaggtgacacaggtagtcttattgtaaaaggaagacgttatagataggtaaataacatgctcaagattagatgcaggttacaggtggaatcgaaggaagcctaactattttcgtgccctacaaaaatgtctgtatctcataaagttattcacagatttctggacattctatctgtgacacattttttccctttctgttaagagtgcagattactgcattattcctacaaaaggaagcaaaataaccctagtttgtatgatttttctgataatttgaaacttattcgtttaaaaagctatctggcaattccaggttactggactcttgagaagaatatccttttattttgatactataaaatatcaaagtatcaaaatactttaactgtgcaacttaataaaaataatgcttcaaagttagctctgcactatcgctgtcctcaaatgtgtggtatttaaaggaagaaaatgtttttaattctgagctttgtgaatagaactcttctaaaatcagaagtttttttttttctcctgcagtgttggaaacacaacagttttatgcttatttctgggaataagaaagtcaaacttaacaatctagtttccattgatcagacagtttttgtacttaaatttaagttctaagcatcagagtgataaatactttttaaaattgtattcactgttaattatagtggccttatttgaagtaaaatcttgacattgggtgttttattaatgatgatcctctgctactgaaaagcctatgtcagtttggagaagattttgcacatctaaatctatgctgtttttactaatcaaaagagaagagcaatttacaggtgttagatttttagttggttgaatgagaccctcacttttgatggtttcagagttgaagtgacgttttattacttttgttagtttgggtcacacccatcacttccttggaaggtatctttgaggtttggtttcctttttttttaaatggtaatattggggtgggggtgcttcctgtttgtattttcaaaattaggtccacatgttaaccttcttgtagtgtcacatttttattttaaacttatacagacaaacatcagatgccatgtggtttgtctctgaccctttgcgctacttcatgacagctttactgagtgaagcctgaatacccaatcgggaaggcaagatgttcttgtcttttcccaactctcttcaaagtttaacagccttggaaggagtcttagaacagcaacaaaagcacaatttacagaaaaatggaggtgctgctatctgtttcctcgcaggtacttggaaaatgtatagcactaagatagagttgaaacatgttatgtagagccttgaatgtcggtgcttcaaagaggagttgctctgggtttacatgatacagaaccccatggtttatattaagtagtaatgatagccgtttttctggactcgcttaaaagccatacacagtgtcatggaaaagagttaagaacaaggtgaaattcagggtatggtattagagctcaggaggaatcaccttcagccttaaaactcttcctttactctcctggatcacttaagtgataggtcacttttaatataaatgttgcaggatgagttaagtggagccttgagaaatatgtgtagattgtttcagtgattaaagcaagtgttcttttcctggcctttaactcgctttatgctaagaagtgtaataactaaatagactcctaattgaattgacattcagatgtgtttgcagtttagggggagtttacctcttctaaattttcatttggatcccattactaaaagcagtattgcattagcatggtgcacaattatgtacaattcaatttgcaaatgaagttaatacttggagtatcttgacttcctattcccctgctgccccaatattcaagaaaggagaagttataatttgtcacatacaagatggtttcttctttaggtttattcttaataactatgtccattttcacatggatgacaccactgagatgatgaatacctgtattgattgattgatgaagaacatttatctttttctacctacttttggaagctagcttgcaaaatctactgcaacattcactcttcatgtatccttctattacctttggtaccctgaataaccttttaaaaatttttgtacttttctaatatgaagagaagtagcttcatattctatgctagttttctgaggtgcttgtgctgactcattttttaaattatactaagatatagagcatggtttgagagcagtaatgagattctcagaaaatatgaaaactttcctttctgactagttagagaaaggttggggaagacaaggggaaatacatcaatgagccaatcaattattgttatttgttgggattaatttggtgactaatatttttaatgcccatcaggctactaaatgtgaatttggctttaccctgtaatgataacaggacaaacccaacgggtttctaacattgcttgttttcccctggtaggggatttctttgcatatgggaaatcaggccgaagttgccagtaacagccacatccatgatttgtattaaaaataactattcatcattctgggctagagctctgcttaccatggctcacctgggaagatattctgattatgtatctaatcattatgatgccacctttcgagaggtgagcagacaattaacaagtccttcaaattatgttcaaaacccagagtttgagaaaatgttccaacgccttcaagtgtgaagataataaaaacattacctaatgcttaccgttcactgacagtgtgctgggcagacattgttttcagctctggccttgtgttaactcgtgattctcagaggagtgggtattattcccagatggaagatgaagaaatggccacagagaagttaagtaatttgtccaaggtcacattactgttcttggcggggctgattccagagactgcatccctaactagtgtacagcaaaagcgagctggccactgccactttgttataagacattttgtttctttgaggcttgtatttctttgtgttcccaaatggagtctcgttggtttttgaatagaaaatatttttatatgtttaggatttttttaaatgttgatgaagatggtgataaatatttttccaattaaagtatatacttctggtggaaattatattaaagaagagaaagtcttaatttttattataagttgtctttcattcttcttcccctagcattaccgtgtacatcatagaagaagagctataagctgtctccttggcctctgtttacaaacaaagggatcatttgtgccaatgtagtgggtttgtgttgacatgcacgtctgtactgagaactcaacaatcccactcattttatttacaactttattttgcggggatttctgtcctattcttgttgcattaaagctttttagagcattagtcatgatttctgagacagatttaagaattttacttatttgggctaatttattattattatttcttgagacagagcctcgctctgtcacccaggctggaatgcagtggcgcgatcttggctcactgcaacctccgtctcctgggttcaagagattctcctgcccagcctccggagtagctaggactacaggcatgtgccaccatgcccagctaatttttgtatttttagtagagacggggttttgacatgttggccaggctggtctcgaactcctgacctcaggtgatcctcctgccttggccttccgaagtgctgggattacaggcataagccaccatgcccagcctatttgggcgaatttttaaggcaactgaactattgtatgtctagagctctgcaaaggccattagaaaatagtctcagatttttttttttttttcatttatgatgcttactttctctcagcacttttccttgggagtggattgtgaagttaagtcttggaaacagaattcacaaccctaaagcgtagtgctttaactttgggagatcaagtcacagacaagaagaacttcaattccctgtgcagagtataaacttgttcaaataaacagaggatgttagcttccaggattgtcaactgtcacctttgaccagggttgaattttctttgaatgttgacagaagttacaatgtcagtggaaaaagcttaatgtgaggtatctataactcagaatttccttatgtttgtgtcagtgagatcctacaattaaagctgcttctttttttctatgtctgatgagttttaaaagccttcactggggttttccagcctttaggtgagagtaagttaaaaagtttgtgagaaactattttttgttgtctaaaattcagagcctaggtcgggcccagtggctcacgcctgtaatcctaacaatttgggaggccgaggcaagcggatcacgtgaggtcaggagttggagaccagcctggccaacatggtgaaaccctgtctctactaaaaatacaaaaattagccaggtgtggtggtgcacgcctgtaatcccagctactcaggaggctgaggcagaagaatcacttgaacccaggaggcagaggttacagtgagccgagatcgcactactgtgctccagcctgggagacggagcgagactccatctcaaaaaaataaataaattaaataaattcagagcctatagctggtggcaagtcactgtttttgaaggagtgggattttaaaaaatctaacctgggctaaatgttaagttacattcatacatgtcattgtagcctatataaaaagaaacttgaacacttgatctcttaaagtactaaaaattggaattcatcagctttgtaatatagcattcattctacagtatatttaaataggtaaaatgttctgttagaaataatgctaattctgtttttttgtttaatgtttctaaaaatcttttggtcatcttttaggtttaggaaaagtagcaaattagagatctacagaaatctacagctctttaaaaatgaaacagttcaccctgtgaatttgtttgcaggattggtgatctgtttctgatgccaggaaggtgggactcctatctcatttctgatagaaagtgagggaaagctatgtatagtgagaactggatactagattcttattccgaaggcatggaaggtttaatatgtaaggatacaatgtaaatagtccctctttttgtatttttctttggttattgttacgtaactatagtcgtttgtcacttaatgatacatggtgacaaagttctaagaaatgcattaggcgattttgtcattgtggtaccatcatagagggtacttacacaaacgtagatggtgagccctactgcacacctaggctgtatgataaagcctattgctcctagactacaaacctgtggaacatgtatactgtattgagtactgtagacaattgtaacacaagggtaagtatttgtgtatctaaacatatctaaatatagaaaagttacagtaaaaacatggcataaaggataaaaaatggtacatctatatagggtacttaacaggaatggagcttgcaggactggaagttgctctgggcaactcagtgggtgaatggtgagtgaatgtgaaggcctaggacattactgtacattactgtagattttaaaaatactgtctggttaggctacattaaatgtattttgaaaattgtttctttcttcaataataaccttagcctactgtaatacttttactttgtaaactttttactttttttttttttttttgagatggagtcttgctcttgtggcccaggctggagtgcagtggcgtgatctcggatcactgcaacctctacctcccggttcaagcaattctccttcctcagcctcccgaatagctgggattacaggcgtgtgccaccacgcctggctaatttttgtatttttagtagagacggggtttcaccatgttggccaggctggtctcaaacttctgacctcaggtgatccacccactttgacctcccaaagtgctcggattataggtgtgagccgccgtgcccggccaactgtttacttttttacacttttaaactcttttgtagtaacacttagcttaacacataaacatgtacagctgtgcaacaatattttctttatgtttttattcttttactttttctctttttaaataatttttaatttttcaaaactttaaaaactttttaatttttcaaaactttaaaaactttttcttaaaagtgaaggcataaacacacacattagtctaggcctacacagggtcagggtcatcagtatcactgtcttgcacctccacatcttgttccactgaaaggtcttcaggggcagtaacacatatggagctgtcatctcttgtgataacaatgcctcctgaaggacctgcctgaggctgttttacagttaacttttttttttaagtagaaggagtacactctaaaataacgataaaaagtatggtaaatacataaaccagtaacataggcatttattatcattatcaagtatgtactgcacgcaattgtatgtgctagactttcacatgactggcagtgcagtgggtttgtttacaccagcattgccacaaacatgtgagtcatgcattgcattacaacattatgatggctacagcgtcactagaggataggaatttttcagctacgttttattatcttatgggaccacagtgatatatgtggtctgtcattgactgaaacgtcattatgtggtgcctgactacatatatggaaactctgagtgtagtcatgttttacaaatgagtttatcttgcagtgagtttaaatatcaagtaaaaatactaatttcattgtaatgtatgaagagattggcctttctcctcatgttgaaggtatcaaaacaaaatagaaaatatttggcttcctgagtggcatggctacaattcacatgctgagttggtgatgaggcaagatcccttgactttgcaataccagaaaaatgcacatagttaaaaaaaaatagagacaggggtcttgctatgtctccaggtgatccctcccacctccacctccacacctcccacctcaaccttccacagtattgggattacaggaatgagtcactgcaccgggccaaaaagcatataattttaagggaatgatttttttttttttttttttattttttgagacagtgtcttgctctgttgcccaggatgagtgaagtgtgccaggagtgggtccttaagtaagaaaacgtattactttagacacacatttaaaattttgtccaaaaatgtgatattctcaaaatttatggttttgaattttatttattattttaatttattattattattttttaaagagtggggtctcactatgttgcccgggctggtctcaaagtcctgagctcaagtgatcctcccacctcagcctccagagtagatgggactgcaggtgtgagcccctgagcctggctagttttgaatttttattacccaaatgtgaagaggtctagtttgcacagaacttaacattacattccagttttattggtaaatttgaacaggatataagtggctttaataactaataaaagaagatacatcttatagatacacatatgtctttttatatgtatacataaatatttaaaacttctttatgccaaaaaatgccagaaaccaaagctaagtgacaaaataagaaaaatatttctaatatatatgacaaagcattatgggtaaatattcgtaatatataagtaatctatataagtagtaagaaaaagatgattcccataatagaaaatgaacaaaagaagaactacaaatagccgataatcatatgaaacagtgttcacccatactggaaatcaagaaatgcaaataaaaatgacaagttttttcagttaacagatttatgaagactaaaaatattgaaaaataagagcagtgttgcttgggaatgtgggaaactggcactttcatactcattggttgaaatgtaaatgggtgctttttttggatggcagtttgatacatgtattgagagcttaaaagagtgcatactcaagctgggcatgggagctcaggcctgtaatcccagcactttgggaagctaaggcagtcggatcacgaggtcaggagttcaagaccatcccggccaacatggtgaaaccccgtctctactaaaaatacaaaaattagctgggcatggtggcacgtgcctgtaatcccagctactcgggaggctgaggcagggagtcagaggttgctgtgagccgagatcacactactgcactccagcctggtgacagagcgagacttcgtctcaaaaaaaaaaaagaagagtacataccctttgacttagcagtttcatttagatgaatttcattctaggacatctgaaatatgtttaaagatttgtacaaataggcatgggcaaggacttcatgtctaaaacaccaaaagcgatggcaacaaaagacaaaattgacaaatgggatctaattagactaaagagcttctgcacagcaaaagaaactaccatcagagtgaacaggcaacctacaaaatgggagaaaattttcgcaacctactcatctgacaaagggctaatatccagaatctacaatgaactcaaacaaatttacaagaaaaaaacaaacaaccccatcaaaaagtgggcgaaggacatgaacagacacttctcaaaagaagacatttatgcagccaaaaaacacatgaaaaaatgctcaccatcactggccatcagagaaatgcaaatcaaaaccacaatgagataccatctcacaccagttagaatggcaatcattaaaaagtcaggaaacaacaggtgctggagaggatgtggagaaataggaacacttttacactgttgatgggactgtaaactagttcaaccattgtggaagtcagtgtggcgattcctcagggatctagaactagaaataccatttgacccagccatcccattactgggtatatacccaaaggactataaatcatgctgctataaagacacatgcacacgtatgtttattgcggcagtattcacaatagcaaagacttggaaccaacccagatgtccaacaacgatagactggattaagaaaatgtggcacatacacaccatggaatactatgcagccataaaaaatgatgagttcatgtcctttgtagggacatggatgaaattggaaatcatcattctcagtaaactatcgcaagaacaaaaaaccaaacaccacatattctcactcataggtgggaattgaataatgggaacacatggacacaggaaggggaacatcacactctggggactgttgtggggtggggggaggggggagggatagcattgggagatatacctaatgccagatgacgagttagtgggtgcagcacaccagcatggcacatgtatacgtatgtaactaacctgcacaatgtgcacatgtaccctaaaacttaaagtataataataaataaattaaaaaaaaaagatttgtacaaaaggagtgttacttaaaatagcaataaattggaaaaatcttggtatttccattagaggtttaataaactaaatcatttattacacctgtgtatagctgtccaatagaatactgtccagctatttaaattatgttataaaacaatatttaatgacctacacaaaattcactatatattactaaatgaaaaatgaaattacaaacaatcatatacaattgtgccggaaaaaagaacaggcgctgaaaaaagatttcttctgggtcgtggagttccctgtgtgtgtgtgtgtgtgtgtgtgtgtgtgtgtgtgtgtgcgcgctttctagtatctttccatttttctataataaacagattatggctgggcacagtgactcatgcctatatttccagcactttgggaggctgaggtgggaggatcacttgagtccaggagttcaagatcagcctgggcaacatagcaagaccctatctctacaaaaaattaaaaaattagctgggcctggtggcacatgcctgtggtctcaactacttgggaagatgaagtaggaggatcacttgagcctgggagttcgaggctgcaatgagctgtgattgagccactgcattcgtcctgggtgacagagtgagaccttgtctcaaaaacaacaaataaaaacaaacaaaaaaacagatgataatacagggaatccttttgtaatcaggaaaaaaaagttatctttaaaatggctgtgtgtattgatatgtcttagaacgtagaatttgttttttgttatcagtgttttctttttagaagcagaaaaaagagtttgtgatgtttttgttaattttttggtatagtatcctgttttttgacatcttttgttgaactatgttaaaatcatcataatttcatttaacatttttagagtttaaataatttgaacttcaggactgtgttatttcctgtgcttcgtggtagcctgtatatttttacacagaagcttatggagaattatattgttatataatataataaattgttagggagacagaggtgaaaggattgcttgaacctgggaagtggaggctgcagtgagctataatggtgccattgcactccccaagcccgggcaatggacagagacnnnnnnnnnnnnnnnnnnnnnnnnnnnnnnnnnnnnnnnnnnnnnnnnnnnnnnnnnnnnnnnnnnnnnnnnnnnnnnnnnnnnnnnnnnnnnnnnnnnnnnnnnnnnnnnnnnnnnnnnnnnnnnnnnnnnnnnnnnnnnnnnnnnnnnnnnnnnnnnnnnnnnnnnnnnnnnnnnnnnnnnnnnnnnnnnnnnnnnnnnnnnnnnnnnnnnnnnnnnnnnnnnnnnnnnnnnnnnnnnnnnnnnnnnnnnnnnnnnnnnnnnnnnnnnnnnnnnnnnnnnnnnnnnnnnnnnnnnnnnnnnnnnnnnnnnnnnnnnnnnnnnnnnnnnnnnnnnnnnnnnnnnnnnnnnnnnnnnnnnnnnnnnnnnnnnnnnnnnnnnnnnnnnnnnnnnnnnnnnnnnnnnnnnnnnnnnnnnnnnnnnnnnnnnnnnnnnnnnnnnnnnnnnnnnnnnnnnnnnnnnnnnnnnnnnnnnnnnnnnnnnnnnnnnnnnnnnnnnnnnnnnnnnnnnnnnnnnnnnnnnnnnnnnnnnnnnnnnnnnnnnnnnnnnnnnnnnnnnnnnnnnnnnnnnnnnnnnnnnnnnnnnnnnnnnnnnnnnnnnnnnnnnnnnnnnnnnnnnnnnnnnnnnnnnnnnnnnnnnnnnnnnnnnnnnnnnnnnnnnnnnnnnnnnnnnnnnnnnnnnnnnnnnnnnnnnnnnnnnnnnnnnnnnnnnnnnnnnnnnnnnnnnnnnnnnnnnnnnnnnnnnnnnnnnnnnnnnnnnnnnnnnnnnnnnnnnnnnnnnnnnnnnnnnnnnnnnnnnnnnnnnnnnnnnnnnnnnnnnnnnnnnnnnnnnnnnnnnnnnnnnnnnnnnnnnnnnnnnnnnnnnnnnnnnnnnnnnnnnnnnnnnnnnnnnnnnnnnnnnnnnnnnnnnnnnnnnnnnnnnnnnnnnnnnnnnnnnnnnnnnnnnnnnnnnnnnnnnnnnnnnnnnnnnnnnnnnnnnnnnnnnnnnnnnnnnnnnnnnnnnnnnnnnnnnnnnnnnnnnnnnnnnnnnnnnnnnnnnnnnnnnnnnnnnnnnnnnnnnnnnnnnnnnnnnnnnnnnnnnnnnnnnnnnnnnnatctctataaaaatacaaaaattagctagacgtggtggtgtgtgcctgtagtcccagctacttgggagcctgaggtgggaggatggcttgagcccaggaggcagaggttacagtgagctgagattgcaccactgcactccagcctgggtgacagagtgagaccctgtctcaaaaataaataaataaaaataaaaaataaaaaatctatcttaacttggattgtgcattgtaatttattatagtgaaattgctataacagaattttattttaagccagtttggggaataccaaaacatttttaaaaatcacgtagtactttttagtgcttttaaaacctaaatccataaagtagttaattaaaatgcatgaagtaaataagtgtttttctgtattaaagataaaactataaacatatattgttcaatatgcctacataaataaatcattctcttctttttggttattttttgcttatcacctcttacctcctctacttcctaaaaacatgataatctcgtttaattcaaaattatgttttctggccatacatggtggattatgcctgtaatcctaacactttgggaggctgaggtgggcggaccacttgagtcaggaggtcgagaccagcctggcccgcttggtgagaccctgtctctactaaaaatacaaaaattagccgggcgtggtggcacatgtctgtagtctcaggaggctgaggcaggagaatcatttgaacacaggtggcagatgttgcagtgagctgagattgcaccactgcacttcagcctcggcgacaaaatgagactctgtctcaagaaaaaaaaaaaaaaggtaagacatataaactaggaaactaagcaataattgtgtacagtatgtggaatatttatgttctagaccagcactgttcaatacaaatataatgtgagctccaattgtaattttcttagtctgtatcacaataaaaagtaaaaataaaattaattttaacaatatactttaatatataaaaattatcatttcaacatttgatcaatataaaaattattgattaatgaggtattttgggccagtttggggagccaaagcaggaggatcacttgagtccaggagttcgagaccagcctgggcaacatagtgagacccagtctctaacaacaacaacaacaaaattagctaggcatggtgatgtgcacctatagtcccagctacttgggaggccaaggtgggaggatcacttgagccgaggaggttaaggctgcagtgagtcgtgttcgtgctactgcattccagcctgggcaacagagtgagaccctgtctcaaaaaaaaacaaacgaacccaaaagcccacaaaaacactgagatattttacattcctttttttgtacgaatgcttcaaaatctggtgtgtatcttacagttataaaatctctcaatttagccaccaaattttcaccagaaatgcatgaactgtgttcagatttcataaaactttcagttgataaagtagattcacatactgaaggtgttccaaacgtactgaaaggttttccaagtattaaattgaacaccagtttccaggtttacatttaagttaattcaaatgagataaaatttgcaattcagttccccagtcgcactagctacatttcaagtgcttaggtagcacatgctgctagaggctaccataataaacagtgtggctataggccttctaacgaagggaaatgaaatatagggctgtctcctgctttataacatctggcttacaatcaacaaatacaaatagggtcgcttggtgcagcaaaccaccatggcacatgtttacctgtgtaacaaatctgcacatcctgcacatgtatcctggaacttaaaataaaacaaaacaaatagggtctcttgccctgtgggaactgaagccactgctctgtaggaaataaaagtgtctttcttttttgttttttttttgagacagaatctcgctattttgccgagtgaagtggcatgatcttggctcactgaagcctccccccgacaggttcaagcaattctcctgcctcagcctcccaagtagctgggattacaggcacctgccaccacgcccggctaatttttgtatttttagtagatacggggtttcgctgtgttggccaggctggtctcaaactcctgacctcaggtgatccacccaccttggccttccaaactgttaggattacaggcgtgagccaccgcgcccagcacaaaagtgtctcttacctaaagaaagtgatgcccttaaagcttcctaccattccctcacccccaagacacacccagacacccacagatgcaccctcttgtttgaaaactgctgcatccttgcatggctgaagcattacccatgtccttgaagctcctgctttcagaggacctctcatttcttgggagtagaaaagccctctctggccaggtgcagtggctcacgcctgtaatcccaacactttgggaggccaaggtgggaggatcgcttgagcccaagagtttcaagtcagcctgggcaacatagtgagatcccatctctgaaaacaaaattctgaataaaaataaacagcccaccctgtttcaggtatacctcaactgtcaaatcacttttaggcagggtgttttgttatttttgttttgtttcagagtgttgtttaactttatttttgaaactgaatttgtctagaaaagaatcatattcaccttttggtcttagctactcttcatttttataaaatacatcaagttgatgcttaaaattggggatctagttacagatgaaatttttcctttcaaaagagagttccccccagttttgctgtagtcttaggagatacttaagggaggggaatcatttttagttccccctaggtgaggtggtagcctccctaaactgccaagttcacaccatgactggtaacaccactgtgtgaggaatactgaacaaacggagcttcagaagggagacttgcagagattctggaatctaggtaatgccacttcctacttagtttatcttaatggttttgtttgtttgtttgttttgagacggagtctcgctctgtttcccaggctggagtgcaatggcgtgatctcagatcactgcaacctccgtctcccaggttcaagtgattctcgtgcctcagcctcccagatagctgggattacaggcaagttccaccatgcccagctaatttttgtatttttagtagagacagggtttcaccatgttcgtcaggctggtctcaaactcctgacctcaggtgatccttccgcttcagcctcccaaagtgctgggattacaggcataagctaccgtgcccagccttaatggtctttttaaaggatacctgatttcagaaggaacctttgaagaaatggctagaacttctgtgtttctttggatattgcctgacatctaagccaaattagttgaccttttaatgttaaataaaatattcaataacttttactaatgggtgggctttaggaacccctttattttactatgttgccaaaagtaggttcattataacattggaaacatcctgatgtaatttattgaatgtaaaattattcctcaatacatttgaggatgatttccataaagggaaacaaattcctttcttccaaatatactgtgacagcctattttgaaatatttaaaatatgtccctaaagatgaaaattaaagagcggacacaaagttgttatgctctaaggagtcattcttttgatttaaaattcattataattccctggttgtctagtggttaggattcagcactctcataaaattcattatattgattctataaaagtatattgtgttggattaagaaacacatggacatttttaagtgtttcaaaatatttttgttatacctaggttttcactgtggtggtatttgttgttttagtagaatttgacctatattttattctatgggaaaaagaagaaagtaaacattggctagctatctaccaccctgtactgctatttgtgtgtggtcccattgtgaatttttaactccatgctctatatttttagtgctttgtgaagattgaatctgcaaatcacctttgaaagacaaaggatttgatttgattgtggcaatcatgaaagttatcctgtaaataaaactgtatgtcctggaccaaagctggaataatgccacactgaaatgatcttaactgtggaatccttgattggacccgatttgttttgcacatacaatagctccataaagatgataggctttcagcagggatgaacagatgttctggttttatcagaaattgcttttgcatcaccaagacttcacaaaagccagtaatccccctgtttgatgttgtggaggtgcttttaaaacttcttcccagatactggtttgaacacacagactttgtcattgacctgtaagattcaattgtcaggtggtatctgttttctcccaacagaaataaagagaagaagaataaaaacaaaaactagaaagtgtagcaggggcacaattatttatttaaactttaaagtatttaatattacataccagaatctaagttacataaagcatgtctgttttgttcactgccacattcttagtacctagaacagagcccaacatgtaatagttactcaataagtatctgttaaataagtatagtagtcctgccttatcccaagggatgcctgaaacctcaggtaatactgaaccctacatatatatattgttttttcctatgcatatataattatgataaagttcaatttataaattaggcacagtaagagattaagaacaatgataataaaatagaacaagtatgtagtctttttttttttttttttttttttttttgagacagagtctcgctctgtcacccaggctggagtgcagtggcgcaatctccgttcactgcacgctctgcttcctgggttcatgccattctcctgcctcagcctccccagtagctgggactacaggcatctgccaccacacccggctaattttttgtattttgtttagtagagacggggtttcaccatgttagccaggatggtctcgatctcctaacctcgtgacctgctcgcctcagcctcccaaaatgctgggattacaggcgtgagccactgtgcctggccgaatgtagtctatcttaaaatactgtatcttactatgctgtactgtgggtaacagaaaccatagaaaacaaaatctcagataaggaaagactattgtattcccctttaatctcaatacagcaggtgtatccagagaacttcaaccctcagaaggactgaaagtgtgccttttactgtggaagaaagaaaagagagggggctgggtgcagtggctcatgcctataatcccagtactatgggaggctgagccaggagggtcacttgagcccatgagttagagaccagcctgggccacagagtgagacgctgtctcaaaaaaagttggggggatgggggagaagagagaggagacagcaaatatctctttgtttcctttggatttcagcattaaagatagaaaaaatgtgagtttattaggcaaaaactggttttttaaccccattttaaagattgtggagttacgtatatatatcataaaatttaccatttttaaccttttattttgagatggagtttctctgtgtcacccaggctggaggttagctcattgcaaccttcacctcctggattcaagcaattctcctgcctcagcctcctgagtagctgggattacaggtgcacgccaccatgcctggctaattttggtatttttagtagaggtggggtttcaccatgttaaccagggtggtctggaactcctgaccttaggtgaaccgccctcggcctcccaaagtgctgggattacaggcgcgagccgctgtgcccggccattttcactgttttaaagtacagttccgtggcattaagcacattcacattgttgtgtgaccgtcagcacctggtccatctccagaattttttcatcctaaactaaaatcctgtattcattaaacagtaatgagaataaaactctccatttgcccctccccgcaggctctgacaaccgccattcattctttctgtctctatgagtttgactactccaggcatcttatatcagtggaatcatacactatctgcccctttgtgtttattcctttttttgcaacataattcttttggttggagacttcacagtttttctttcctttgattgtttagtttttgctttgtacctagacctggccagtgatgcatgtgcaatgagtatgcaaagacaagttaattcagcagcttgttgcataccactagggagttattaaagctttcaaaatgtgattcctcatctgtatgcctgtggcttatctactccaagtcttgctgataaacctgcactgagagtaatagcaaagattagtctttctccatgtttcataaaacaaattgttctcattcttacagcctgattatgaactggaaaattacaggtacattgttgtaattgtttatacagacaatgagacatactctccacaggggacctcagctgcaggggaggttctgattgcgtgtcattaagaaacgacagttaagaaacttttttttttttagacggagtctcgctccattgccaggctggagtgcagtggcacgatctcggctccctgcaacctctgcctcctgggttcaagtggttctcctgcctcagcctcccaagtagctgggactacaggcgcatgccaccacacccagctaatttttgtattttttgtagagacagggtttcaccatgttggccaggatggtctcaatctcctgacctcgtgatccgcctgcctaggcctcccaaagtgttgggattacaggcatgagccaccgcaccgaccttctttttttttccatttttaaaaattttctattctcattacatcttcctttctccctacttttccttcccttcccttccagtttgtccttccctctctctctttcttccttttttctttctttttcattctcatttttctgagtagttgctgaagacacagcctgaccctaggggtccaaatatagatgaaacaatcatagctctctagcagttcacctggagggagagagaaaaagagagtaagagaaccaaaatgaaggggaaatattcttaatttttttttttttaaggacagaaactaacttgttgaggaaaaagagaaatatactgggagttctgactgataggaacaaagagaggacagcttcgaaggatgatttgaaaagtaatctatggaatttagctttaaagcaggatcttgggctgtagactactttattattattattttttaagagacagagtgcagtggtgcagtcatggctcactgtagcctcaaactcctgggctcaagccatcctcccacctcagccttctgagtagctaggattacaggtacataccagcacgcctggctaattttttaatttttattttgtagagatgaggtcttgctgtgttgcccaggctggtcttgaactcctggcctcaagtgatcctcctgcctcagcatcccaaagtgctgggatgttgtggactcctttagagcctcttgaaatagggctagtaaagtgattttctaccactgtatctgtgctcatttacattgggcagatcacttctgcttgacttcatagtttcaacctataacatgaggggtcaacaggtagattcggaaccatcagagtttaggccgaagcccatagaatatgaaagttatttttaaaatttatttttacaatgtctacaaatgcagttgttaaagtgccagagacagaagtattgacaatgagaaattatccaaaaccaggccaggcgcggtgactcacgcctgtaatcccagcactttgggaggcaaaggtggcaagatgacttgaggccaggagtcacaggctgcaatgagttgtgttcatgccactgctctccagtctgggccacagaacaagaccctgtctctaaaaataatcatcatcatccaaaaccaagactggctcctattggaaaggtggaaatggttgtgatggaattcagcaacaccaataccttggtatttctgactttcaggatgttaggagactctttcagtccttcctgtttaaatatgaatggatatgtattgccattattgccctgcccctacatctcccaaatttagattgctagtatttatgtaagtttactagtcacaaatagattcttgcatttcccatctcttgtcatagggccctctttgagttcaatatgcttttattggcacttactttggttttctttacagcagcagctgctaattagtgacagcttttgagcaagcagcttgtcatttttggcagagataggggacatccatagcaagtcaagactatattttcatttgctaaatttactttgctacatggaaatacatcttggataaaaaatagtctgtagtcaaaggtggctgtgtttactgaattatcttcctgagttggcattctgtcctgtagttgaagaactcacagagatgaaaaaaagaaagaaagaaagaaagaaagaaagaaaggttcaacgtctatcagactgatgccataagtcctgagtcatccttctaacattaatctacattctgggtatagaacctcatcatcttgttttggcacaatcataaatctttctggattgtagttagtggcatacatggtaactgaatgagtgaattgttgacaaatgtgcttttcgtttatactcagcttctttcttgagatataattaaaagaaaggttagtttgcttagagaagatcctttctttggaattttagctcatcttagcatcatcatatttcatgtaattcttctctttgaaattgctgcaataaagtgttagctctattttacaaacttgtcacgatgtttatgagggtggcacaacttgctattatgtttaccttgattagcaccaatgatgagtcaaaacctccgtcatggtttctataaagtgtgattcactcccattattcctgtaataaggattcagattaatgacctccacagtgttaaaaatatcctgaaggaaataactgacctaccatccatttcccccaatttaggtcctttttgtaacatggaggtctataaaaattgtattcaatacacaattactaaataccaaccatgtatatcaagtactatattggggaaatcaaaatgaatcagagagacatggtccttgctccaggatggcttacagtctattagttggccagcagataacttagttgccttggttcttatgtccagagtgtagggtaaattctaattctagaggaggaaaacatcccatcttttaaaaataagattatcaaaatgatcaaagacattggatacaaatattgtactgattctatttctacctaaaggtgttaaagattgtttgaggcacttttcctaggcttgtggaactgccaggcatccttgtcccaaatttccccttgatatatcgcacagcactgttaaattcagaagttgccttctgtatcagagtgtctatttcttgatggcatagcttggagaacccagatgatcttctagcattcaactcatacttaatgtacatcaacagtaacatagttatttgtatattttcttttctttttttctttttttttttttttgagacggagccttgctctgtcacccaggctggaatgcagtggcacgatctcggctcactgcaacctccacctcctgggttcgagccattctcctgcctcagcctccccagtagctgggattacaggcacgcatcaccacgcccagctaattttttgtatttttagtagagacggggtttcaccatgctggccagtctggtcttgagctcctgaccttgtgattcgcctaccttggcctcccaaagtgctgagattacaggtgtgagccaccgcacccaatctatttgtatattttcatttgaacatttattaattatagtaggaatttatcatgtataccttgtctccaacccaatgcacagtagcatcaggtaagttgctgtttagttataggtatcatgtgaacaggtatccagatggcagctaacttcagtatcctttgttatcctgtcttacacactggggtgttttacaagttgctttctcatttctattaatgacatttccccctgtatgtaaaatgttttctgccattagaaagcctaagtttcagatgttctgtgataaatattggtgatggataataatgtaactaatggaagccccttaaggaatttgcgaacaagtttaacaaagttaacaactcagcttcttataggaaatgttgcattgctaattctgaccacaagtggtcaggatctaggttttggccttatgggaaagttacccaagcccaggacagttctcgttattctcctcccactcacttttacaatctaaagcttttggctaatttctgattgatttaaaagaatgaaggtgaacccccaccccccaaatatggcatcctttggttgtgcttgaaggtttgtcttcttagtgctaaccctcagggaagggagtcttatttaaagcctttttttttggattgtcaaataatctttttgtattcatttgtgaattgcattttatgataattcattttgtggctcgtgttataaaggagttaaactgcaggtatcactgtcaggagaaactcatttgactagctgatgatttttttttttttttttttgagacagagtttccctctatcacccaggctggagtgcagtggcatgatctccactcactgcatcctccgcctcctaggttcaagtgattctcctgcctcagcctcccgagtagctgggactacaggtgcctgccaccacgcctggctaattttttgtatttttagtagagatggggtttcaccatgctagccaggatggtctcgatctcctgacctcatgatccgcccgccttggcctcctaaagtgctgggattacaggcatgagccaccgcgcccggcctcgtgatgattttcaataagtaaaccactgtggttcacagcctgagctccgaaggtggacaaaactccttgaatatttattactactactgttattataattctattactactgctgctagtactttatttttctcatttcccatgcttattcctttgctattatttaaggtttggtgatgaagtataggaagggcttggaaatgaagtcatttattttgtttccaacacaaaacagtttctagtgtgggtgtgtgggtggcttaatttaacataacaaactaatacgtttttccttgaactccatactatcttcatttcaaactaggtattctcagagtggggttaaaatactctccatcatcaaagcccagacattttagaacaagagcttgtctcacaaaaagcctggtgtctctgttgccaccacaacctgaaactaacgagttagaaaccacatagagccaacgacatggggtaggagctcgtaacattttctcgcaagttttgtgtagatagttaagccgggaaccgatctggttgagaaaaatgtttaaaatcatcattttcccttccttctccttcacttttatactcaaaagggtctaattttgctcctctgggaagattgaatgcgtaggctttcatgtagtttaacactctcttaatttaaagaagtctgggtttggtgcagtggctcacgcctgtcatcccagcactttggagggccgaggtgggtggagcgcttgagttcaagagttcgagaccagcctgggcaacataatgaagccccgtttctactaaaaatacaaaaaatgagccaggcatagtggcacacacctgtggtcccagctactcaggagactgagacaagaggattgctagagcctgggaggcagaggttgcagggagctgagatcacgccactgcactccagcatgggtgacagggtgagaccctgtctcaaaaaaaaaaattatattttctatcctcttcccctttttgttatgtgttttacagtcttttctccatgtctaatctaagaaacttatatattcattgtatatatatctactggttgtcagcattgaaccttgcctgtgccctagcatgttgcagaatgactgacttgactttattttgagaataagttcaaaatttattctttttttatcagttgactagggaccttatctgttgttgcatttattatctctaaaataccatcttctttttctttttattttttttgagatagagtctcactctgttgcccaggctggagtgcagtggtgcaatcttggctctctgctacctccacctcccaggttcaagcaattctcctgcctcagcctcccgagtagctgggattacagtcacgcgccaccacacccagctaattttgtatatttttggtagagacggggtttcaccatgctagccagactggtctcaaactcctgacctcaagtgatccactggccttggcctcccaaagtgctgggattacaggcctgagccacctcacccagcctaccatcttatttttagatggagacttctggacattggtataaaatctggatggttccagtcctgaccttttcttcatgtttaatctcaccttcctaacacttccaccacgttgaaaaagcgtagctccatatgatcttactgcccttcgttcagtcaagcgagacactgacattgtgtagattctgggtctcacatttgctttgtttttatctggagctttactggaaactaaatgctattgcgtactagctgcagaagcaggaggggaagttggcaagaattcgctgctttctgtttggtctgtctgaggcagctgaccttttggaaggaaatcgctgctcttcgcttcttccggtaacagtgccgcctgtgaaagaacacatacacagaagggctctgccgttatcctggctgatgccttgcagcataagctgttagttaagaggtgggagcctttcagtgcatctgttgtgtgctgtaggagcatgcactcaagttcctacaccatgctaagttgtgtgtagatctactattagaggtatagtgagagacggtctgttaccagaaaaagtaggttgctttagcaaaagtaattgcattttatttactcccactatgagtgctgtagtaaatgtggacaattattttgtgcacaattttagttcatcttaatgttaaatgtcctggtaattgctttttatacctggataaccgttgttgttttttttttttccccagcaggacaaacattttgatttgctaagacatgagctcttattaaatgtcatttcttctcagaattagaataagatttttttttttttttttttttttggacaagatcttacaatgtcacccaggctggagtgcagcgacacaatcacggctcacagcagcctcaaactcctgggcttaagcagttcttctgcctgtctcctgagtagctagaactacaggcatgcgccaccacactgggctaatttgtaaattttttgtagagatggagtctcactatgtcgcctaggcttgtttcaaactcctggcctaatcagtcttcccatctcggcctcccagagtgctgggtttacaggcatgagccactgtgcctggcccagaattatcttcttctttttctcatacattttttttttttttagagaatgagtctggctctgtcatccatctggcatgcagtggcgcaatcatagttcactgcagctactaactcctaggctcaagtgattctcccacctcatcctcccaagtaactaagactacaggtgtgcgccaccacacgctactactttttgttttgctttctttgtaaagacagagccttgatatgttgcccaagctggtcttgaactcctgagctcaggtgatcctcctgcctcagcctcccaaagtgctgagattacaggtgtgagccactacacctggccaagatttagcttcttaacaaacctgctactcgttggatccactttttctgcaggacttgttttacttaaacacaggtagtaggacaccccacaacttgggattatttttggaaagctgtagttgggtttcatatcacccagtaagcaaacaagggaactaaccagctgatgaagcgtttctctcttaaaagaggagatttcagttttgtattgttttaactaaaacatattcagttcagtttttattttgttatttgaaatgacatattcaagttatgtctaagtaaaaatgaaacattttaattcatggcaaattaagagaacacagctacctggaaaacggggcaaactgccatatccttctgtatttagttttggttcggtggataggtgtgcttttctaaggtattattggtctcttccctagatttgctgttgatggcagagatggttgggtgaaggtttgtgttgatgtacataaaagacatagagattagtacagagagaaacatctcagggcccccttagcaagattgccctgcagtgcttctgttcttggaaactggtctgatctgttccactttcctggggtaatgaagaatccagggggaatacaaaccctgcgttggttttaggtataggttcttggcacaaaataaattgatatcaacaaaacaggaagatttctccccggttctgttggcctttgagtaggagcgaagttaggaaccaacagctgaggtttcctgtgatctgctcttgtaatgatagctttctagacaccttgaattgttactcttgaactgtcaacggccttcacgtaagccagttgtgttcaggtatgtgattagaggtaagggatgtgtttgtttgtgtttagaaatggggtctcactttgtggctcaggcttgagcatagcggcgtgatcatagctcactgcagccttgacctcctgggagcgctcctgtctcagcctcctgagtagcttggactgcagaagtgagtcaccatgcccagctagaaagttttttattttaaagaaattctggtaccgttgtgagtgactttctgtgtatttcgttctatttacagttggtacaagtttgcttagtcacatcaaagatgaaagagggccactaatatatataaatatatgtcagaattacaaattaatctgctattaacagtcttaaatcactatttgaaaacacatttaaggcactatatatttgaaagtgaaagaattgcattttaaaaaaaatttttttataattctgaatttttactttataattctgaatgttctacttaaaattaaaatttttttataattctgaatttttactttataattctgaatgttctacttaaatcaaggctgcccaggtaagacagtgtcataacctggatattatcatgttaggaaatatttcttcctgtgttttatgtctctttaaacttggttcctgtgggatagtcagtagtaccaattccccattgattattaaatttatatcttaagttttacattttaaacacaatttaatcaaaaactttacaaaaattgtaccaaaaagccccttcacctaaatgtaacaactgtttacacttctctttgacctttctctatttgccctcttgcatacgtgttgcatacacttttcatttaacattcttttatttctactctaaaaaaatgtgtctacaggccaggtgtgatggctcacatctgtaatcccagcagtttgggaggccgaggtgggaggatcacaaggccaagagttggacaccaggctggccaacatggtgaaaccccatctctactaaaaatacaaaaattagggctgggcggggtggctcacgcctgtaattccagcactttgggaggccgaggtgggcagatcacccgaggtcaggagttcgaaaccagcctggccaacatggtgaaaacccgtctctattaaaaatacaaaaaattagccgggcatggtggtgggcacctgtaatcccagctactcgggaggctgaggcaggagaattgcttgaacctggggggcggaggttgcagtgagccaagatcgcgccattacactccagcctgggcaataagagcaaaactccgtctcaaaaaaataaaaataaaaaattagccaggcattggtggcagatgcctatggtcccagctgctcaggaggctgagacaagagaattgcatgaacgcgagaggtgggggttgcagtgagccaagatcatgccactgcactttaaccctgttgaaagagcaagactcagccaggcgcggtagctcacgcctgtaattccagcactttgggaggccaaggtgggcggatcacaaggtcatgaggtcgagaccatcttggccaacatggtgaaaccctgtctctactaaaactacaaaaattagctgggcatggtggcgcgtgcctgtagtcccagctattcgggaggctgaggcaggagaatcgcttgaacctgggaggcagaggttgcagtgagccgagatcgcgccactgcactccaacctgggtgacagagtgagactccatctcaaaaaaaaaaaaaaaaaaaaaattagccaggcattggtggcagatgcctatctatggtcccagctgctcaggaggctgagacaagagaattggttgaacacgagcggtgggggttgcagtgagccaagattgtgccactgcactttaacccggttgaaagagcaagactctgtctcaaaaaaataaataaataaaataaaaatttaaaaatgcgtctacatggtttttatatttcaacatagcttttatatttcatttaactggttgcaccatatcccattagattaatacattatagtctaatcatccccctattttggacattttggttatttctgtttgtcccgacggtatatatccctgggaattggcctgaatcaaggcacttgtcaaagaaaattttgctaggtagaaactaaacactgtaattctcaatggtaagagggaggccatgaactttaatagggaaaatattggtaacatgtgtggatttattaataaattgcctgttttgtttgtttttaactttcaaacaagaggaaagggattatatttcatttaagcagtatagaaacagggtattgtagtagctgaggagtttttttcctgaactaaaagatttgaattgtccaagagacagattctaagatgagttgatcttgaattacagtacaaatataaaccttcactagaaattctgaggctggctgggtgtggtggctcacacttgtcatcccagcactttgggaggccgaggtaagaggatcacttgagcccaggagttcatgaccagcctgggcaacatagcaagaccccatctctaaaaaaaaaaaaaaaaaaattagccgggcatggtggcacacacctgtggtcccagctactcagggggctaagggaggaggatcacctgaacccaggaggttgagactgcagtgagcagtgattacgccatagcacttcagcctgagtgacagagtgagaccctgtctcaaaaaaaaaaaaagaaaagaaaagaaagaaaaaaattctgaaggtaagataggactacatggcagcttcaaatcatttcttatttttccgtaatgcagatggtcattaattttgggctacagcaagtgcttttagtcatctggaaagtgatacagatgtagcttcttcccaaagggatcgcaaatccattatctccatggatttggacatggagataatgataacacatgtacactgtgggccaccatggcacaagagagcccaacttgcatgctggtggcctgcaagctgcagcacaacgcctaagaagtccagatttttattgaccaccagggacagtttcaaagtgagagtcaaacctctgctttcattgctttgtttttcttttttggaatgtttgcccttcattttgattttgaaaaaagtgtacatgacttaaaagtggaaagaatagaacaatgagtactcgcatatacttcacctaggttgagccagtgttcacagttgttagatttactttcccacactccccaccactgtcactcttccgtttctcctgccaaagtaagatgcagacgacatggccatttaccctcaaatacttgacagtgtatctactcccagcaagggcattcttctacgcaacctgaatgccattgtcactctcaagaaatttagcagtgataaagtaatatctaatatataatgatataatggcctttagagctgtgggtgtttttgtttgttttgagacagagtctcactcagttgcccagcctggagtgcaagtggcgcaatctcagctcaccacaacctctgcctcccgggttcaagagattcttgtgcctcagccttcagagtagctgcaactacaggcgtgtgccaccacgcccaactaatttttatattttttttttatttattttttttaagtataaacacatatattttttaaagtttatttttaacattttttttttttaattgatcattcttgggtgtttctcgcagagggggatttggcagggtcacaggacaatagtggagggaaggtcagcagataaacaagtgaacaaaggtctctggttttcctaggcagagggaccctgtggccttccgcagtgtttgtgtccctgggtacttgagattagggagtggtgatgactcttaaggagcatgctgccttcaagcatctgtttaacaaagcacatcttgcaccgcccttaatccattcaaccctgagtggatacagcacatgtttcagagagcacagggttgggggtacaatttttgtatttttagtagagacagggtttcaccatgttggccaggctggtctcgaatgcttgaccttgagtgatcctctgggcttggcctcccaaagtgctgggattacaggcatgagccaccacacccagtcgtgtttttgtttttgaattacgctcttggttgtgtctcttcagtctcctttaacctagaacagttccacctgttttgggtggggggtgggatcattgattagagtctcacaatttggatttgtctgattgtttcttcatgatttagtttgtgtattcttttcagcaaatcatatctggaggcacataatgtcagtttatgccatgattggggatgtttgatcactcggttaaggcattgtccgccagatttatccacagaaatgcaccttttcccctttgaataataagtaatatgtgagtagtactttgagactaaatgctgttccccaacaactgtcacctaatggttttagtagctgtgatgatccttgtctgagtctactctctttatttttgagattgtgcatctttggccaagactttatatcctatatttagatgagagttttaaatatatagtaacctgctgattgaaacctgatttttatatttagtaagtagatcctttctctaccttctcctttattccctcccttacccttttcccctcctccattctctgttcttcctattgtaatatgcagtgatttggctgtgacataaagattaatggcggattgtcttcccagaatactatcatctctatgttgcctgggcacatttttccttgtttgcttctttgtgagccaaatgcttttattctttctgttctcttcccatctgtttaataatgtgattttttaaaaagagaattggcttcctgattgcatatagggtagtatttagaaaaaaaaaattaaagagcagatggctctggtattaacctgcttctagatgtgatagccttcttacttgatattagtccaattttaatatgaatgaagtcttaatcctttattgctgctattgaatatttttccgtccctcaaaatcgctatactaggctaggcatggtggctcaggcctgtaatcccaacactttgggaggccgaggtgggtggatcacttgaggtcaggagttcaagaccagcctggccaacatggtaaaaccctgcctctactaaaaatccaaaaattagccagacacagtggcacatgcctgtaattccagctactcaggaggctaaggcaggagaatctcttgaacccgggaggcagaggttgcagtgagccaagatcatgccactgcactccagcctgggtgacagagcaagactctgtctcaaaaaaaaaaaaaaattgctgtactaggtgaccaccaccatttaatatatttaataatgttggtatcaacagaaagcagtaaacataattagggaatttgctcttttttttttttttttgagatggagttacactcttgttgatccatcagcacaactggagtgcaatggtgcgatctcagctcaccgcaacttctacctcccaggttcaagcgattctcctgcctcagcatcccaagtagctgggattacaggcatgcaccaccacgcctggctaattttttgtatttttagtagagacagggtttctgcatgttggtcaggctggtcttgaactcccaacctcaggtgatctgcccgcctctgcctcacaaagtatgggattacaagcatgagccaccacgcctggctggaacttgctctttatattctgtacagaatccttagtcattcactggagctgataggtttaacagttttgaaccctggctccttgccttgtacttttcagatcagaagcaatgtttaaacgtcatctctttgatctgtcacccagccctagcctttgccaaaatcagagcccctcagtattaggtttcttactttaatttttcattctttgctctctttaaattatgaaatataacaaacaggcagaaaagtacatagaaaatggcaaaccaccttaagtcctcaacatgcatgcagcctggtgcagtggtgcaagtaagtgcaggttctcaggtaggtccagcccagatagtaccccttagtagtatggaccgaccctggagcaagtgtttcacctctttctctttttaaaaatagctttactgagatataatcacgcactataaaattcaccctttgaagtatattctcagagttatacaattatcaccactatctaattccggaacattttcatcatcccctcaaaaagcccttaccttttagcaatcattccccatttctccctcccctcagcccttggcaaccaacaatctattttccgtctctatggatttgcctattccggatatttcataaaaatggaatttacagtatgttcccttgcatgcctttcactttacataatgatttcaaggtcatccacactgtagcatgcgtcagtacttcattcctttttaacatctgcataatattccattttattcattgtatttatccattcctatccatatttatctgtttatcctttggtggacatttgagttgtttccactttggggcgattatgaggtgattatgaataatgcagctgtgaacatttgtgtacctgttttttgttttgctttgtttttgagacagagtcttgctgtgcttgccctgtcatccaggctggagtgcagtggcacagatctcggctcactgcaacctccacctcccagattcaagcaattcccctgcctcagtctcccaaatagctgggattacaggcacccgccaccgtgcccggctcatttttttcttttttaatttttagtagagatggggtttcgccatgttggccaggctggtctcgagctcctgacctcaggtgatccacccgcctcagcgtcccaaagtgctgggattacaggcgtgagccactgcacctggcctgtgtacccactttctggggacacatgttttcacttctcttaggcatatacccaggagtggaactactggataatgtagtaactctatgtttacccttttgtagaattgccagatagttttccaaaactgtttcaccatgttacaattctacttaatcttgatgaccctcaatttcctcatccataacggggataataatagtgcctacgtctgagggatttaggataaagagtagattcataaaagcacttgttataagtaatatactaagtgcttagctagctcttaaatctggatgggggataataataacactgataaatgttatttatttcttatcctatttctgaagtttatttttatttattagatgaattgaaatatttgttgctaataattcataaagcagtataataaatgaaaacttcaaatttcattagttgttttttgtactttaattattaaaagtcagatatgtccttggaaggaataggtaaaggcatggctccctgctggcttagtcctctctgttcaacaacatattagaaggaatggaataggtagttttcttctcctttttttttttttttttttttgagacagagtcttgctctgtcgccagcttggagtgcagtggcatgatcttggctcactgcaacctctgcctcctgggttcaagcgattcttctgcctcagcctcctgagtagctgggactacaggagcatggcaccacgcccagctaatttttgtatttttagtagagatgggttttcaccattttggccaggatggtcttgatctcttgacctcatgatccacccacctcggcctcccagagtgctgggattacaggcatgagccaccgcacccggcctcttcttttttcttttttttttaagagtttagtatgcatagggcaaaatcaaagccttgctgttactgtaccaccctcacccttcacaattctccattctttcattcaaagatgagagaacagacttcatggtgcctttccaccaccacctcccaagagttcctgtctgcagaagtccttgtgccagtgaaattgattaagaaataggaatgccatcttttaaaagggcccagcacagcctgtaatcccagcactttgggaggccgaggtgggtggatcacaaggtcagaagttcaagaccagcctggccaagatggtaaaactccatctctactaaaaatacaaaattagccaggcgtggtggcgggcagctgtaatcccagctgcttaggaggctgaggcagataattgcttaaacccgggaggcggaggttgcagtgagcccaggtcacgccactgcactccagcctgggtgacagaacgagactctgccttaaaaaaaaaaaaaaaaaaaaaggccaggcacaatggcttgtgcctctaatcccagcactctgggggaggctgacttgggaggatcacttgaggtgaggagtttgagaccagcctgggcaacatagtaagaccttgtctctacaaaaaaaaaaaaaaaagtttttttctttaattagccaggtgtgatggcatgtgcccacagtcctagctacttgggtggctgaggtaggagtatccctcaagcccaggagtttgaggctgcagtgaaccatgatcacaccactgcactccagcctgagtgatggagtaagaccctgtctcggatggatggatggatggatggatggatggatggatggatggatggatggatagaaaagtttatactggaggatattggttaaggagaaggatagcaagagctatttgtggaggattgatttttggaaagtttattaaattgagttaaaattagagatgggagaaagaagccggttttgtaagtttaaggtaacagtaagaacagtagtgagtacttacagagcacctgctcttagctagatactgttttaggtatgtacataaaactaattcattcttacagcagccccctaaggggcataagtattattattcccattgtacaaataagaaaactgaggcacagagaggcttaacaggctgtctttggcagaaccgtatttaggtgagttcagcatcatctctaaaagtttaaccccagtttagagactttggccctgggatggggggtaggatggagaatcggaattacaaaatgctttaaattatacatatgaatccagcagaccaaatctgctggattcatattattcatattatgcataatattattcatattaaccccctactcccaccccacactagaattcattcactgagttggcagatacacagtgggccttctaatgtcagacactactctccactgcagtttagctagggcaagaccttggtcacagtgttctacaagtcttcagagagagagtaatgtttttctttgttatagtttatattttacttttagaaaggaaaagcatctgagaaaagatatttatgactgagacaaaattattccaaatcccactcacttatatcatttatttatgtggtggacattcatttttatggttttcagtaagcctgtaacattatgagctattagactttgaaacttttattaacaagtgcctgagggcccgactgatttatttggctctccaagcccatgggtatatccagatatataaggttgaggtaggtgctttatgccttcagaaagtacagggttctgcatccagggctgtcttaggttgttctgaaatgtctgtgaacacagagtgcaactcagccgagctcaaatagttctcatctttggcctaaaaataagattgtgaatccatttcccagtctttagagaatcccctgtgatgatttaccaaagaacaaactacttcccttgtctgagcatcacgcactgaaattggagctgcccgtaaataagcagaagatggcgggtactggggacagaggtacagtctttgtagatgcagagtagcgttcgatggctagatgaatgccagttagaaggatgaatgccggttagatgaatgctactcatatcaggcatgtggacatagcctgataatggggtgaagagttgtgacatgtatgaagaaaaatactacttaactgccaggcacgctggctcacgcctgtaatcccagcactttgggaggccgaggcgggcaggtcacctgaggtcagtagttcaagaccaacctggccaacatggtgaaaccccatctctactaaaaaaaattagccaggcgtggtggtgagtgcctgtagtcccaggtactcaggaggctgaggcaggagaatcgcttgaactcgggaggcagaggctgcagtgagccgagatcatgccactgcactccagcctaggcgacagagtgagactccgtctcaaaaaacaaacaaacaaaaaaccactacatagcttctaggtgttattcacgtaactgggagaacagttggttttttcctaaactgggtgtttagaatttataatgataatctcagtaagtcatctcatatttcacatatagataattttcagtttaacagtaaaataaaaatgactctgtactagttagtgtacttttattttacacttttgaatagcagtgagcagaatctactctccagctctatcaaagcacttatgtgtagtgaaactatattgtatttatcaaaataaggtgattgccacttggtatttaccagctattatccttcaaatgggatgctattttagaaaataattattatggcatgttcataactagaatcataaaaatattctacaaattctaagagctcagcattctactctttgatgaaaactaagaaataatctaaaatttaaggcaaaatagagtgacattttttaatacccctacatgcatagtatatcaccacagtatttctttcctaaaacagtaataggctcctaaatatgcttgaccagcagggaatgttaaatatttgtttgtgtatttattcgctccgcaagtattttttgaccactttccataggcaagccaccgtactagacactggggacacagtcgtgaataagatgtgctcctggccgagcgtggtggctcacgcctgtaatcccagcactttgggaggccgaggagggcagatcacgaggtcaggagaccaagaccatcctggccaacatggtgaaaccccatctctactaaaaatacaaaacttagctgggcgtggcggtgtgtgcctgtagtcccagctactcgggaggctgaggcaggagaattgcttgaacccgggaggcaaagcctgcagcgagctgagatatctgcactccagtctgggcgacagagcaagactccgtctcaaaaaaaaaaaaaattgtaattgattatttaaatggaaatctgttccattttcatgccttggtgtttcatactgatatattgttcaattataactttgaaaagagccaatagaatcggtcaaattgtgtgtatacatttatttatgcaacaaaaaaattatgatgcttatgtgccaggtaccgttctagacccaggagaaagcacggtgaacaaaacaaagtcattgtgttcatggtgatttcaccctggtgggaagtcagtaagcaaatatatgatcaatatcaggaattgataaatgataagaaaaataaagcagattaagaggatagagagtgaccagaatgccgttttatttgagtgggctgggaaggagtctctggggagataaaagttttcatagctttccttcttttgtctctgaagtcaattcacctaatgaatgcagatgcaagagaatttttgtatctgttggtatcactcacatattcattgagagctatggtgagggcctacttcttactctttactacttaggaatactaacacctagattcttctcttcattcttttatcactcttccatatacttaagtgcctaagcaccttcattcatccatcccttatataattttttttcttgagacaaaatctggctctcttgccaggctggagtgcagtgatgtaatctcggctcactgccacctctgccacccagattcaagcgattctcctgcctcagcctcccaagtagctggaattatagacgcatggcaccacacctggctaattgttttgtaattttagtagagacggggtttcgccatgttggccaggcttgtcccgaactcctgacctcaggtgatccacccacctcagcctcctgaagtgctgggattacaagcgtgagccaccatgcctggccatccattccttatccttcatccaaaaatcatgatttggtatctgttctggttttccaaaatcttgcgatatgatttatttgattaaaaaatacattgtgcagttaagtgacttccagtgtttgattataaagtggaattgcttctggagagagctcttttatctaagtgttttggtgaactcacaaccactgaaatttgatgtcttgggtcaaattgggtctacagtgatcccagccttaatgcctaaaagccctaaataatacacttctcaagtgttctatagcattgcactagtctaaaatagataactggcactcccctacacctcattgttggctaactgacttgtcccataaatagcccagtgttacgtgatcagacaactacaactaacagaagagatttttatttcctgacacacttgtacagtctctggtagtaaacaaaatccaagtccaagtcaccggcccctaactgtaacctagttcttagaagaattgtgcaaatcagtagccaaatcatgtgggatggaattcaagataaccctgccttataccaaactctacattatggaaaatagtgttagagcaagattcattttcagtccttagagttacctgaagtcccttcccagtctacccaaatgtttctgccctaatctggttaaactcaaagagcatctgccagatgagttaaaaattgtcaggtgagtctgaggggggcatcatggtagttttataaagcctttctttaaaaaatcaagagcatgttaaaaaaagaaactaccggctgggtgcagtggctcacacctgtaattccagcactttgggaggctgaggtgggcggatcacaaggtcaggatatcgagaccatcctggctaacacggtgaaaccccatctctgctaaaagtacaaaaaattatccgggcgtggtggcgggcgcctgtagtcccagccactcgggaggctgaggcaggagaatggcgtgaacccgggaggcggggctagcagtgagctgagatcgcgtcacggcactccagcctgggcaacagagcaagactccgtctcaaattaaaaaaaaaaaaaaagaaactacctgctattggagtataatggttcatatttccaactcttaggtggaatgtattgtttttgtgtctgaaagatttgtaaatgctataatttaacaacattgcttcataaattccttagcagtaactcaggaggtgaaccttcgggcatttttccagataaatctgtgctctttgtgtgcaaagcattgctgcttaggtaactagtgataatgcatagggttcaatcaacacttcagatattttcacttttcttttactgggctttttcaaaatggcatatgtttattatatttctgaagtcaaaataccaaatctaaaacaagtgattttttaaaaaaaatctctcagctgggcgcagtggctcacacctataaccccagccctttgggagctgagatggatcacttgaggtcaggagtttgagaccatcctggccaacatggtgaaaccccatctctactgaaaatacaaaaattagctgggtgcggtggcgggcacctgtaatctcagctacttgggaggctgaggcagtagaattgcttgaacccgggaggcagaggttgcagtgagccgagatcttgccactgccctccagtctgggcaacagagcaagactctgtctcaaaaaaaaaaaaaaaaaaactctctgctaattatttattactgttgaaatgctgcttaccatggctgacaattttgaacaaaagtaaagaatatgtctacgatgtcaaagttagcaattctttccctaattctccttttgtacttttgcttataagaccttagtacatttcatagtcagagcttcatagacccagctgtgtatctttccatggccaggctgagtgtctacattttgaaaacattttaaagttaaaattcagttcaagaatattgtctttagtctaccaaaagggctaaaaacatttactttggccaaacgtggtggctcacgcctgtaatcccagcactttaggaggctgaggtgggaggatcacttaaggtcaggagttcgagaccagcctggccaacacggtgaaaccccatctctactaaaaatacaaaaattaaccaagcatggtagtgtgcccctgtaatcccagctactcaggaggctgagacaggagaatcatttgaaccggggaggcggaggttgtagtgagccaagattgtgccactgcactccagcttgggtggcagagcgagactgtctcaaaaaaataaaaataaaaataaataataaaataaaaacatttaccttggtaactaagtgaatatttactctggtggatgtaaggggaaaataaagaaaaaacgcccaaagcactgattgtttgttcaacagattgtaaaccatggctgtgtggatacaagctcagcagctccaaggagaagcccttcatcagatgcaagcgttatatggccagcattttcccattgaggtgcggcattatttatcccagtggattgaaagccaagcatggtaggtgaacaaggatgtttgcatcatattttgtgaaacacaagaatattggagtttgtttagaaagatgtcatgatggcaactttcaaagttgtatttttaaacatttttaaatgtgatccataaaaaggtatttaaaattttttttctttttataggtgaaaggtatttaagcccatcttagattgaggggatggaataactcttgggatttttaaaacaggatttgttcccctttaatagtaaatactgtctaaaagcattagaatattactgctaagaaagagcagccaacaaatatgtttcgagtgcccatgggatgcctagcagtgtcctaagtagtagaatttatatgaaaaaaattaaagcccaacattgtgttgtaatcccaacactttgggaggccaaggcaggtgtactgcttgagcccaggagttcaaggaaggcctgagcaacatagcaaaaccctgtctctgtacaaaatacaaaaattagccaggtgtggtggtgtgcacctgtagtaccagctacttgggaggctgaggtgggaggatcacttgagcctgggaggcaaaggttgctgtaacccatgatcacaccactacactccagcctaagcaacagagtgagaccctgtctcaaaacaaacaaacaaacaaaattaaagccctcatctccagataattcagtgtttcactggacatggtggtgcacacctataatcccagctacccaggatgctgaggtgggaggattgcttgaccccagcagtttgaggccagcctaggcaacatagcaagatcctatgtcaaaaaataataataataatttagtgtttaatggggcagataggtgtgaatatgcatataatttaattataatttatttcttatagtttattaaatataaattattttacatttcttaataagtttacatctaacaaaaaactaaaaattaataatttaacagtggagacattggtgtttttaatttatatgtattttatatatacacataaagactaaaagaaaattgagtgggtgttgtggctcatgcctgtaatcccagcactttgggaggccaaggcaggcagatcactggaggccaggagttctgagacaagcctggccaacatggcaaaatcccatctctactgaaaatacaaaaaattagttgggcgtggtgacgggcgcctgtaatcccagctactctggaggctaaagcatgagaatcgcttgaagtcgggaggcagaggttgcagtgagccgagatcgcactactgcactccagcctgggcaacagagtgagactgcctttaaaaaaaaaaaacaaaactaaacgaaaatatacccaaatgttaacactaattacattctggtggtagatttgataagcattttaatttttctttattttccagattactgattacatacttgggggaggggagagttgttttaaatttcttttagaattagtacagtgcagtcgactaacagcacaggtttttaattggtatcattattacacaccaggcagcaggatgtacactgctctgctcaaggtctgggaggttgctggttggttacagtctgtcagtcgatctgacatattcatttgatacttcaagcctcaccgtcttagccatgggtcctctttgacagtccctgagagaaccagctttgatgctgctatttgcaaagggccatatacctgtctgtaatgttgccttagaataatcgcaatgcgtgttagtagcaaatttctgttcagaaactaaagatcaccaaagaaaggcaattttctaggcaattaaaaaaaaactcaacttcatgtaattaagtgagggaaaaaaattagctaaatatgagaatgtcagctgtacctcgtttagtgctttccactcccttttcattttctctcctgttttctgatgtggaggatttagaaaaacatgagtaggaagttgctgttaatttcagatttcacttagcagagttctcatttggtgttctcactgaatgaattaaaagacttgtgttgatattaaggaaaacttgaaattttttagctttggttttcttcagaatataaagattttaatgaagaattttcaattcttttttttttttgagatggagtctcgctctgtcaccaggctgcagtggcgtgatctcggctcactgcaatctccgcctcccgggttcaagcaattctcgtgcctcagcttcccgagtagctgggactgcaggtgcccgccaccacaccgagctaatttttgtatttttaatagagaccggggttcatcatgttggccaggctggtctctaactcctgaccttgtgatctgcccatttcggcctcccaaagtgctgggattaaaagcttgagccaccgggcccagccaaatctttagttctttatgtttaagccatctaagcaagtcttttttttttttaacagagaattaaggtttcaagtaaagaaccaatacctgacttctgtgagttttgctcagagactggatccttttaagagtgggctcctggccgggcacggtggctcacgcctgtaatcccagcactttgggaggctgaggtgggtggatcacttgagatcaggagtttgagaccagcctggccaacatggtaaaaccccgtctctattaaaaatacaaaaattagccaggcgtggtggtgcacgcctgtaattccagctacttgggaggctgaggcaggagaatcacttgaacccgggaggcagaggttgcagtgagctaagatcgtgctactgcatcccagcctgggtgacagagtgagacttcgtctcaaagaaaaagagtgggtttccagaccaagggcattgttgccagttgaaacagaggtgcagggctgccctcattccttccagcctttcatttaatacgtattctatttaatacatagggcacacatatttagaatctgacttgccttaactgccttctcaaggcgcagattggggtgtactatttgatggactatggtatcactgctttttttgttttgttttgttatgttttcgtagagagaatcttgctttgtcacccaggctggagtgcagtggcgcaatcttggctcactgcaacctccacctcctgggttcaagcagttctcctgcctcagcctcccaagtagctgggactacaggcacatgccgccacgcccggataatttcttttgtgttttagtagagatggggtttcaccgtgttgcccaggctgatctccaactcctgagctcaggtaatccgcctgcctcggcctcccaaaatgctaggatcacaggcgtgagccaccacgcccggccggtctcactgttttgatacacttgttggtgcctcttttttgaaattagttgctatcttcagggatttagggatggcagagccttttagctaccactatcttgtttggctccagacccagtcagcagttattgaatgttatttcagtccgacagctgtttggtttcttcagtgagtaagtaatttggtacttcccagtgtcaattgttgcctaagtagtagaaaggaaggaaggaacggaaggaaagaaggaaagaaggaaagaaaggagggagggagaccatccaacccccgtcaccagttcagtagcttgaaatcaatgcaaagtctgtagcgtggttttccttgtttactggaaaagttggcattgccttcaggtcctgggtctgcaactagtgacatgaatgtctgactcgtataaattcttgtaggcaccctctgcctgaatgtctcatttccagggcttcttagaaatagcaataacttgtttcacctgtctctacctaagaaacccacagataccaaactccttgaggctggaaaggacatgtagaagagtcttggccttgtgcctcctttacacccatgaggggtaactataaataggaaattatccaagtccttatttccttcagagtacacagaaccctttccttttccttgcatttctcggagcaaatagcataagcaccaagcacatcattgagagaaaggaagaagggcagcacattgttaaaaatttttttttttaaaagaaggaaatctactgtataatccaactatttagtaaattacaaatagattaacataggcattgagtccatttctgttgggctgtttcttaaaatttgcagtgaggattaaaaacatcactttagttgaagaaaaagtaggatgtgttgaggctgtatttatacaggctcacgtgcatgtatgtatacagattatgtaatttttttcccctagggactcagtagatcttgataatccacaggagaacattaaggccacccagctcctggagggcctggtgcaggagctgcagaagaaggcagagcaccaggtgggggaagatgggtttttactgaagatcaagctggggcactatgccacacagctccaggtgggtgtgggctctggggtcacacttaattaccttcccttgggggtcttcttcctgtagagactttctttctctccttcagtccagcattgttgagttacacgtgcataaggttcttgttgtgtggttttggtctttttttttttttttactttttatttgagaataatttcatacttccagaaagttacaagaatcatacaaagattccccacatatgcccatattcacctgttgttgacttttatgttgtcatatactcctcgctgtctctcgacacacacgtttttcagtcactggagagtaagttgcataccttgtgtccctgcaccagtaagtacctctgtgcattttctatttatttatttatttatttatttatttatttatttatttatttatttatttttgagacggagtcttgctctgtcgcccaggctggagtgcagtggagcaatctcagctcactgcaacctctgcctcccgggttcaagcgattcttctgcctcagcctctcaagtagctgggattacaggctcctgccaccatgcctggcagtttttttttttttttggtatttttagtggagacggggttttgccatgttggccacagtggtcttgaactcctgacctcaggtgatccgcccacctcagcctcccaaagtgttgaaattataggcatgagccactatgcccggtccctctgtgcattgtctttttttttttttttttttgagatggagtttcactcttgttgcccaggctggagtgcagtggcgcggtctcggctcaccgcaacctccacctcccgggttcaagtgattctcctgcctcagcctcccaagtagctgggactacaggtgcatgccaccacacccgcctaatttttgtatttttagtagagatggggtttctccatgttggtcaggctggtttcgaactcccgacctcaggtgattcaccctcctcggcctcccaaagtgctgggattacaggcatgagccaccgcacccagcccctctgtgcattttctaagaatgaaccttgtcttgcatggttataatacactgatcaacttcactaaatttagcattgatataatacttttaggtactcatctggatttccattttgtcaactaattcaaacatgtcctttagggtatttttccccgctgcagtccagaatccagcccaagatcacatattgcatctagtcatcatgtctctttaatctcctttaatctggaaccattttgcaaccttactttgtctttcattacattggcattttaaaataattaatgtaggctgggtgcagtggctcacaccagtaatcccagcactttgggaggctgaggcgggtgaatcatctgaggtcaggagttcgagaccagcctggccaacatggtgaaaccccatctctactaaaaatacagaaattaactgggtgtggcagtggacaactgtaatcccagctacttgggaggctgaggcaggagaatctcttaaacctgggaggcagaggttgcagtgagccgagaccgtgccattgcactccagcctgggtgacaagagtgaaattccatctcaaaaaataataataataattcatgtaccccctgctttttaaagataaaatgttcctcatttggggtttgtctgatgtttcctcatgattacgttaacattgcacatctccgagcagacttctaaatatagttggctgtccatgtccatgggttctgcatcctgattccaccaaccgcagctcagaaatattcaggaaaagaaaaaaagtaaaaacaaatagaaataaagatatgacagaacagctatttacatagcatttcttttgtattagatagtataagcaatctataggtggtttaaagtgtatgggaggattgtatgcattctatgcaaaacgatgccattttatataaggaacttgagcatctgcagattttggtatccaagtgggtcctggaaccagcccccacagatgccaagggacaattgtaggtgacttgtccttctcgggtatcacatccagaggggggcagtgtccctcgtcccctcattggtggtagtagttttgattgcccatttgagagtggcatccagtttctcctcttgcgaggcttttaaaacttatttattccgtttttaagaatgttccccggatactttaggcaaattaagatgcaaaaagtaaaacagcactttgggaggctaaggcaggtggatcacctgaggtcaggagttcgagaccagcctggccaacatggtggaaccccatctctactaaaaagacaaaaattagccaggcgtggtggcgggcccctgtaatcccagctactcggggggctaaggcaggagaattacttgaacccaggaggcagaggttgcagtggcccgaggttgtgccactgcactccagcctgggcaacagagtgagactcagtctcaaaaaaagaaaaaagaagtaaaacaatcttaccttttcactgcaattggatttccatgatgtgccttcttgttcctgttggtattggaggaacagtgcctcctgtgattcaggaggtccctcaggaggctccccatcctgaggcatggttagggcccatagtgtggagtggcacaaagtgatgtctgctgttggattctttcagaacacgtatgaccgctgccccatggagctggtccgctgcatccgccatatattgtacaatgaacagaggttggtccgagaagccaacaatgtgagtgtcccatagggatggggagggcagtcgggaagtcttttcttacccacctccctctggacccacctttgtcaaggtgactcagggtgcactattggtgtctctttaaagagagcttcatcctaaggggcacaaaagaaataggagacttgactgagtgcagcccagcactttgggaggctgaggcaggcagattgcctgagcccaggagttcgagagcaccctgggcaacatgatgaaaccccgtctctaccaaaaatacaaaaaaattagctgggcatggtggcatatgcctgtagtcctggctgttcgaaaacctgaagtgggaagatcccttgagcccaggaggtagaggctgcagtgagccatgatcgcacccctgcactcatgggtgatggagtgagaccctgtctcaaaaaaaaaaaaatgaaatagaagatgtggtctctgatcttaactgatttataaccttgatgagattgcaaccacaagacaatgtgaacaagtgcaaagtaattcaacctcagctgaataattttttagtaaaggcatgctcatattcaggtgagaatacttaggaaagacttttccctagcccctgaatcaggtgtggaaggagtggtctgatcaggtcacttacagggctgggtccacagagaccttgtttatgcctcccccatcacttcaccctggggtctccaggatgcctgcaagaggtttggcctcttccatggtggaagcaaatgattccatcacgagaatatcttgagtgaggacacagatgatgtgtgttcacatggccctgctccccatggcctccctaatgcttaatgccgtccttgcattgggtcagtgagtggaagaggaatcactccacctcctcattagtaggaaaacccaggtgacactggaccaggttacgttctagtttctccaaaggtaattcaatggacctcgtttggaatactctggtggaggtcagatctgaaatggaagcttctcccatgctttgtgatctgagccatgatctgtccgctcacctgtttctcacttttcccactccaccctgtgtctcatgatgacgtttgcttttcctcccgactcaaaatttaccttttggggtcttaccctggttgtaggagctggcttttcctggggattaaggcctcagtcttcctcccattcgcactgccttgcactgccccccatatgttcccagggtagctctccagctggaagccttgctgatgccatgtcccagaaacacctccagatcaaccagacgtttgaggagctgcgactggtcacgcaggacacagagaatgagttaaaaaagctgcagcagactcaggagtacttcatcatccagtaccaggagagcctgaggatccaaggtgaggcgcggtggaggcacattgtgcaacttgaggattgggcctggggactggaaagcagctctggtggggttgggagaaagcacactttccattcggaggcagcgacctttctctgagtagcagggacttatttgcattgaagacagtgctgagaggatgagatttaggaaggggagatgacaggaccccccgcttaagtgcatatctcactcaggtccccacatccagggagcttctgagctgccagggaagacatttcttcttttgagaaggagctcacagtctaaataaatactagcaaacaatacttttgtatatagtaggcatattataagtggagctttattgaaatgataaataggaaattatataattacatgtttaaaaatttttctggctgggcacggtggctcacacctgtaatcccagcactttgggaggctgaggcaggcggatcacctgaggtcaggagttcgagaccagcctggccaacatggtgaaaccccgtctctactaaaaatacaaaattagctgggcatcccagtggcgcatgcatgtaatcccagctacttgggaggctgaggcaagagaatctcttgaacccgggaggcggaggttgcagggagccgagatctcaccattgcactccagcctggacaaaaagagcaaaattctgtctcaaaaaaaaaaaaaaaaaattctaagctgggagtggttttgcacacctgtaatcctggtgctttgggaggccagggcaggaggatcacttgaggccagtagtttcagactagcttaggcaacatagtaagaccctatctctaagggggaaaagaaacctttctaagcaggtacgtgtaagtactaaggacctgtatatgatttctaatgttctatgcagttattcacagaggtcttcctgaaacagagtacacttaacgccccttaggtagcccttatggacagagcttccctagcctggtataaatcctgcttagtagttggggcacagagagcttcagtctgtggtgaggctgtggagccccaccagcgcccccttttgaccctgtagcagtttggcagtttgagctttaatagtttcctctctgcttccatgcccagctcagtctcagagaagccttggctcaaccacccagcccctccaaacacacacacacacagcacacacagacaacacagcacacacacacaccacacacatcacacacacagcacacacacacacagcacacacaccccccacagcacacagagacacacagtgcacacacacagcacacacacaccacacacagcacacacacagacacacagcacacacacaccacaccacacacaccacaccacacacagcacacacacaccacaccacacacagcacacacacaccacacatagcacacacacacaccacacatacacaccacacacacatagacacacagcacacacacacacacacagcacatgctcctctaattccatgtatgtaggttccattttatgtctatagtgatactacttatttactctttatcttctccactggaatataaatctttgagaagggactatatcttttatctctgtaccctgaggccagcacaatgcctgaaacataacagttattgagtaaaggttgacaggatgattctagcctgtcttccttttttatctgaatccatcctagactggccctagaagaagggcagctccttcagagaatggaaacggaagattttgggtggctattcctacccaagtccttagactgtcaacagtatttctgatcccgtgcctggcttttctgtttcctgtgcatggtggcggattaggtttggattcaggttgggtttggatctatcacgcagtgtcttctcagtcccatttgtcaagttcactcagcagaaacacagactattgatctgcttttgccagggaaggctcagctgcctccagtggagtagggaaattgcttcccgtctccctggcctccttcccaaaagcttctgcaaatttccaggagagccctaagtgggtcccttgcataggaaggctgggcccaggtgttgggatcaccaccaccctccctgtggctgggcaggattcctgaggtagccgtgcagataccttggatctgtccgtccctggatgatcctcttcctgctcgatacctgcagtgagattggagccatatttctgagttctagctctgggctgttcctggctacatagagttgcttttgtctgtcccagcttgtgcatcccatgggtcagggctggggtcagagtgacgtggccctcaggggccagccaggagctcgaccaagacatgctggtgcgcgcatcttctgactcagctcaagcaaggactctgggctgttgagaaggtgatgggaagggattaatagtcccagtgtggtggagacgggctgtcgctgggagggtggggtgggcctgcggtggtggttgtaactgtggacatgtttactttcttagcctgggttattgatacacaggtgctcctgtgttccacgttccctgtgtcttacctatttcataataatttttaaaaggtaatgaggcctaacttactccctgtcccgccatcaatgagactcctcacagatggtgtggagggaagccgcctcccttcggcctccctttcctgagagaatcttggtggctctgcatccccagtggccctggacatgctctccctctgcggtctgtctgtctgtccgtgttccctggttggttggctgggttcacagtgagctcacctggacaaacatgctgggccccttccagcctctcaagaatctcatcctcccctgaggagggattgctgtgctcagggactagacagagccgccggggctgggtttccctgaagaggccttgctgcgggagggatggggccgagcagctgcttgtctctgtcacctcttctctctgtcctgttccccgttaaccaagaagcacgaacctcacacagagctcacccatgtcaggcagctttctggcatcttccatgtcctcatgtatttaatcttaatgcaccccactgaggcaggtgccgagaatactcccgttttacacgtggggaagccaaggcacaggaaaggaaagcgatttgcccaggttcacctgcagtcaagggcatgggcacacttacaccccagacagcctggacccatgctgggccgcgagaagagggctggcagccctgtgaggcaggcgggcaggaggcaggcaggcctcctccccagctgccccagcacccgtgtgcccccagaggggacggctcagagtcaggaggctggtgagcagggcccagaggcgcctcctgaggcgccattcatcttggcccccctggctgtcaggaaccccgacttgctcttgatgcagtgtctgagcctgggagggtctcgctccagaacaggtgagtgggcttctctaggcctcctgttggacactaggaggtgatggtcatggtttcctcttctctcctctagctcagtttgcccagctggcccagctgagcccccaggagcgtctgagccgggagacggccctccagcagaagcaggtgtctctggaggcctggttgcagcgtgaggcacagacactgcagcagtaccgcgtggtgagtggggtcctgggcctctcctgggcgtgggtgccatgaagtcagtctctggggacccgagggagggctgggaccagcatgagagcagaacctgggagggcaggaggccttttttcctgggggccttgcgaggcagagcagcttggggagagggaacggcctgggccctgccctgccatttcccagcgaggccctgcggtgttctctgggagcccagaaggggctgctctcctcccttccctcaggagctggccgagaagcaccagaagaccctgcagctgctgcggaagcagcagaccatcatcctggatgacgagctgatccagtggaagcggcggcagcagctggccgggaacggcgggccccccgagggcagcctggacgtgctacagtcctggtaatggtgtggggcggccagcgggcagggcaggaggggctggtggggatcccggctgcttctgcgtcctgtgctggctcctgcagcaggccccctccatcctgggacagctcttgtttctccagggagcctggttcctcaatcagactttggtccccatcctgtgcacctcccccaggaagggggctgctgtcctgggggtgggatggggctcgggtgtgtggggtgatgcttgggctgtttgggcctagtcagggtcgcccctcctgtgtacgtctctaattctgggaggcagggagctctgctcttcccatgggtgggaagtgtggcgaaagcacagagccttcctgggggaacgggagctgtgtcttggggcctggcgtctgtgcggaggagccattgtcctcctgttggccttggggctctcgtgcaggtgtgagaagttggccgagatcatctggcagaaccggcagcagatccgcagggctgagcacctctgccagcagctgcccatccccggcccagtggaggagatgctggccgaggtcaacgccaccatcacggacattatctcagccctggtgaccaggtgactgctgcctgtttgccatgcccaggagcttggggcagctcctgcctgcgtggggggagccgcaggtgccttccagaccagcagatccacttcctgcctctcatccctcccaactccatctccagttgctgtggcccttgcccagtttctcctgtggacactgcaagagatgcccttgggctgcagcccatgccagcttctgtgttatctcactcccctctccatcctctccctggactctcacggcttccccaggaacagaggctgtgcccgagctcttcacctcctgagcccctcgggaggcagccccacccccaccacagagggactgagagccctttcccctgcaccagcccctcatcatgcatctgtccctgtgtcccctgcagcacgttcatcattgagaagcagcctcctcaggtcctgaagacccagaccaagtttgcagccactgtgcgcctgctggtgggcgggaagctgaacgtgcacatgaaccccccccaggtgaaggccaccatcatcagtgagcagcaggccaagtctctgctcaagaacgagaacacccgcaagtaattgtgcagcttcctctcattccctgctacttgtctcatgtcctggcaacaggaaaaaaagaattctgcctcctgtgtcagatccctgtttgcccttctggcctcttctgggcatcagcaaaggaatataaggaagttcttgggcctggtgtggtggctcacacctgtaatccaagcactttaagaggccgaggtgggcagatcacctgaggtcaggagttcaagaccagcctggccaacatggtgaaaccctgtctctactaaaaatacaaaaaattagccgggcgtggtggcaggcacctgtaatcccagccactagagagcctgaggcaggagaatcccttgaacctgggaggcagagattgcagtgagctgagattgcagtgagctgagatcacgccactgcactccagcctgggcaacaagagcaaaactccgtcacaaaaaaaaaaaaaaaagttctcttaggaactgttttctgtgaagatagtttgatcttgtttcattttgtagagatacgtccgagaagattacatgtatgtgttatgtagctaacatttcctctaaatgacgtacatttttagcaaacttctctatttcctgctaccccaaattatattatttactccgcatgtcctgagaccctggcatgggtttggagctggtctctctctgatttgcagtgattacagtggcgagatcttgaacaactgctgcgtcatggagtaccaccaagccacaggcacccttagtgcccacttcaggaatatggtgagggtggaagaagaggaagaatgaatttttccctggtctttgaggggaacaacttatatcttacgtttcatcttatgtttcttctttgtagtccctgaaacgaattaagaggtcagaccgtcgtggggcagagtcggtgacagaagaaaaatttacaatcctgtttgaatcccagttcagtgttggtggaaatgagctggtttttcaagtcaaggtaaagccttccctcagctctgcgtgtgcgtgtgcgtgtgtgtgtgtggtgtactttatgttacaaaatattttttttttatcacatagcatcttcttctttttgactgttggtaaactgaaaatggactgacctcaccctgagaactgtttcacttaggttctcttaagacatgaacagaggccaagcacagtggctcatgcttgtaatcccagcactttggtaggttgaggcagtcaggtcacttgaggtcaagagttcaagaccagcctggctaacacagtgaaaccccatctctactaaaaagtacaaaaattagccaggcgtggtggcacgtgcctataatcccagctactcaggagaatcacttgaacctgggaggctgaggttgtaatgaaccgagattgtgccactgcactccagcctgggtgaaagagtgagaccctgtctcaaaaaaaaaaaaaaaagacatgaacaagcaaggcccagtgcagtggctcacatctgtaatcctaacactttgggaggccaaggcaggaggattgcttgagttcaggagttccagaccagcctggagctggttgtgagaccccgtctcaacaacaacaacaaattaaaaaataaaaaataaaacatgaacaaacaataatgaactgaactagctggagaggtagactacaaaatggatatgagaaacattacttgggatgaatttgagtaaaggttgtggtaagttttaaatttgttatttgtattttcttcccagaaatatctccaatagtcttttctctctcctgttctccatgtaactttgagaaactttatccttcagaaatatctaagcaacattgcttgtaaaatatttaaaatttctaagattgtgccagtatgaaaagtcatattattcctggggccatttagattctgtgtctgagaggaacattaactgaaacttggaaaataaaagtgttgttataataagaaaaaaaaaaaagagagaaggagaagaacttgaggctcgtgggcgctcagccttctcttgtgtctttttagaccctgtccctgccagtggtggtgatcgttcatggcagccaggacaacaatgcgacggccactgttctctgggacaatgcttttgcagagcctgtgagtgtattcctcgggcatgtgggtcccaaaatcaatgccggtgtcatgaatctcatttatgtattatccttttaaaaagcataggaaaaggccgggtgcagtgactcacacttgtaatcccagcactttgggaggccgaggcggttggatcacctgaggtcaggagttcgagaccagcctggccaacatagcaaaatcctgtttctattaaaaaataccgaaaaattagctgggtgtggtggcacatgcctgtagtcccagctacttgggaggctgaggcacgacaatcacttgaacccgagcggcagaggttgcagtgagccgagatcgcaccactgcactccagcctgggtgacagagtgagactccatctcaataataaaaaaaaagcataggaaaaaagacgctgttttctttagtgggaggcagaatagaaagaatgtggaaagtggaaagaacatgggcttgacatcgggccagggtttgaactgagactccaccatttcctcactccatgaccacatgggcagttcactttacctctctgagcctgagtttccagcaagtgtctgcagcacagggatactcttgctctacagcattgttaggaagattaaattagataacatagaaaatgcttgccacacagtcagtactcagtaaatattattttgaatccttgggtgaaactatgaatgggatttgggactcctaggttcactccagaggttagatctctccagaggcttactttagcatagaagttgcttcataccctcttcctttcaataaatgaagatgctgttaaatgtcttttccaaattttagtttctgtgattcattctaggtctcatgaagaatgagatactttgcctcaaggaagatataatttggtggatttatgcacccaaacgctatctgaatcccactagcatgctgctcgatgagcattttaaagatctcataggctgggtgcggtggctcatgcctataatcccagcactccaggaggccaaggcaggcagatcccttgagctccagactagcctaggcagcatagcaaaatcctgtctctacaaaaaataccaaaaaattagccaggcatggtacaccagcctctagtcccagctacttggggggggctgaggcgggaggatcgcctgagcccaggaggtccaggctgcagtgagccaagattgtgccactgtactccagcctgggtgacaaagcgacaccctgtctcaaagaaaaaaatttttttagtaggcaaaggtcatttgttacatatttccaatagagattagtccataaaagcatgataaaagggttatcatttgggacataagagcatgtccttctctaagtatatccaacaaaccttgattatgttttgttttgtggctgttagaatataggatttgactgttagttcaacagctcatttacaaaacagcatggacagcatgggttaccttccagttgtgtgtaaagaaggtgaaatggaaccttctggctcacgtggagaggcttaacgtttcccaacactcctctttagagaaaaagtattttactgcaaaggtgagatttttaagagatttaccatacttcacttacaaactctgaatcagaagctcctttttgaaactgtctgtctgcctcttgtcctgataagcctcctagataagattgccacatctcttgtttccttccctgcctgtccacagatctcactctctgtgtacctttggcatctcctgcaccatgtaattactcaagtatcttgtctaaataaataagcatttttaacattctcagctatgttaatgactacttacatcttatgctatttttttttttttaatttttttgagacagagtcttgctctgtcacccaggctggagtacagtggcattatctcggctcactgcagcttctgccttctggattcaagcgattctcctgcctcagcctcccgagaagctgggattacaggtgcatgccaccacgcccaattaattttttatatttttagtagagaccaggtctcaccatgttggccaggctggtctcgaattcttgacctcaagtgatccacccacctcggcctcccaaagtgctgggattataggcatgagccactgcacccagccgaccttatgctatgttaaaaaaaagactttcagctgggcacggtggctcacacctgtaatcccagcactttgggaggccgaggcgggtggatcatttgaggtcaggaattcgagaccagcttggccaacatggtgagactctcatctctactaaaaatacaaaaattagctgggcgtggtggtgcgtgcctatgatcccagctactcgggaggctgaggcaggagaattgcttgaacctgggaggcagaggttgtagtgacctgagatggtgccactgcactccagcctgggcaacacagtgagactctgtctcaaaaaaataaaaaataaaaaataaataataaagacttgtggccaggcacagtggtttatgcctgcaatcccagcactttgggaggccaaggcaagcggatctcttgagcccaggaatttgaggccagccttgtcaacatagcaaaaccctgtctctacaaaaaacacacaaattagccaggcatggtggtgcacgcctgtagtcccagctgtttgggaggctgaggtaggataattacttgagctaaggaggcagaagttgcaatgagccaagattgggccactgtactccagcctggatgacagagcgagaccttacctaaaaaaaaaaataattgtggaaatttattctccatatatatttgcctatgtgtcctgtgggtcaaataacataagaacattgcagcattgttagtaatagctaaagatgaggctgtaacactgatgcccatctatgggggtctggtgaaatttctttatgtgctgatgggaggtctcccagatagaggattaagtgaaaagaggaagatgcagaacatgtggattttgtgctgtcatttgtgaagaaaaggaaaaggtatatgtcattgctggcatgcatagaatatctttggtgggatacacaagaaactgtgttaggtgcctttaaagaaaagaactgggttgctgggagacagggatagggagtgacttcactgtgtagccgtctgtgctttttgaattttaaatcatgtgaaaatcacctattgaaaaaagtgtttgtaacaaaataaaatggagtactatggctgaacgggttgaaaagcagtttattaaaagttaatcttctaacctatttctcaataaagccatccaactcaaaatttccactcttccataccaagttgttttactttgagctagaattcttggcagaaggagtcgagggcaatgattccacgtgtgtacacacatgccgacacgtgtgcacacatacgcacactctctctgtttgtacctagaggaccagtctttcagatttctaaattcccaaggtgtttacaatctaagagccagaccttggttatgttttggtttgtggccgttagaacataggatttgactgttagttcagcagctcatttacaaaacagcatggatagcatgggttaccttctagttgtgtgtaaagaaggtgaaacggaaccttctgaatttcacagaaccgtgtaccccagcagagtctgaatttatcctcaggccctgcaagacaaatgtgtgtaaccactcccagccatcagcgtttttcttttgtggcttgagggaataaatcatgcaactgttttctcatcagattctggcctctctccctctcagggcagggtgccatttgccgtgcctgacaaagtgctgtggccacagctgtgtgaggcgctcaacatgaaattcaaggccgaagtgcagagcaaccggggcctgaccaaggagaacctcgtgttcctggcgcagaaactgttcaacaacagcagcagccacctggaggactacagtggcctgtctgtgtcctggtcccagttcaacagggtgaggagcccagctgccagccgctgttagatcagtccttcccaaccagatgctctcaggagtctccctgccctgggcccttattcttcatgtctctaataaaatgtaccgaaagtaatagaagcttctgactagatggacaacttgagagttacccaggtcacgtgtagaaaattacatctttgcatattttaaataagttgacctttgtctacagttaatgcattttcttcctttgtaaaggaaatagagcaaagcagatgttaacatagctcatgagaagcaaagcttttgaggggatgcgaactctgggcctctctcccctttactctcttatgttccccatgtgtaatgccagatcaggctcctatgggaccctcaacccacaaagagggatgctgatgaaagaaactcctcctctagcatctgctaattcagacgtcactttgattttatttttattcattttttttttttgagacagagtttcgctcttgttgcccaggctggactgcaatggcacgatcttggctcaccgcaaccgccgcctcctggtttcaagcgattctcctgcctcagcctcccgagtagctgggattacaggcatgcggcaccacgccccgcaattttgtatttttagtggagacggggtttctccatgttggtcaggctggtctcgaactcccgacctcaggtgatctgcccgcctcggcctcccaaagtgctgggattacaggcgtgagtccactgtgcccaccctatttatttttgtttatttatttatttttgagatggtgtctcgctctgtcacaaggagtgcagtggtacattctgggctcactgcaacctccgtctcccagattcaagtgattctcctgtctcagcctcctgagtagccgggattacaggcacccgccaccatgtccagccaatttttgtatttttagtagagacggggtttcaccatgttggccaggatggtctcaaactcctgacctcaagtgatctgcctacctcagcctcccaaagtgctgggattacagacgtgagccaccatgcccggctatcaccttgatttgaatttaatttttgtttcttttcctacaccccccacccccaaggtgttttaaatgtttaatttggagcctaacaacgtgcatttctcagaagctcccaggtgacactgatgcttctggtcacagaccacacatcgaaactagcaagggacgggtcagcccagtcccaggtgaaagtgtctgtagcaggagcccactgggtgctggtaactgcagtttggtattttccccttcttccctcttttcctctccatggggccattaggtaaaactcaggtaggcggggatatttgtatgcctctgacaagggtagatgtttgtttcccatttaatttttccaattaaatatgtgtataatattccaagtgttactctggtgttcttatgttcactgttgtatctccaaccaggagaatttaccaggacggaattacactttctggcaatggtttgacggtgtgatggaagtgttaaaaaaacatctcaagcctcattggaatgatgggtgagaatcattatttcttaaggcgccgacagagtctgaaggtcttctctctggcatcgtaagtcacactctgcttctgtcctttgtccttggtgatccagggccattttggggtttgtaaacaagcaacaggcccatgacctactcattaacaagccagatgggaccttcctcctgagattcagtgactcagaaattggcggcatcaccattgcttggaagtttgattctcgtgagtgcccctcccttcttatgtccaaagttagctgctttcgttacaaaattattttaacaaataatttagtgggtacttactatttgttgaggtcagtactaattatgggaaacataaatgtatagccatgacatactcataataaggcagcctatgaaaaatactattatgggaaacacaattgctaatttggttatacatgaaagtatatggcagcatggttacacatgaacatttaaccatgacatggctacctatgatacaagagtccgtgcagaatctcagttgcttccctcttaaaatgtttgccttattgtactactctgcataaagcttatttcagtgaagaatttgatgatttggagttcttacagtagtaaaaatattcctttatcctaattaacatatggatattgccatcaaccatttctacccaagatgttagttcttttctttttttgaaacagggtctcactcttttgcccgggctggagtgcagcggcacaaacatggctcactgcagccttgacctcctggcctcaagcagtcctcctcccttagcctcccgattagctgggaccacagacgtgcaccaccacacccatctaatttttaaattttttgtatgttgcccaggctggtctcgaactcctgggctcaaacaatcccccactttggcttcccaaagtattgggattacgggcttgagccactgcaccagggcatcaggaaagttagttctctcctctgaccctcacaataagggtagcttgctggttcattttctgtgaattaaagtttttaataacttttggctgggtgcggtggctcatgcctgtaatcccagcactttgggagcctcaggcaggaggatctcttgaggccaggagttcaagcccagcttgggcaacatagtaagaccctgtctctaagtaaataaataaataaataagttaattaggtgggcatggtggtgctcatggtgtgcgcctgtagtcccagctactctggagggtgaggtgggatgatcacttgaccctgggagttcaaggttacagtgagtcatgatcacatcactgtactccagcctgggcaacagagtaagaccctgtctcttaaaagaaaaaaaaaaaaaggctgggtgcggtggctcacgcctgtaatcccagcactttgggaggccaaggcaggcggatcatgaggtcaggagatcgagaccatcctggccatcacagtgaaacccccgtctctactaaaaacacaaaaaaattagccgggtgtagttgtgggcacctgtagtcccagctacttgggaggctgaggcaggagaatggcgtgaacccgggaggcggagcttgcagtgagccgagatcgcgccactgcactccagcctgggcaacagagcaagactccatctcgaaaaaaaaaaaattcatcacttttaatagctcttatgctttctctggttgtgggcatgcttcctagcttttatatatctttgtatgggaaatcagggattgggggccagtaaaaactgtttcttctactgagggctagaatactgtttgaacttgaaacgtctgagatcattggatctcttgggaagtgatttttgtattacctgcttatctacccatggcttttatttttatttatttatttatttatttatttttgagatggggtctctgtcacccaggctggagtgcagtgtcatgatctcagctcactgcaacctccacctcccagcttcaagccattctcctacctcagcatagtacctgggactacggatgagtgccaccacacttggctgatttttgtatttttagtagagacagggttcatcatgttagccaggctggtcttgaactcctgacctcaggtgatccacctgcctaggcctccaaaagtgtgggattacaggcatgagccaacatgcctggcccctacccatggcttttaaaactatttcaggccgggcacggtggctcacgcctgtaatcccagcactttgggaggctgaggtgggtggatcatgaggtcaggagatcaagaccatcctggctgacatagggaaactccatctctactaaaaatacaaaattagccaggtgtggtggcgcgtgcctgtaatcccagctacttgggaggctgaggcaggagaatcgcttgaaccagggagttggaggttgcagtgagccaagatcgcaccactgcactccaacctggtaacagagtgagactccgtctcaaaataagtaagtaagtaagtaaataaataaaagtatttcatctataacccatggttatttttaaatggagatttctattggagccattataatggcaagcttgaatttatagtatgttggggttttaagatttcctaattcagaaatcatgtttagaatgtgattgttctgtttattgatctagaggaaagaatgttttggaatctgatgccttttaccaccagagacttctccattcggtccctagccgaccgcttgggagacttgaattaccttatctacgtgtttcctgatcggccaaaagatgaagtatactccaaatactacacaccagttccctgcgagtctgctactggtaacaatgttcgcattctgatttgattttgttgtgtgtgtgtgtgtgtgtgtgtgtgtgtgtgtgtgtgcatacctgcgtgtgttatctctcttgtgtgaaaacccacacaattaccattcagtgagagcagtttgagcattttccagggcagatgtaaaccttgggctggattcttcagtcatacagaaaacacatctaccactaaccccaaatatcaaattgaagaaaacaaattctttttaatacaagcttagatcaaacaaaattaggtaaaattttgtttttcatgacagagatggttttattgctttctgagtttagaagtattacatatttattataaaattttcagaagacacataaaggcataaaaaagaaaacaggctgggtacggtgggtcatgcctgtaatcccagaactttgggaggccaaggcaggcggatcatttgaggtcaggagttccagaccagcctggccaacatggtgaaaccctatctctacaaaaaatacaaaaattaggtgtggtggcaggcacttgtaatcgcaggtactcgggaggctgaggcatgagaatcacttgaacccaggaggtggagattgcagtgagctgagaccacgccaccacactccagcctgggcaatagggtgagactcagtctcaaaaaaaaaaaaaaaaggaaggtcgggcgtggtggctcacacctataatcccagcactttgggaggctgaggcaggcagatcacctgaggtcgggagttcaagaccagcctgaccaacgtggagaaaccccacctctactgaaaatacaaaattagcctggcatggtggcgcatgcctgtaatcccagctactcgggaaggctgaggcaggagaattgcttgaacccgagaggtggaagttgtggtgagctgaaatcgtgccattgcactccagcctgggcaacaagagtgaaactctgtctcaaaaacaaaagaaaagaaaacaaaaaaacagataccacacaacatctctcatctagagattaacctctatggatgatttagtgactattcttgcactctatatatagatatgtattatacattgcatcacccgttgcttgaacttcctgtgtggaggttatctagcagcagaacgaagaccataaacaaggaaacatattcaggccgggcgcggtggctcatgcctgtaatcccagacttttgggaggccgaggcaggcatatcacctgaggtcaggagtttgaaaccagcctggccaacatggtgaaaccccatctctactaaaaatacaaaaagtagtcaggtgtggtggtgggcgcctgtaattccagctacttgggagactgaggcaggagaatcgcttgaaccagggaggcaggagaattgcttgaaccagggaggcagaagttgcagtgagccgagactatgccactgcattccagtctggtgacagagcgagactccatctcaaaaacaaacaaaacacaaatatattaatttagtgatgggcgccctgaagacaaataaagcaaggtagagggatagagaagtggcagggaggagagtggaggtgttattttactagagtggtcaaggagggtttctctgaggacatgtttgttttttttgttgttgttttgtttgtttgtttgtttgagatggggtctcactttgttgcccaggctggagtacattgctcactgcagtctcaaactgctagactcaagggatcctcccacctcagcctcccacatagttgggactacaggcatgcaccaccaatcctggttaattattttatttttatagatatggggtcttgctgtgtttcccagactggtctcaaattcctgggctcaagcaatgttccttcctcagtcccccaaggttctgggattataggcatgagccactctacctagccaggatgtgatgtttgaaaagacctgaatgaagtgaggaagctagccatacaaagatctagagaaaaacattgtatgccaagagaacaagtacaaaaatcctgggttgagaatggccatgtctggaaagcctcaggagggccagggaggctggagcctcttgagcagggaagataagtggtaggaactgaggtcaggacactccagccttggagttcagggtgaaaggttggagtctagaccatatcatatgtaattttttgtgactttttttttttacttggaaatatatcctaggtagctgggcatggtggctcatgcctgtaatcccaacactttgggaggccaaggcaggtggatcacttgaggtcaggagtttgagaccagcctggccaacatggtgaaaccccatctctactaaaaaacatacaaaaattagccgggcatggtggcaggtacctgtaatcccacctactcaggaggctgaggcaagagaatcacttgaacccgggaggcggaggttgcagtgagccaagatcacaccactgcactccagcctgggcaacagagcgagactctgcctcaaaaaaaagaaatatatcctatgcagagttacagctcagtaaatgtaatcttccaacctcattttgatgactgcatacaatcccactgtatggtgagttacatgttggttatttaagatacttataatttgggcctgggcacagtggctcatgcctgtaattccagcacattagaaggcggaggaggaaggattgcttgagcctaggagtttgagaccagcctgggcaacatagtgagactccatctctacaaaaaagaaaaagttagctgcgcttggtggcgcatgcctgtagtcccagctactcagaaggcagaggctggaagattggttgagcccaggaatttgaggctgcaatgagctatgattgtgccattgcactgtagcctatgtgacagagtaagaccctgtctcagaaaaaaataaaatcctatttctggcagcatttctttgtttttaacttcttagccaatctataaaatactctgtacactgtaaagcacaaaaaacatgttatgaaaaggtcgctcctgacacttgaagccctagaagaagattagggtaataagcaattggtgaaccctgcagcgtttcaccctcttgggctacttaaatgacaagctccttgtcctataatcatagtgtgatcgtccttgcctagtataattaactttgtactgattcccatattcacgtacccagaaacaagacttcattctcccatgtcagataatcacattcttaccacctgcttacctggatttccatagtcagccttctgaaaaggtaactgtggttgaccagatcacgtgcaggtttatctgctcatctgccacatcccagtggggattctgtgggaagcaaaggacacatcgcattcttggcaccaacagcactcactgggactagtgacatcaaagtaccccaaatgcagaaacaccaggcgtgaaggagcgtgcaggtgctgggaaaagtagccttccctttcctgaaagactagacactcagagttagaggaacctcagacatcatcagatcagatcagcggctctccagtgcctaggcctttccattagatccctgacgtgtatgcacctcctgcttgaaaacctccggtgatggccaggcaccgtggctcacacctgtaatctcagcactttgggaggccaaggcgggtggatcacttgaggtcaggggttcgagaccagcctgaccaacatggagaaaccccatctctaccaaaaatataaaaagtagctgggcatggtggtgcgcacctgtaatcccagctactcgggaggctgaagcatgagaatcacttgaacccagaaggcagaggttgcagtgagctgagatcgcaccactgcactccagtgtgggcaacagagtaagactctgtcaaaaaagaaaaaaaagaaaacctccagtgacaaggaaatcagtccttcctaagataaatcatttcttttcctggcagttctacttagaacattcttccctgcatgactgaacatttgtcctcttatgacctgcccctcctggtcctgattttatcccctgggtcaggtagaacaaatcctgtctctctgctgcatcttggactttaagcttttcaaggtgtttttttttttttaattagtatgcaattagtgcttgacttagatttgtattgaagtacatagtttccatggtttgaagaatttattgaaacatccaagccaatttggaagatatcttgaatttcagttttagtgctgaccttctcctctaccaggtcttcctaacagattgaaatattaaatgcttggccaagtgcggtggcttatgcctgtaatcccagcaccttggggggccaaggtgggcagataacttgaggtcaggagttagaaaacagcctgggtgacatggtgaaaccccatctctactaaaaatacaaaaattagccaaagtgtggtggtgtacctgtaatccagctactcaggaggctgaggcatcggaatcatttgaacctgggaggcggaggctgcagtgagccgagattgcaccaccgtactccagcctggatgagagagtgagactgtttcaaaaaacaaaacaaaaaaatattaagtgcttgtgtcatatccttagataagttaggtggttgtgttctgtcctaagaaaagatgtgattcataaggaagatcacatttttgtttcacttgagaactttgatttactacattcttcccttggcagctaaagctgttgatggatacgtgaagccacagatcaagcaagtggtccctgagtaagtgtccaggtggctgtggctctccttctgcctctttcctcctcccccagaccctgcctcccatccttatcctggcccagctttccgctcccccggggaaactgtctcagccctggggaaggacctgggcttggtgatgctatgccagtacctgaggccccactcctgtagctggagccccagggccgagtggggcactttgtccttctacaccctgagaaagacaaagataccccttggtcccctccccaagtcagctgccctggcctccctggcagctgaagctctgttctcttccttctgcaggtttgtgaacgcatctgcagatgccgggggcggcagcgccacgtacatggaccaggccccctccccagctgtgtgtccccaggctcactataacatgtacccacagaagtaggtggcattcttgtgggggtccacaggggaggaactgggggcttggccccaggctggacccctggagggctggggtcaaaggaatccagagctcctctaggtctgagaccacacagccctggcccgggctctggcctttgggagggagagatttgaccagaagtgattggtggtttagagtcgggttgggcaaatgtcatctgttcccctctctcaatatggagatttttcttgctctaaggactgagtggagttgtgatgtgtctggacagccggtgtgagaggtaacaggggagggtatttcagtctgagttgctgtacagccagctgtttgaatggttgttcttttcccatgaagccccaggctgagggcataggctggctcagactgctcccctggtggcctgtggggcttggggtggtctctggcaggctttccccttcccttcatccctcttctttccctcccaagccctgactcagtccttgacaccgatggggacttcgatctggaggacacaatggacgtagcgcggcgtgtggaggagctcctgggccggccaatggacagtcagtggatcccgcacgcacaatcgtgaccccgcgacctctccatcttcagcttcttcatcttcaccagaggaatcactcttgtggatgttttaattccatgaatcgcttctcttttgaaacaatactcataatgtgaagtgttaatactagttgtgaccttagtgtttctgtgcatggtggcaccagcgaagggagtgcgagtatgtgtttgtgtgtgtgtgtgtgtgtgtgtgtgtgtgcgtgtttgcacgttatggtgtttctccctctcactgtctgagagtttagttgtagcagaggggccacagacagaagctgtggtggtttttactttgtgcaaaaaggcagtgagtttcgtgaagcctggaagttggccatgtgtcttaagagtggctggactttgacatgtggctgtttgaataagagaaggacaaagggaggagaaagcacatgtgctccagtgagtcttcgtcactctgtctgccaagcaattgatatataaccgtgattgtctctgcttttcttctgaaatgtagataactgctttttgacaaagagagccttccctctcccccacccctgtgttcttgggtaggaatgggaaaaggggcaacctacaaagattgttggggcaagggaagtcacaagctttcggatgggcggtggcttttcacaaaacatttagctcatcttattctctctttgtcctctctcccctcctgcccgcccgcaccctggaattgccactcagttcctctgggtgtgcacatatgtttggagaaatagaggagagaaaagagggccacgtaactgagagcttacagtgccaatgccgtttgtgttctggccagagtggagtgcgcagccctgactcccaggcgctgagattgttgcctggttacccaggaagctgctgttccggctgcccagcctttctctgagccagcggatgcacagtccgtggccttcttcaggcttattgatgatgctttttgcaaatgttgaatcatggttctgtttctaagttggatcttttttgttttctccttgccaccctaatttgacatcaaaattctctcttgtgcattgggccctgggtcattcaaacccaggtcacctcattccccttctctgttcacacctaatgtcttgaagagtaggtagcagcagtgtgggctgaacctaggccagcttgcttagcgggtcaccctgctgtgaagtcctggcaggtgttggtaatgtgtggaaatgcagtcagcaagtttgctggggagtttgataaaagtataaaacaaaacaaaaaaagcctcggtataattttgttccacgacttcttctgtagctttacaccagaaggaaggaatgggctacagcaggtagtggaggaagaggggggtgagcaggtgtattaaaatagcttacgggtaaggcctaaaaggtcacccctcggccccctctccaaaagaagggcatgggcacccccaggagaggatggccccaaaaaccttatttttatacatgagagtaaataaacatattttttttacaaaaataacttctgaatttatcagtgttttgccgttaaaaatattcctctatagtaaattatttattggaagatgacttttttaaagctgccgtttgccttggcttggtttcatacactgatttatttttctatgccaggcagtagagtctctctgcctctgaggagcaggctacccgcatcccactcagcccctccctacccctcaagatttgatgaaaattccaaccatgaggatgggtgcatcggggaagggtgagaaggagagcctgcctgctcagggatccaggctcgtagagtcactccctgcccgtctcccagagatgcttcaccagcacctgcctctgagacctcgctctctgttccagcaaccctggttggggggtcagacttgatacactttcaggttgggagtggacccaccccagggcctgctgaggacagagcagccaggccgtcctggctcactttgcagttggcactgggttggggaggaagagagctgatgagtgtggcttccctgagctggggtttccctgcttgtccagttgtgagctgtcctcggtgttaccgaggctgtgcctagagagtggagatttttgatgaaaggtgtgctcgctctctgcgttctatcttctctctcctccttgttcctgcaaaccacaagataaaggtagtggtgtgtctcgaccccatcagcctctcacccactcccagacacacacaagtcctcaaaagtttcagctccgtgtgtgagatgtgcaggttttttctagggggtagggggagactaaaatcgaatataacttaaaatgaaagtatactttttataatttttctttttaaaacttggtgaaattatttcagatacatattttagtgtcaaggcagattagttatttagccaccaaaaaaaagtattgtgtacaatttggggcctcaaatttgactctgcctcaaaaaaaagaaatatatcctatgcagagttacagtcacaaagttgtgtattttatgttacaataaagccttcctctgaagggatggtattgagtcctgtttttacttttttctgtcacatgccaagggagggcagcttgaacacggaaaagtttcaagtcatcagcgtgaccctgaaaaagggaactggttgggtggttgggagttggctgcctcagagggcacgtcattagctctgatggcagatggggcctttcataccttcctgctcatatgatgttttgaaaataagaatgatggtctcctagcctcctgactccagaaagcttgttagccaggatggtctcgatctcctgacctcatgatctgcccacctcagcctcccaaagtgctgggattacaggcgtgagccactacgcccggctgaaagcctgtccttaagattcagcacatttagagtacctgaccctgagttcagcgttgtgtgtgggatgagaaatggtgccttccctgcagaggctcacagttggagaaaggcagctaccacaactgattatgctaggatatcgcttcctgctgcaatcaaggcatcccaaagtcattatgcaaaagaacatgcaggaaggccactgagcaactcaagctttttttttattttatttttttattttaattgagtagctgggattacaggcgccaccactcccggctaatttttgcatttttagtagggacggggtttcaccatgttggccaggctggtctggacctcctgacctcaggtgatccacctgccttggcctcccaaaatgctgggattacaggcgtgaaccaccatgcccagcctggagctggctcttaaggaacaaatcagggccgggcacgnnnnnnnnnnnnnnnnnnnnatagggccgggcacggtggctcatgcctgtaatcccagcattttgggacgccaaggcaggtggatcacctgaggtcgggagttcgagaccagtctggccaacatgatgaaaccccgtctctactaaaaatacacaaaaattagctgggcgtggtggcacgcgcctgtaatcccagctacttgggaggctgaggcaggagaatcgcttgaacccggcaggcagagattgcagtgagccgagatcatgccattgcattccagcctggacaacagagcaagactctgtctcaaattaaaaaaaaacaaaaaacccagccattccacttgtaggtatctacataagaaccatgagaacatatatgtacagaaacacttgtgacaaatgttcataacagcattatgcataatagccaaagggcagaaacaacccaaatgtccatcaactgatgaataaacaaaatgtattatggtatatctgtacaatggaatatacggcaataaaaaggaatgaagtgctgacacacaggacatgatgttgtcacggatgaaccttgacaatatcatgctagatgaaagaagccaggccgggcacggtggctcatgactgggactccagcactttgggaggctgaggcgagggatcacttgagtgcagcagttcaagaccagcttggacaacacggtgaaaccccatctctacaaaaaaatacaaaaattagctggatgtggtggtgcacccctgtagtcccacctactcagggaggctgaggtgggaggatcacttgagctgtgatcatgctactgcactccagcctgggtgacagagcgaggaaaaagaaaagaagccaagtacaaaagaccgcatattatatgatgccatttataggaaatgtctaggataggcaaatctatggagacagaaagtaaatttgaggttgcctagaggctgggaaggagtttggaggtaatagtgaaaggatacagggtttgggggtttttttgttttgtttttttttttgtttgtttttcttgagacagagtctcgctctgtcacccagactggagtgcagtggcgccatctcggctcactacaaccactgcctcccagtttcaagcgattctcccacctcagcctcccaagtagctgggattataggcgccggccaccagaccctgctaatttttgtatttttagtagagacagtgttttgccatgttggccaggctggtcttgaactcctgacttcaggtgatccacctgccttggcctcccaaagtgctgggattataggtgtgagccaccacgcccagcctgagtttggggttttttattttattttattttattttattttattttattttattttattttattttatttaacgaattgggcagtctcctgaggcacagtaggctcagagagactctgcagggtttgtttttgaggtaaggaaaatgttattatctgtggtgttggttgcacatatctctggatatactagatcttgaattgtacactaaatgggtgatttgtatggtgtgtgaattatatctaataaagctgttactgggccaggtctagtggcttacacctgtaattccagcactttggaaggccaaggtaggaggatcgctgagaccgggagttccagaccagtctgggcaacatagtaagaccccctgtctctacaaaaaaaaaaaaaaaatgtttttaattagctgggtgtggtggcacatgcctgtagtcctagccactcagaggctggggtaggaggattgcttgatccccggagttcaaggttgcaatgagctgtgaccaggccactgaactccagcctggacaacagagcaagaccctgtctttaaataaataataaaagcaaatgcaagatctcagcgagaaaaaacgtgaaagtgaggtgagttagccagagtgagaacagacctgttgaaagaagctcagctgtgaagggaagagaggtgctcagcaagtagtagctctcttctcaaaggtatccagaggcaagtaaggggagaaagggagtggttttagtgttttgagagcctaggtcaagaacacaccagcctgggcaacatagggagctctctcgtctctacaaaaaataaaattagttgagcgtagtggtgcgtacctgtagttccagtcccttgggaggctgagacaggaggatctcttgagcccaggaggttgaggttgcagtgagctatgatcgcaccactgcactccagcctgggcaatagatcaagaccctgtctcaaaaacaaaaaacaaaaaaagagaagtttgtaattttccttgggataaaggcaacaggctaacacagatggtcacccagtaaccaggtaaagttaagataaactatatgtgactggctgggtgcagtggctcaggcctgtaatcccagcactttgggaggccgaggcaggtggatcacttgaggtcaggagtttgagaccagcctggccaacatggtgacatggtgaaaccccgtctctactaaaaatacaaaaaattagctgggtgtggtgatgcgtgcctgtaatcccagctactcgggaggctgaggcaggagaattgcttgaatctgggaggcggaggttgcagtgagctaagatcgtgccattgcactccagcctgggcaacaagaatagaactctgccaaaaaaacaaaaaaaaagaagtttgtaattttccttgggataaagccagcaagctaacacagatgttcacctaataaccatgtaaagttaagataaactatgtgactggctgggtgtggtggctcacacctgtaatcccagcactttgggaggccaaggagggtagatcacttgaggtcaagagtttgagaccagcctggccaacatggtgaaaccccatctctactgaaaatacaaaaattagctgggcgtggtggcacacacctgtaatcccagctgcttgggaggctggggcagcagaatcgcttgaacctgggaagtggaggttgcagtgagctgagattgtgccactgcactccagcctgggcaacagagcaagactgtgtctcaaaaaaaaaaaaaaaaaaaaaagataaactatatgtgacaagtcctcttacttgaggactcgttattgtttatcttgaaaacgtgtatgtaatgggttgtatgcgcttggctatacaaaaaagtaagatttcctcccttctttgcaagctcttagcagatcacctgtcatgtacatcacattgtggttgaatgcttattcaataataaaattgttttctttctcaactaccttgagggagaggatggggttttttttgttgttgtttttgttttgtttgtttttgagacggagtttcgctcattgcccaggctggagtacaatggcgcaatctcagctcactgcaacctccgcctcccaagttcaagtgattcttctgcctcagcctcccaagtagctgggattacaggcatgtgccaccacatctggctaattttgtatttttagtagagatggggtttcaccatgttggtcaggctggtgtcaaactcctgacctcagatgatccacccgcctcagcctcccaaagtgttgggaatacaggcgtgagccaccgcgcccagctgagttggggttttaagagttcttaagcttgcccctctcccagctcaagtggcttaatggcgttctttcccacacacacctttctgttccttcacctgcgcaagtttgaggaccatgctagtctggtcctaactgccccaactgccagcctgggctagcacccgacatgaagtcctgtaggcgacctgcccctttaagagcacccccctccttcagctcctccctcaggcctggtggccggatttcccagttggggcccagccttttaaagccatcgctccttctttctggccggatgtgtgctgagacccagagtcacccaggggtctccgtcacgtgccaggagtaggcagaagtgggctgtgacaggtgcatgtgggcatggaccccacagcctggggctcaggagggacaaggagctgggacagggtggatcccgagagaaagcaaagccactcgggagtgggcaagagatatcgttacgcagctgctgtgtgcccgaccgaccctgtccgaaacccttcctgtaccttcccttcctcttccttcttttctcccttttttttcttttctttttttttttgacagggtctcactctgttgcccaagctggggtgcagtggcacgatcttggctcactgtagccttgacatcctgggctcaagggatcctcccatctcagcctcccaagtagctgcgactatgggtgtgacaccacgctgggctagtttttcaattttttgtagagatggagtctccctatgttgctcaggccggttgcaaactcctgggctcaagtgattctcctgcctcagcctcccaaagtgctgggattacagatgatagccacctcacccggcccacccctaccttctgaaagaggcattcttattcttattcccattttgcagatcaggaaacagagctcagtgcagcccactaaattgctcagggccctacagctaacaagcggcagaggcaggatctgcactcaggtcagtgggactccaaagctttgatagtctctcctttgcatcacctgccccacagggtcctgccttcttcccaatttcatttttcctcggttttcctgtatgcagtagagcgtgggaggagaaatggataattgctgcatgcccccatatctcggttccttcctcttcccaggagctgcttggagatgctgctgtggccactgctgctgctgctgctgctgctgccaacattggccctgctcaggcagcagcggtcccaggatgccaggctgtcctggcttgctggcctccagcaccgagtggcatggggggccctggtctgggcagccacctggcagcggcggaggctggagcagagcacgctccatgtgcaccagagccagcagcaggccctgaggtggtgtctacagggagcccagcgcccccactgttccctcagaaggagcacaggtgtgtttcccagggtctggggaggtgacccaaagagaaagaaaccccacaggaccgtcagattccagagcctgatggcccccttacctcctccactgccaacggagtggcctgacccagagacccaggactggctttcttgtccaagatgaatttcccatgctgggtccttacatcctctctaccccaggcctattctcggttcctccctcaagggtctcaccagtcttgcctgaaactcttgggaaactggcttcctgaggcgtttctgttgtcattggggctatagacataagcaccttccggaatcatctccctctgaccaaggccagccagacccagcaggaagacagtggagagcagccactgcccccgacctcaaaccaggaccttggggaggcctctctgcaggtaatctaggatggccagagcccagtcctggccacagcccagtcccaccagagacctctgacttgcagccaaaccctccagtcatggtgggcaaagaacccccaaatgggggctctgggtctggctctgacaccagaccaacattctctctttcctcctccaggccaccttgctgggtctggcagccctaaacaaggcctacccagaagtgctggctcagggacgcactgcccgtgtgacgcttacatccccttggccccgacccctgccttggcctgggaataccctgggccaggtgggcacccctggaaccaaggaccctagggccctgctgctggacgcactgaggtccccagggctgagggcactggaggctgggacggctgtcgaacttctggatgttttcttgggcctggagactgatggtgaagagctagctggggcgatagctgccgggaaccctggagcgcctctccgtgaacgggcagctgagctccgggaggccctagagcaggggccacggggactggcccttcggctctggccaaagctgcaggtggtggtgactctggatgcaggaggccaggccgaggctgtggctgccctcggggccttgtggtgccaaggactagccttcttctctcctgcttatgctgcctcgggaggtcagtgggactcaagggcagtgaggtgggggcaacggtcagtggtcacatgacaagcagccatgcattgggccctacataatcatctcatttaatcctccccaacaagctgcatgctagggccagcagcctccttttacaagtgaagaaattcaggctctctaggttaagagtcttgtagctgggtgcagtggctcacgcctgtaatcccagcactttgggaggccaaggtggatggatcgttgaggtcaggagttccagaccagcctggccaacatggcgaaaccccatctctactaaaaatacaaaaactagcggagtatggtggtgcacgcctataatcccagctacctgggaggctgaggcgggaggattgcttaaaccttggaggcagaaattatagtgagctgagatcgcgccattgcactccagcctgggtgacagagcaagaccctgtctcaaaaaaaaaaaaaaaaaaaaaaggccggggcagtggctcacgggtgtaatcccagcactttgggagaggctgaggtgggtggatcacctgaagttaggagtttaagaccagcctggccaatgtggtgaaaccctgtctctactaaaaatacaaaaattagccaggtgtggtggcaggcgcctgtaatctcagctactcaggaggctcaggcaggagaatcacttgaacccaggaatcactgaatcactgagccgagatcgcaccactgcactc

SEQ ID NO: 161 - DNA, 2782 bp, Homo sapiens
ggagccgtcaccccgggcggggacccagcgcaggcaactccgcgcggcgcccggccgagggagggagcgagcgggcgggcgggcaagccagacagctgggccggagcagccgccggcgcccgaggggccgagcgagattgtaaaccatggctgtgtggatacaagctcagcagctccaaggagaagcccttcatcagatgcaagcgttatatggccagcattttcccattgaggtgcggcattatttatcccagtggattgaaagccaagcatgggactcagtagatcttgataatccacaggagaacattaaggccacccagctcctggagggcctggtgcaggagctgcagaagaaggcagagcaccaggtgggggaagatgggtttttactgaagatcaagctggggcactatgccacacagctccagaacacgtatgaccgctgccccatggagctggtccgctgcatccgccatatattgtacaatgaacagaggttggtccgagaagccaacaatggtagctctccagctggaagccttgctgatgccatgtcccagaaacacctccagatcaaccagacgtttgaggagctgcgactggtcacgcaggacacagagaatgagttaaaaaagctgcagcagactcaggagtacttcatcatccagtaccaggagagcctgaggatccaagctcagtttggcccgctggcccagctgagcccccaggagcgtctgagccgggagacggccctccagcagaagcaggtgtctctggaggcctggttgcagcgtgaggcacagacactgcagcagtaccgcgtggagctgcccgagaagcaccagaagaccctgcagctgctgcggaagcagcagaccatcatcctggatgacgagctgatccagtggaagcggcggcagcagctggccgggaacggcgggccccccgagggcagcctggacgtgctacagtcctggtgtgagaagttggcggagatcatctggcagaaccggcagcagatccgcagggctgagcacctctgccagcagctgcccatccccggcccagtggaggagatgctggccgaggtcaacgccaccatcacggacattatctcagccctggtgaccagcacgttcatcattgagaagcagcctcctcaggtcctgaagacccagaccaagtttgcagccactgtgcgcctgctggtgggcgggaagctgaacgtgcacatgaaccccccccaggtgaaggccaccatcatcagtgagcagcaggccaagtctctgctcaagaacgagaacacccgcaatgattacagtggcgagatcttgaacaactgctgcgtcatggagtaccaccaagccacaggcacccttagtgcccacttcaggaatatgtccctgaaacgaattaagaggtcagaccgtcgtggggcagagtcggtgacagaagaaaaatttacaatcctgtttgaatcccagttcagtgttggtggaaatgagctggtttttcaagtcaagaccctgtccctgccagtggtggtgatcgttcatggcagccaggacaacaatgcgacggccactgttctctgggacaatgcttttgcagagcctggcagggtgccatttgccgtgcctgacaaagtgctgtggccacagctgtgtgaggcgctcaacatgaaattcaaggccgaagtgcagagcaaccggggcctgaccaaggagaacctcgtgttcctggcgcagaaactgttcaacaacagcagcagccacctggaggactacagtggcctgtctgtgtcctggtcccagttcaacagggagaatttaccaggacggaattacactttctggcaatggtttgacggtgtgatggaagtgttaaaaaaacatctcaagcctcattggaatgatggggccattttggggtttgtaaacaagcaacaggcccatgacctactgattaacaagccagatgggaccttcctcctgagattcagtgactcagaaattggcggcatcaccattgcttggaagtttgattctcaggaaagaatgttttggaatctgatgccttttaccaccagagacttctccatcaggtccctagccgaccgcttgggagacttgaattaccttatctacgtgtttcctgatcggccaaaagatgaagtatactccaaatactacacaccagttccctgcgagtctgctactgctaaagctgttgatggatacgtgaagccacagatcaagcaagtggtccctgagtttgtgaacgcatctgcagatgccgggggcggcagcgccacgtacatggaccaggccccctccccagctgtgtgtccccaggctcactataacatgtacccacagaaccctgactcagtccttgacaccgatggggacttcgatctggaggacacaatggacgtagcgcggcgtgtggaggagctcctgggccggccaatggacagtcagtggatcccgcacgcacaatcgtgaccccgcgacctctccatcttcagcttcttcatcttcaccagaggaatcactcttgtggatgttttaattccatgaatcgcttctcttttgaaacaatactcataatgtgaagtgttaatactagttgtgaccttagtgtttctgtgcatggtggcaccagcgaagggagtgcgagtatgtgtttgtgtgtgtgtgtgtgtgtgtgtgtgtgtgcgttggtgcacgttatggtgtttctccctctcactgtctgagagtttagttgtagcaga

SEQ ID NO: 162 - DNA, 2364 bp, Homo sapiens
atggctgtgtggatacaagctcagcagctccaaggagaagcccttcatcagatgcaagcgttatatggccagcattttcccattgaggtgcggcattatttatcccagtggattgaaagccaagcatgggactcagtagatcttgataatccacaggagaacattaaggccacccagctcctggagggcctggtgcaggagctgcagaagaaggcagagcaccaggtgggggaagatgggtttttactgaagatcaagctggggcactatgccacacagctccagaacacgtatgaccgctgccccatggagctggtccgctgcatccgccatatattgtacaatgaacagaggttggtccgagaagccaacaatggtagctctccagctggaagccttgctgatgccatgtcccagaaacacctccagatcaaccagacgtttgaggagctgcgactggtcacgcaggacacagagaatgagttaaaaaagctgcagcagactcaggagtacttcatcatccagtaccaggagagcctgaggatccaagctcagtttggcccgctggcccagctgagcccccaggagcgtctgagccgggagacggccctccagcagaagcaggtgtctctggaggcctggttgcagcgtgaggcacagacactgcagcagtaccgcgtggagctgcccgagaagcaccagaagaccctgcagctgctgcggaagcagcagaccatcatcctggatgacgagctgatccagtggaagcggcggcagcagctggccgggaacggcgggccccccgagggcagcctggacgtgctacagtcctggtgtgagaagttggcggagatcatctggcagaaccggcagcagatccgcagggctgagcacctctgccagcagctgcccatccccggcccagtggaggagatgctggccgaggtcaacgccaccatcacggacattatctcagccctggtgaccagcacgttcatcattgagaagcagcctcctcaggtcctgaagacccagaccaagtttgcagccactgtgcgcctgctggtgggcgggaagctgaacgtgcacatgaaccccccccaggtgaaggccaccatcatcagtgagcagcaggccaagtctctgctcaagaacgagaacacccgcaatgattacagtggcgagatcttgaacaactgctgcgtcatggagtaccaccaagccacaggcacccttagtgcccacttcaggaatatgtccctgaaacgaattaagaggtcagaccgtcgtggggcagagtcggtgacagaagaaaaatttacaatcctgtttgaatcccagttcagtgttggtggaaatgagctggtttttcaagtcaagaccctgtccctgccagtggtggtgatcgttcatggcagccaggacaacaatgcgacggccactgttctctgggacaatgcttttgcagagcctggcagggtgccatttgccgtgcctgacaaagtgctgtggccacagctgtgtgaggcgctcaacatgaaattcaaggccgaagtgcagagcaaccggggcctgaccaaggagaacctcgtgttcctggcgcagaaactgttcaacaacagcagcagccacctggaggactacagtggcctgtctgtgtcctggtcccagttcaacagggagaatttaccaggacggaattacactttctggcaatggtttgacggtgtgatggaagtgttaaaaaaacatctcaagcctcattggaatgatggggccattttggggtttgtaaacaagcaacaggcccatgacctactgattaacaagccagatgggaccttcctcctgagattcagtgactcagaaattggcggcatcaccattgcttggaagtttgattctcaggaaagaatgttttggaatctgatgccttttaccaccagagacttctccatcaggtccctagccgaccgcttgggagacttgaattaccttatctacgtgtttcctgatcggccaaaagatgaagtatactccaaatactacacaccagttccctgcgagtctgctactgctaaagctgttgatggatacgtgaagccacagatcaagcaagtggtccctgagtttgtgaacgcatctgcagatgccgggggcggcagcgccacgtacatggaccaggccccctccccagctgtgtgtccccaggctcactataacatgtacccacagaaccctgactcagtccttgacaccgatggggacttcgatctggaggacacaatggacgtagcgcggcgtgtggaggagctcctgggccggccaatggacagtcagtggatcccgcacgcacaatcgtga

SEQ ID NO: 163 - DNA, 39780 bp, Mus musculus
  misc_feature (8495)..(9138): "n" at positions 8495 to 9138 can be any base
  misc_feature (26208)..(26227): "n" at positions 26208 to 26227 can be any base
  misc_feature (34452)..(34570): "n" at positions 34452 to 34570 can be any base
cccacccacctcctttcaccatcattccggggctcaggactccacacagaaatttagagtgtcctagtagttctcacggtagcagctgaaggtttcttacccagggccagagggctgccatcttatccctggccagccgctctcagtacaggtctgcgcggtccgcgggatccaggactaatacccagggtcctggaggagagtaagaactagttgggggcctgtggggctggaggaggagagaatgactcacaggtcgccaacctatacaaagaaatggtgttgtcaggatttaagcagcatcataacaatgacatgcctttgcccaggtctctgcagctggccggccactggtcctccacggaaccctgcttcatgtctggctctccctgcctccttagcgcacaccctgtttccgttactgttccattggcaccatggcggtcactctccgtacctggccacccagcgtgacacctacccaatgctcaggtttagggcatgagctgactgagctaaggccatctgaggcttgcctgcccctatgaggtagcttgagattgaatgctgacctagatggagatgtccagctgctcctgctagctagctgggctttgccaatgtaactacagtagggcacgtccctgccaactggaaatcttggctctggggatactctgaggcctgggaacaccagagctgggacaacagctttgtgtcaggcagccactccggagctcctggacccctcctgggactctccagggacaggtcctctggaattcagcagtcaggctggtgacagtattacctgggccagcatcgtagaggtgggatacctggctagtggctggcagggtgaggttggaaggccacacccggctgggagggaaggtgtggctgcactgttttctggaaccatagccaccagagtttcacctcctgtctgagcaaacgagcagctaggaatagacagagcaggctcctgtggcctgtgtcttcaggggtgtggagtccagggaacaatctgccgtaccacaaccactcaagatccccaggttgtgtttgctgtggtgctcaggagggtgcctgaaagtctatcttgtccccacaggagcacctaatggtaccctctttgtgatctattcccgttattagatcccagtgaggaaccgtaagtctaagacacagtacgtgtatacacacacacacagagagagagagagagagagagagagagagagagaggtgcatacctaagtgcatatctgcagatgtactcacaaacatgtagtcatgcatgtttacacacatctgcagatacataggtatgtgtgcacatgtgtatgcatgcacttacattgttagatgtcatgttacatgtcatatgcatgttatacacagagataacatttaacttggcacttgcatgtgtgcccatgtacatatacataacagacatggcatctgtgcacacacatgggcatgggtatgagcacaggtaaacacatgtcaaccagcaacacatgtcgctggttgacatgctgacacagatgtacacaagttcatgtgcacaatgtgtgtgtgtccactcatacacacacacagtaccctcaaggccattagcattctcaggccagagcaaggtgaccatgccctggctggggtcggtcctgtctccagttgcagcccctgctgagatttccagggtttgctggaggcagagagttgccctctgacagcccaggcagactgcagagggggctgcagttctttctcctgggtttagagtaggtgatcagccctcttagtgtagtaatggggccttcatgaccctgtctgtaatgggatgtcaggccttcttctggagggcctcagttgtcgcaggggagatctcagctttccctgggggaagggcgatgtatctctttgtttaaatttaaacaccgagagcaaggtcctgaacttggcattggatggagccgttcctggaaggcactgtggcagcctgtctgtgtgggtgtggcaggcacattgtttcaagtgagttttaaattacaccaaacagtgagtagtgtagagaaaagaagaaaagtcaagcccaacgccttcctccccttcctctacttctctgctccccccctcccctcctccccctcctctacttctctgctccctcccctcccctcctcctgttcccaggggcttcttttaaagagcaccagggtgttggcaaggcttttgccctctagtgtctgcccatggaataactgtgctctgcattgtggggttgggtctgcagggcaggagcctgcagctgtagtgagcacagcctggctgaacttgctctgtgcttctgttaaggcagcccagggccccagtaaaccccacagttcctacttttggtcaagactggcagaggagtttgctggctgccactgaaggccagaaggtggcattggattcccctggaactgaagtcccagatggttgtgagctgccgtgtgggtgctgtgagtggaagccaggttttctcaatctacaagagcaacaactgctcttaacctctgagccatctccccagcccctaccaatgcgttttatacagctgacatccaagggcagccccagccagaccaccctgggctggtgaagagttttggttatttcagccacttaaaaaaaaatgtttctcttaaaatttgttttagtcttgtgtcctgactttttcactccaggcacaagctgaggctcttgctctctgccccttgtcatgcacctccacccctcccccaccctcctaataaatgtattccccaccccccaccccctttggtgactgaggctgcactgtgggccctggtagcacattctgattatatttccactaaggaccattctctcttcccctggggttctaattgctccattttgagtgtttggtaattcattcttagctgttggtgcagcatcttagccatgttatcaggccccagcctctgagactttcctttttgcagctgatagaatgagaaaaaaaaaaaaaacccttattattctatgttcacagaatggctgttagacctccagacatctagtcttgagtttcagatagcagcatcaagagcgagcttaggggtccaaatgctggtggttttttttttttttttttttattattgttgttagcctatttcatggaattgtttctagtgctttccacttagatttctttaactagaagcagggtaagttacaaaggtgttgaactgggcgttctgcccaccagtgagagctcaggatctgttacctagaaggaggcaggaagtcacagaagcaggaggaggccaggctgggtggcaggagatttgaggggaggggagagctactgagcgtggggaggggcagttggatgaggaaggaggtgcatccaagacaagtttgcagattgggtgtccttactagccatggacccagccagagagtggggctgcaggtaggtgagtgtgctttagtggccagtgccttccttgtcctcccgtccacgtggttgactaaggagctgagggagtagtagggtttcatcctgggtctcggggatacatgtgtcttgtgacactctcacagctctgagaaggaagacgttaggtttctaaaatcctgtcctgatgctcgtgaactttaggggcagcccttctgcaccctgcccggcatgtcctttcatgtttctcagccagatgggtctcactccttgtggtgtctatgaaccacctcctgtccttccgtgctgtggtggggcatcctaattagcggcttgcgtgtccatcagctcacaggttcagggcaccatgttgggtctggtgttgggcaaagcccttctggtctgttagcccctggttctggactctctttcttggtatcttgctcggccccaccccacttcttttccagggcttaattaattagcttgttgttaatcaatttttgttaattaacaaaataattaattaaatcctgagccaggacctcactgtggaaccacggtaggactgggactcactgtgtagactggagcttgcctcccccaccccaccccaccccccccagtgttgcgattatggcctgggactacatatagactaaactagcaatgaactcacagagctccctctgacctatggttaaaggcctgtgctaccacctattaattttggaatctgttttgtatctttaaattttatttcagtcagggtcttctgtagcccagactgacctcagactacatagctaaggctagccccgaactcctctttcttctgccttcacctggtggtgcattgacattctaggtttatgaagggctggggatagaactttggggctttgcgcatgtgaagcaaacattctaccaatagagataaggaatgttttcttttctttttttttttttttaaataatctatttatttattacatgtaagtactgtcttcagacacaccagaggagggcgccagatctcattagggatggttgtgagccaccatgtggttgctgggatttgaactcaggaccttcggaagagcagtcagtgctcttaaccgctgagccatctctccagcccaggaatgttttcttataaaaaatgttcaagcaggaatgtgacctgcatgaccttggctggcgaccctggcaggcgttcagccttctctgttcacaccaacatctacttccatcagggggatgtgaagaggaaagaaatatccatgtcccatgctacctgaccctcgcagctggaacaaatcagagggcctcctgcgtgtcacagctcccttgttctgctcatctccagtttctgcaacacccaggatcttctgggcttagaccagtgccacctgtgcctctgtacctagagggtgcttgagatcagagtggtgttgctgtcctggctttccttagctgtgaatgctcagtgttggagggagttggtcaccatggcttggaccctagcaacccacagcccccttcctcactgtggcaggagaatgggctcttacgcgacaggacgcagcactgtgaacttgctcagcaaaacgcagagttcataattgtcggactcaccactgtctgtttcccagtcactgcctcagttcttggcttcctgctttctggttggatcagggtaggagtcaccccttgtgcttggctgctgtgaatttctagggtaggacaggggtccgtctggctcctattctgtagaaccgctgtctataattggagtcacctctttgcatgtcacctgtatctccttttgagctatagcgatagttaaggaaaatggtgagctgaactggcttagaatatcccactccttggaggaaggaggggttcgggctatctttaggaagcttctaaatccattgggatagaaaccagacagtcggggctggtgagatggctcagtgggtaagagcacccgactgctcttctgaaggtccagagttcaaatcccagcaaccacatggtggctcacaaccatccgtaatgagatctgatgccctcttctggtgtctgaagacagctacagtgtacttacatataatcaataaataaattataaaaaaaaaaaaagagagaggaagataaagaagagagggggcactttctattttaaaaaaaaaaaaaaaagaaaccagacagtctgtcctttagtaccggacagactaagggactgaatagagatgctggaagagcctgccctgccctctgtgggaggaagggtggggcaggggaggcctggcaagtgggtagatgccatgccagcattgggctcacatctggagactgttgtgctcccttcagcttctagtaaccacacccaaaggtgaggcggatctgtgtatcagggcagctggtgagtgactcagcgctgagctctgcatcctgggatcctggtgtgtgctgggcctcaggcttggctagggcaggtgaggacagggacagaggctcaagggacctggccacaagtccatcagacagcaaagcctggtcttctgtttcttgtttgtggacaaatcagagttaattgctagtgtttccatggtaattaacggcttcctggtgaggcaggaagagctcgggttgcctcctgggctagctatgacttttgatgtgacccactactcctgcagaatggggccctgaggctatgtcttcatgggtacggaggttagtgtgtgcttacatactgtatgtatgtatgtgagcacatgcgtgcattttcgtgcacatttgtgtatggctatgtgcattctgtgtgtctacccatgcatgtgcacccttacatgtattcccaggggagtgccctgtaaccgcaaacctctgatgtctggtaatattcctgggttagcatgtcagaagttgggaagtgagccctccagggaaactgagacccgtactgttcctttcagttgtggcatgtcaccaagcacctggctgtccctctagctagttatttccaccttggtgggtccatccatcttggtgtgttttagccttgttgtcttctctctgtgggatctgtctgtctggcagccccacaaatcctggatgccttccatgtccctcagcaggcaggttcagacaggatagacagtagaaagggatggaggggactgagaaccatctggagccgctgggacctatagtctcgtcctttccttcttttgcaggtcagacgggaacaccggcagccttggcatgacgtcgtgaaggtggccattgctaacctgacatgtggggactcaggaaccccaccccttatgggctccagtctgtgctgctggccccagctctggggctctaagaggtccttgctgctaccccacagcagcctgctgccatccatgtgtgcccgttgctgaaggcctcggtggcccctgcccatgaggatgtgtgcccccgttagggggctgttcttggccctggtggtagtgttgagaaccgcgggtggcatttgcacctgtgcctcggctcacctgggaacatggaggtaagtgagtgtgagccatgagtgagtgtgagtgtgggtgcagcagctctggagagtgtggggtccctgctttggatgctctgtggggtctgtcagggcaggcttaagccgctgggatgtcaaaggatgctgtgtgaccaggagaccccacagcaagcgccaagcttaggttggacggtgtatgtgacctcagtggctcacggcttacttaatgctgacgacatcccaggtacttatgctgcactgttgagattagctcagcctcagagaggtctccaggcccgatttccaggatggggacacactggctgtcccacattccagggagggaactttgtgaagacagaagccgggaagcaaagtgcactgagaatgtccaactctgaagctacctggacactccgggtgctgacttgtaggcaagttcagatgaagttcattgatgggggagggggcagaatgctgagctcagcatcacagcaggaacctccacactcaggaagttgatgcaggaggatcgtgagttccaggccagcctgggccacggagagagaccctgtctaagaagaccagtattgtgtatgtcctgcctgtgttaacatgttcttaaactggtgcaggtacgaaaaagcatcacttgtctctggaaatcattggtaatgagtgtaaatttgttttggagagagatgtgtcccccccacccccacccccatcatgacttttctttttttaaagggggcaccggggaaagaacataaaccctgcacacactaggcagatgttctaccaatgagcatctcagcccctcgttccagagttttcggtgttgagggtttcagagtaaggcatttacttcacgagtgagaaagttctcagtcattacgtattttgagcctacagtgggtggttaaagacacattaaagaggtagagtgtaaaccaagtgtcttcgtcagggtttccactgctgagaacagacaccatggccaaggcaactcttataaaggacactgtttaattggggctggcttacaggtttagagattcagaccattatcatcaaggcaggaagcatggcagcatccaggcaggcatggtgcaggaggagctgagagttctacgtcttcatctgagggcaaacaagaaaagactgatttccagggagctgggaatgattctcaaagcccacctccacagtgacatacttcctccaacaaggacacatctcctaatagtgccactccctgggccatgcatattcaaaccaccacaccaagtgtctgtgatgtgctagaagccccagcatgagaggtttggatctgggagacagaaaaggagatcaggagtatagcctggggatgcatgccatcctcagggatccagccgtgggctagctcctctcttgtacttggtggctgcattgaggttacctggggtggggggggggnnnnnnnnnnnnnnnnnnnnnnnnnnnnnnnnnnnnnnnnnnnnnnnnnnnnnnnnnnnnnnnnnnnnnnnnnnnnnnnnnnnnnnnnnnnnnnnnnnnnnnnnnnnnnnnnnnnnnnnnnnnnnnnnnnnnnnnnnnnnnnnnnnnnnnnnnnnnnnnnnnnnnnnnnnnnnnnnnnnnnnnnnnnnnnnnnnnnnnnnnnnnnnnnnnnnnnnnnnnnnnnnnnnnnnnnnnnnnnnnnnnnnnnnnnnnnnnnnnnnnnnnnnnnnnnnnnnnnnnnnnnnnnnnnnnnnnnnnnnnnnnnnnnnnnnnnnnnnnnnnnnnnnnnnnnnnnnnnnnnnnnnnnnnnnnnnnnnnnnnnnnnnnnnnnnnnnnnnnnnnnnnnnnnnnnnnnnnnnnnnnnnnnnnnnnnnnnnnnnnnnnnnnnnnnnnnnnnnnnnnnnnnnnnnnnnnnnnnnnnnnnnnnnnnnnnnnnnnnnnnnnnnnnnnnnnnnnnnnnnnnnnnnnnnnnnnnnnnnnnnnnnnnnnnnnnnnnnnnnnnnnnnnnnnnnnnnnnnnnnnnnnnnnnnnnnnnnnnnnnnnnnnnnnnnnnnnnnnnnnnnnnnnnnnnnnnnnnnnnnnnnnnnnnnnnnnnnnnnnnnnnnaacacacacacacacacacacacacacacacacacacacacacacacacagcctagaaagataacaaactcccacaagttgtccccacacagccacttacacaccatcacacattcacatctacacataataaagacgtaattgagcacaaggagatggcagcagcatcgtgggggtggggagtaggtagggggaggtggtgaaggggaattgaggtagcttacactaatcactggaaacgtcaaaaaaatgtaatagaaagctttaaggctgataaaaaagaacagatggaagcccccagttttggatagaatttaattgactatactttcattatgtggggctagggggtcataggacgacaaccttgggtgtctttccttgggtgctggccacttttaaaatttcattttttttgagacgtggtctctcaaccagcctggagcttgttaagtagactggcatggcatcactgcctccccagtgcacagtgccacacctagccttttcacatgaattctggggatcgaattcaggtttctgtgcttcctggcaagcacccactgagccattcgttggtctccccagccctctgctgctttgtccgaagttcagggctgtgttatccctgctagactggggatgatggtcccagaacatgaggaagccctaaggatgactctggggtctcagtccctgcctgctccctgaacctcttcctagtctgactttattctggctgcaaaccagtgagctttgagctgtggtgtgccttctgttgctgtctgctttatccagcagttccttggggtgggggtggggggaactgtggtgaactggctctgacacgttcctccctcacaggtatattggaaggtctctgaagacaaaaaatccaagtgtgcagagaaggggaaatcaaagcaggtaattgaccgcacgtacaaagagcccacgcacacagttcgcagttatttggatcttttccagtagcagtcttctgcatgcctacctggtatcacgtgagtctggtgggctcggtcctgctgtctcaaccctaccagcatcaggattggtgctctcaggccagtgccctgcatcctccgcactggagaagcctgttctcacggcttggcattatgactacaggatgttgtttctgctgcccactagtacctggtgtagaattggcctcccctatatgtttctggccttcttgaaccagctgaggcctaagaggtgttggggatttgatgggatttgttattgttgggtttattttttgttgttgttgggttttgtttttttgtgggttgttttttttttttttcctgtattttgttgtcagataccagtatgcgcactcagggagactgagccttgtatcctttttctcaggagctctgagtaccctcttgtgcctgcccacctggtgtcccaccagtgtcccagatgtttttagatcacgaatgtttttagatcacaggagccaggttgtccccaatattggtcatggtggctcagcagtggcagagtttatcagctgttagctgatttcagaaacagggattaaaacaaccactaggagccgggcgtggtggtacacacctttaatcccagcactctggaggcagaggcaggcggatttctgatttcgaggccagcctagtctacagagtgagttccaggacagccagggctacagagagaaaccctgtctcggaaaacaaaaacaaaaaccaaccactaggttaaactttcttggctaaatggtaactgaacactttccccgtcttactggtctctaactgtagtgttcactcaggacccaaggcaggcaggcattacgataggctccctgctgcaggaaatctgtgtagcggagtgagctgatgccttgcaccactggatgtggggacccacagtgaccttggcatggagccctcctgtgataccctgtccatttgagggttgttggggaaaaaagcaacaacaacaacaacaacaacaaaaacccctttcccaacttgagataatttcaggccatagcccatagactctaagtgctgttctcctgaaatagcacatgggctccaaattgccgtctttgttttcccactgggccctcagggatacacagctggctgtactcttgggtccagcctctctctcagttcctgctagtcgctatttctagttctgtgctggtggcaagagtatagggtggggtccccaggaaggtagaaggagcctgtacaatgtctgttttggcaatatgggcccccaaaatgaacggtgtgtgttcagcaagggtaaatacattgccatctgtagtgggctccccagtacaatttgaggtcagctctggtttggtctttgctttgcttggtcaccagatacaggctggccatctacttagggatagagctaaagtcatgcctggcacctgcactgcatgtggaccacagagataaagtttccgttgcagagcctggctcatggtgcagtgtgccccctctatgggcatagacagaccaaacctgagcagaggagagaacaaggcagcaaatgactggcctttaccatgtggatacaagggttctttgatgggtgcctgttaatggggtgtttcccttgcagacggaatgcctaaactacattcgagtactacagccactaagcagcacttccctctatgtgtgtgggaccaatgcgttccagcccacctgtgaccacctggtaagaccacaacatatccctgtgtgaagtgctcacgtaccagcctggctagcgactaaagcagagccagcctgtctcagtcaggctttctattcctgcacaaaacatcatgcatgactaagaagcaagctggggaggaaagggtttactcagcttacacttccacattgctattcatcaccaagggaagtcaggactggaacttaaacaggtcaggaagcaggagctgatgtagaggccatgaaggaatgctgcttactggcttgcttcccctggcttgctcagtttgctttcttatagaaccaagactaccatcccagggatggcaccacccacaatggaccctcccacccttgatcactaactgagaaaatgccttacagctggatctcatggaggcatttcctcaagggaggctcctttctctgtgataactccagcttgtgtcaagttgacatgcaaaaccagacagtacacagcctctcctgttctttctgcaaactgcaaggactaagaactatacagtcggatttctgacagcaacaattgccccgttcctcctgatgagggttctgtgaggtccatgggatgatctatggtagccatgaggtagctgtactttccaaaaagaataaataccgagagatcggtgttagatactgaaacatcaaattggatgtgcaaaacatccagcagaaatcagggcaatctgattaaggaagctggctggggttcccagcagagttctagtcagagcaagaatgtccatttgggtgggacttttaaataaaagaacaaacggcagcagagagatgccgttgccttgggagcatcaggcatccatcaagaactgactggggaagttgaggcagtcagctggagccatctctctgtagctgagatcccatgggtgacctcccccgccatccccaccctcactccccaacccccccaccccgccactgtattgtgagataaataacagtaagctcttctgcagatggttcaccccctagatgctctcaagggcacagtgtttctcaagggcacagtgtttctcaagggcacagtgtttttactctggggttgcttgctcttctctctgtcacagagtcagggaccttggaagacactgggaaaacatgcttgggtctgaaatggaggaggggaaaccctgctgccagaaccattttcccccttgagctcacacagcacaagaaagcttaccaatacgatgtatattacaggtcacttacttacttagcccttgctgtgaccaaatacttgataaaataagtagcttaaggggaaaagattatcgaaggcacctcagccaaacagaaggcatcttgtggacaagtaatgctggcctgtaaacacccaggcgcacccccagaaacccgctttcacggtaggtctcacttctacatccaccacctggagagacacccatgagcccatgggtgacattttacaaataaaacgataacaaatatgaaaacgtaatagatgggtttcctctcttctctgctgggcatagatccaaattttgcaccaaatgccaaaaccttggctcttcccaagccttatattgtatacctgatggccacgaggctaggtgttcaaggaaaggtagctagcctgttcaaggaaaggttggtctgctgagcacggggtgagtgatgccatgcagggcagggcagggcagctcaggaggcaggagagtagttcattgctctgctgcagccggctgcagatgactggaatcccgggtgggggaggcttctgaaatgaagagcctcattcacctaaactcagccagctgaagtttaaagcttgttcccagtaagagttcagttagagttgtcttagttagggttgtactgctgtgaacagacaccatgaccaatgcaaggcttacaaaggacaacatttaatcggggctggcttataggttcagaggttcagtccattatcattaaggtaggaacatggcggcagccaggcagtgcctggtgcaggcagagctgagagttctacatcttcatctgaaggctgctagcagaatactggcttccaggcagctaggatgagggtcttatagcccatacccacagtgacacacctactccaacagggccacaccttctaatagtgctactccctgggctgagcatgtacaaaccatcacaagaggcttacctagattgcaagagatgtttggttttgatccccaggaccacaatacactcaccacatgcctatacaccatacatacatacacacacatacatgtaccatacatacaccatacgtacatacacacacacaaactcccctcagttggggatataactagatagaacagactcattagaaattctcttaggcagctaggtatggtgggaaggctcctgagtatgaggtcagcctagcttacaagctcaaaaggaaaaaaaaaagagagagaattaagaaactaaatatttgtatagatgtctgaggagagaggccactgcacaggtttgactggctaaactaactgtgtactgggatacaaccaaaattctagtgtgtgtgtgtgtgtgtgtgtgtgtgtgtgtgtgtgtgtgtgtacacttgataagtgcggtccgtggatcccataggcctttagaagcatttctcctaagaatggggacattttcctgccaactggtttcatcattgcagataaggaagcacagtgattgccagtattccctccgcccctcccacctccccagtatcctccgcccctcccgcctccccagtatcctccggcccctcccacctccccagtatcctccgcccctcccacctccccagtatcctccgcccctcccgcctccccagtatcctctgcccctcccacctccccagtatcctccgcccctccctcttccccatagcttagagcagggcacagccccagtggcctccgggcatccctgggaggtgtgacgacagatgggtcttatcaggtgggtcacactgtcaccccagctcacacttcctaacctgactggtggcctttattgttttaactggcccgttggtcactgcagacactgtgaggtcctgtgtgcttgctggcctctggcttccagccagcagtctctggcacagctaggagctcctgactgtggtgggcagccttgctcctggcctctccagtaagcaaagtgtaaagtgatggcctacttggattgtctcagcagtcctggagttctgataggcagtcctgtgggtggctcctgtccctttaacgggttgcatctgctgatttcttctgtgtgtgtttaaacgcctcttttaaatccagaagtgaaaattcttcaccttcgttctgtgggcattcccccccccccccacacacacacagtttgtcacttgccattgaactgtgtctcattttttcccccacatgagaacattctgattcattatgtggtgatgtttgggtgggtctgattctccttggatggtgttggtttcttgtttagttttttttttttttttttttgtcagcttggcagaagctggacttctctgagaagagggaaccacagttgagagaataacacctcataagataagataggtctgtagtcaagtgtctaggggcatttcacattagtggttgatgtgggaagagccagcccacggaggggtgtataagaaagcaggctgagcaagccacgatgagcaaaccagtgagcagcattcctccatggcctctgcctcagttcctgactctagactgctgctgctttgagttcctggcctgccttccctcattggtggactgtaaactgtgagctgaagtaaaggcggccatttatcacaacaataagagagctaagacacgtgaaataggtttccttgtcaggtggaaagaggttatcccaagattgtgttacctgctgaccctcatgagcacactgtgccagaagcatggacaaacacatttgttgtgtcctcgcacagtgccagaatttattcagcaacaataaattcccaacgattagcagtttagtaacatcaggttatcacttaatcctgcttccctcagtgatcaggccgagcaaggcaaatgcagattctttattcccgtctttttgtttgtttgataaccatatttctctgtgtagccctggctgtcctggaacttactttgtagaccagactggcctcagactcagagatctgcctcccaagtgctgagatttaaagcgttcgacaccatgccctgctcttacctgaatcttaattagtaacgttaactgtccaaccacacagcacagagaaaatatgtgtatatggcatgtatatggttatagagggaatacaggttaaagtcgcttgaggtttcagacctgggctcagagaatctgcactgatttcaaaccagaccagtgctgcgagggagccgctgcagtcaggtgttagagagctagacacctccgagaagctggaagctagagtctcccaaggcagaagcatgtctctgctgaacaaaccaggtagcaactgatagtttcgtgtggggctgtccatcatagtgttgggtgtctatcactttaaggagacaaggtgaggatgttacacctaggtctattaattcgtaggcctggcttcctaggcctttttcgtacaactgtgtgccctgacacactcagcttgtatgaattcatccaatggtggctcccctttctgttcccaggagtaaaccgtttatccatctgtttggagtggatggtgcatggcagacagtgtagcttgcaggtccacccagggcctactcatccttttccccaaagtggaatcaaaagctgcttgtaaaacagactctcctaaggcaaggcacagcctggagaccgttttatacaatatggggcagcttagagccaggcacagcctgatcccggcatgacctgtgttgtggtgagcttgctttagtagaatggcttcttcaggagctgctggtggtggatgagcgggggtgagggttctgtgggttgttttcattgggtttgtgtcgcctgttttgtgaggactgtagttgagcaagcaacaactgaccctgcatatctcaggctgtcacacacatgagatgtccttcagctgtcaacggtcccagggtgggacccacatggatcagggcccacttaccccacactctggtcttctgaagtgaaagaatctgtacctttaagtgatacagggacaggtcctcagcaccgagaggtcagatgttttctttttattccattgtagaacttgacatccttcaagtttctggggaaaagtgaagatggcaaaggaagatgccccttcgaccccgcccacagctacacatcagtcatggttggtgagtcctgcgtctgaggctctttcactctctgagtttatggtggcatgtgatgttgccacctgggacactcaggtcttccctcttcagccctgccttccttggcatcatcttggcacgagctcccttcagagaaggtgagcgacttgtggcacagactcctcagtgagagctttcgcgtttcccattcagagggagactcaggccccaccctctgcagcagcatatggcttctggctgtcggtttttgtgcagcacacaacctggatacttgtgtggctctgtgcctcccgctgcggtcctgcatatctgaggctaggggtcacacgctgtcttacagatagttcatgttggaatctctcagccagtgtgaaggttcaagcttcactgtcaatgtataacattcagtgaactgtgagatagttaatactatattacaaaacaggcgtcatgtgtgacactcctgcgcagtcataggctaaagtatgggttctgagtatattaaagtagacgaggctggaccatgctgcctggcagtgtaggtgcctgcacatctttttttacttacagtgctttttacttaggatggcttccctgggtgtcaaatactgaggagtgtacttgccattgctatactgactgtggcaaattctcatttgtgattagctattaccctttaacctgggaaaaaacagttaaatttggtgactgattgttctgatgaaagatgctgatgtaggaagcaggaatgcatgtcagagaagacgaggacccccccccccccgccatcctataaggaattaatgagggtataaatgaattatggtagcctggtatgggtgtgatagcctagcagaggtggaactatgaggcttgcttacagtccagcctgggctaatgtcagaacttgtgttaaacagttgtccctagtctctgacagaggctgaagctctgattggatcttctctactccctctcctccaccacagggggcgagctctactctgggacgtcctataatttcttgggcagtgaacccatcatctctcgaaactcttcccacagtcccttgaggacggagtatgccatcccgtggctgaacggtaagtgtgtgctgccagccttgtgggtctaccattttattcttcctctagctgtccccaggtcacaggagccgggggaggcgggggtggggtgggggtggggtggcgggctgctcatgtcagatcctaggcagtgctctttggaactgctcaaggcccgcaccagagtagctgtcttgctcactgctaatagcattgtttaaatctgattctctgacataccccacccagccccacttccaccccgtcccccaaatgcagtttgggagactttaataaaatgaagctctaatgggaagttgagaatgtagacactgagtttgggtgtcatcttagatgtggagactcttgggtctggccgggtggtgttgaaatgtgtctttactcccagacaagcatatcagggtgtggatgatgggggccctttgtgggtgtcttttttgtggggatgctgaccagtgatgcagggctttttcgaagccccttgatctggagtcagaccctggagtctgagatctgagacagccaatttctccttgggcctccccaggagtctggaaatccttcgggtggctgatttggcccttgtttaaattggcagatactctagcatgccagaccaaccaccagcagagaggcctcacccggcttcctctgtggctatcttggtgaagctgaggagggtggcgggcgtcctctgggcctggagttcacagtgtggcatacatactgtagacgtcctagaagggaagcttccaggctctaaggctgcccttgccagcctgcagcaccccagggagcaggtagagaggtggcttggtagctccgtgtacagaaaccatcctgtgatgccaccccacagagcctagcttcgtctttgctgacgtgatccagaaaagcccagatggtccggagggtgaagatgacaaggtctacttcttttttacggaggtatccgtggagtacgaattcgtcttcaagttgatgatcccgcgagttgccagggtgtgcaaggtgggtgctgtctccctgttcccacccacagtcctgcatgatgccactccaagattcctctctggaagtgtggccatctcctatgggtagagacccctgcggcaaagtttaatgtacagttgaggcacagtaagagaccagcaataagagttttagaggtatgtgcatggtttctcttgagacccaaagtaggattgggaagatggcttagtggttaaaatgcttaccacggaaacaaaaggaccagcgttcagatctccagaacctatagatgctgagcggatcctctgtagaaaagtggagatagggcctgctagtggggctgtcctcatcggcaagctctgagtttgattatgagaccttgcctcaaagaataaggtggatggttcctgacatcaacttctggcctccagatgcacccacacacgaacactcatatagagacacaccgcacatacacacatacatgaaaggaaagaaactcaaagaggaaaaaattagtcagagtgagcacttgtgatattttcagtgtgtcactaatcacaggtaactgaaattgcagaaaatgcaatcacgcacacgggagccgccttatttctttccagcccagagtggagtatagtttgtaactgtctgtgttgtctcagtcgtcagctccctgaaaatgactaggattgagcaggcaaagagggcacaaaaggagctcttagtggatgatcatgtgtttgccctaggatggtctgcggggccagggtctgtggtgggaaggaggcctcccatcacttgtttaactcctgggtcacagctgggaatgctgcaggagccaaagccagtggcacgctgatgtgacacagatggggtggttttgcttgtcattgaatgtgtttggctcttttcgtattctgtgatcctgtcccacatggaagtattgctttggttacataacttgtcttcagtattcttgggctaggccgtggttggggacatatggacgcctgcttctgtggctagtcatctgtcctgcctctaccatgtgctgtctctggaattccagggcgaccagggcggcctgcggactttgcaaaaaaagtggacctccttcctaaaggccaggctgatctgctccaagccagacagtggcctggtcttcaacatacttcaggatgtgtttgtgctgagggccccgggcctcaaggagcctgtgttctatgcggtcttcaccccacagctgtgagttcacttgtgagtcccttggcagttggggcctggtcaccctgacgacctcctgccctcctgacactctcacggattcccctccacaggaacaatgtgggtctgtcagcggtgtgcgcctacacactggccacggtggaggcagtcttctcccgtggaaagtacatgcagagtgccacagtggagcagtctcacaccaagtgggtgcgctacaatggcccagtgcccactccccgacctggagcggtaagcagggtctcgagctctggggagggctcatcttctctggatctcaaggccccccaagcatgagaccacacagatcctagtgcatcccggcagagggttgcatggcaacaggaatctgggtgctgggctgagtagctgccgggcctggggtgaacagtgaagctgttcctttctgatctcctctgtgttgggtagcaggcctcactgcatgctgcccggacgagagagtctaccgccgggctcctttgagaagtggacattgcacaatggcaggcttgcttcatttcccatttcctgcagacaaaaaaaacctgtttgtcagcctgggctgtctcctgaggcagcctgtccactagataacaggaatcatattctttcctcctagatacagtaaattagtaaagaaaattctagggttgcctgcatattgttgccacgtggtggatgggtgtgggtatggaggggcttggctcttgaagctctcccaggatggactgttctgtgagtgtctggcctcgacacctggttattctcataactcataattcaggtgttcagtaaaacatggctagggagctgggaccaaaaaaaaaaaactctttacaacttttttttcttttgtgctacccagaatctggctttctctcctctctctcctctctctctctctctctctctctctctttctctctctctctctctctctctctctctctctctctctctctctctctctctctctctctctttctctgtgtgtgtgtgtctgtataacaatatttaacaagcttcctttggcatactttcttctcatagaaaagctgtgaaatgagtgctttttaatctggaagtttgctaagttttttcattggctactaattcctctactgatcctgagacaattatgtcccgtggctttaaaagcacagctctttgtctctggggaggtcaccttagcccctgttactctttggagaagtgtgaccatggccctccagggcttctcttctgtgtgctcagttgaagctaagtgggcatgtgaccgcggtgcttttaccccacagtgtatcgacagtgaggcccgggcagccaactacaccagctccttgaatctcccagacaaaacactgcagtttgtaaaagaccaccctttgatggatgactcagtgaccccgatagacaacagacccaagctgatcaaaaaagatgtaaactacacccagatagtggtagacaggacccaggccctggatgggactttctacgacgtcatgttcatcagcacaggtgggttccttggtaagattgggaaattcacttttagccatctataggtaggtttggtctctccaggtaccaggaaggtttgtgacagcagaaaaggatttctgaggtatcacagcacctgggattatgagtctctgtggccatcaggcacctggggcactggttactaatgcaagtcccaacctgtcgtacctgggctggagtggagttaaatagtccctgttgtcatgggactagtgggactggcctggtatttcctaattggtagtgggagactctgccccctcctaggtaggagccaggttctgtcctgccccgagctgcctttggagatgcaactctctctcagatgtcttctgggatggggatggaaagttggagcatggcagctgccagagccccaggggctacccttagagcttcccagatgacttgaacattttgccctcgtctgcctgcctgggcccctaacctcccctggaagaccagtaaagtgcaacggccaccttatactgaatgtggctcaggtgtcagggtgtaaccttgttggtgaaggtcattggaatccaccataggacagggttgtcctcttctgagtgccccattgaggggatggcttgagttatccacgagtgtgagtggttgccgccaaggctggagtctctctcctagtttcatttctgttgccgggcgtggtggcgcacacctttaatcccagcactcgggaggcagaggcaggtggatttctgagttcgaggccagcctggtctacaaagtaagttccaggacagccagggctacacagagaaaccctgtcttgaaaaaacaaaaacaaaaacaaaaacaaaaaaattaaccagggtgccaccctgggcctgtccctctagggcctccttgctcacctgtgttctgaccttgcagaccggggagctctgcataaagcagtcatcctcacaaaagaggtgcatgtcatcgaggagacccaactcttccgggactctgaaccggtcctaactctgctgctatcgtcaaagaaggtaatgtgggtttggttggttggttggttggttttaggggtgggggtcaggtccaggcgcttgtctcccttgtagcttctctgtggctaggactggctaggatgggtctctcaaggcttggcagcctctggcccaggtgaacttggcgtacacagcatgggatctgaggcttgggaggaggcatgggagagccaggggccttgattgtactaagccactggagcttttgggaggtccctaacctggggaaatgtctgtgccttgaacctgaaaaaaaaatgcagattgtgctggtgggacatgacattttgctaatttgtaaggagaaataacaggggctggtgagatggctcaatggttaagagcattgactgctcctccagaggtcctgagttcaaatcccagcaaccacatggtggctcataaccatctgtaatgagatctgatgccctcttctggtgtgtctgaaaacaactacagtgtacttacatgtaataaataaataaatcttttttaaaaaaaaaaaaagagaactaacaggtcaccctctagagctcctgccataccgccctgtgcatcgggcagcctttgcagaggcctcagtcacgggggctcagctctgcactgtggctcccacgagccacggaaacacatagatgaccaaacctgccctcgaagccatgctatgtattgcccgaagttttcataaaaagctccagccagatggtagtagtgcaaacctttgatcctggcactcgggaggtggaggcaggtagatctttgtgagttcaaggccagcctggtatacatagtgtgtttcagggcagccagaactatgtagggagaccctgtctcaaaaatgaatgaatgaatgaatgaatgaatgaatgaatgaataggtattttttaagcccctaagtggggtgcagtatggttcatacctctagttccagaccttagaacattggaagcaggaagatcaggagttcaaggctagtcttagccatatagcaaagtcaaggccagcctgagctaagtgagaccccattgcaaaaaataaaacaaggtatataggagtgaatagaaatggcctgggtggggctggagagatggctcagtggttaagagcagtgactgctcttccaaaggtcctgagttcaattcccagcaaccattgtggctcacaaccatctggaatggcatctctgatggatgccctgttcaggtgtatctgaagacagcgacagtgtactctataaataaaataagtcttaaaaaaaaaaaaaagcctggcagtgatggtggcacatgcctttaatcccagcacttgggaggcagaggcagacaggtttctgagttcaaggccaacctggtctacagagtgagttccagggcagccagggctacacagagaaaccctgtctcaaaaaaccaaaatgaaaaaaagaaaagaaatggcctgggagctgggcttggtccactggctggaacttgttccttgtcctctggccttgggaagatgtggacaccacattttacatctaggataaaacaaggaagttcagaacatgggttgtctccaaatcctgactacactgcctgctgtcatgttaccctgggcatcactatatggtcctcttaaggtggtctctgtgtgtgtatgcttttcattaatgtgactgttaagaggacatgtgagcctcctaagtgctgagggctggctttgagcagcacagaacccagggaaagctaggagcaggatcagctgccacctgccctgcttcatgcctgctggccaaaggtgctcccctccccttgctagggctctgctgtacccccctgagaagatgggtccagggccacacttttggcttcaagtgccagtgctagcctcttgcctctacccttgtctctgatgcctggctctgggacactgctgaactgtggcctggtgtgactgtccccgtggactgcacatctgtgggccctgtgtttccaattcagttctctttaagtagctggccacagcagttaccaagggtccatcagtctcacttacccgtgtgctgggcttctgctagcaccaggtacaatgctggtcctggcttgcacccaggaacatggcacgctcctgtcctggaagtcagagcgatgttgataggcgtggtcacattggcaggctggattcagagatgactgataaggatgtgtccttatcacaggtacctactgtctggctcaagacaagactggcatttaaaggttgtgccctgtggattccagctgtagtgctgtgtcacttacagagtccaggagagcagtggggggggggggggtcacattaggagtgggaagcaactggagagggcttttatgtggttttctcaagacacaaatgaaagtctcttcacccaagatagagcaccaaggatagaccagtcgagctcagtgagccagtgagttttggggaggtagctacagggaagaaggaacaggggattatttacaagcccgtgggtggttcggaggcagctgcatccatatatctcccttcacagctggtaggcagctcggcagggcagagtctcctctctaccgcaattgtgtgctgcttatataaccttggggcagcgggcacttgtgaatcttaaacctcgtcaggcttcctaaatttccttcactttgagtcttgtgaggctccctcggcgctccgggaggacgtgtttcgattgggcagacatagaaacagagctgtctcttctgggaagaggagctgctttgggcgtgcagtgtgcttagcccagctacggaagggtggcgtcagatcccaggccctgcagttcctccactggcgtttgaatcctcctgggacaggggacaccctgcttttccaaacaagatttgtgtcttaatgtgcttttctgtcactgcgataaaccactctgaccaaaagcagcttgcaggaggagaaaatttccttcggttcacacttccaggttgtagtcgctgagggaannnnnnnnnnnnnnnnnnnnccctgccctgccctgcatggcatcactcaccccgtgctcagcagaccaacctttccttgaacaggctagctacctttccttgaacacctagcctcgtggccatcaggtatacaatataaggcttgggaagagccaaggttttggcatttggtgcaaaatttggatctatgcccagcagagaagagaggaaacccatctattacgttttcatatttgttatcgttttatttgtaaaatgtcacccatgggctcatgcgggaatggattattaagcttgcccgctggcttctgcttagctgctatcttataaagtcaggggtggcatcactcacactgggttgcacccaccctaattacttagcaaataagaaaatggcccacaggctgggcggtggtggcgcacgcttttaatcccagcacttgggagggagaggcaggaggccagcctggtctacagagtaagttccaggacaaccagggctacacagaaaccttgtctcagaaaagaaaaaagaaaaaaaaagaagaagaaaatgtcccacggacatgtccacaggctaatctgatataggcagttcctcagctgcagttgtctgccccgcaagtgtggcaaggtgacaatgaaaacccatcaggacactgtcatttaggtcttagcggtcgggccttgtggcctattctgagtcagtgagtccttccctccatgcagtgtttgactgtgctgtcttcccaggagctggtggagaagctagcagcccctcccagtgcctgagtcctccttacacttgccatccgtctctcatacacaggggaggaagtttgtctatgcaggctccaactctggagtggtccaagcgcccctggcattctgcgaaaagcacggtagctgtgaagactgtgtgttagcacgggacccctactgtgcctggagcccagccatcaaggcctgtgttaccctgcaccaggaagaggcctccagcaggtatgcctaaggatggggctgtgtgcctatgccccatgcacaagccatagagtaatgtgcgcctgctgtcttctaggggctggattcaggacatgagcggtgacacatcctcatgcctgggtgagtggatctcctttgcttcccacccctgggctggcaaagctcccggggcgtcagttccatggttttcctgtgcggtctgtcttcctttctcctctctgaacagaagtcaagtgtcacgcagcagacctgtgacctctccttgtggtgaacctgtgatctttctctgtccctttggttacagaaagagggctcaaaggcacacagggtgtatcggttcactggaaagcacaccctggcccacaccatgctcctctgttctgcttagctgggccccgtaaacaaaactggagcctgctaggaatgagagcgaaggagcccttgggtatgaccagatagccctagcctaaaaacaatactcaggaacagtgtgggacagtgtcatgcttcaagatgaaaatcctaccctagaaagaagtgccttaaacgctaaggagatggctcagttggtaggatctgagttcgatccccagaacccatgtaacagctgggcattggtggttcatgcttgtgatcctagccccaaggagggtgaggcaggtggatccctggagcttgctagcctcacacagcctagccgacttggcaagtaccagacaaatgagagactccatcacagaaaaagacaaagagggtaactgctatctgaggatgatactcagatttctggcctctttctatataaacacacatgtacgtacacacacacacacacacacacacacacacacacacagagcaaatggcatcagattgccttcaggcatgtgtaaatgtcacacaaatttcatgtgtagctttcagtccccttccaaagatagttgtctcgttttatatatgcaaatatttccaagcccaaagcatttttcatcttccgtatttcagacaaaagacacagttgtggttagttctggtgtcctcttggggcaccccctcctgatggctggccatcaggaaacggctgtgaccagaggtaggcatagaatcttgccagaattctagtctgccttcccagccccgtacccccttctctgactagccacatcagagtaagaagagggtccctggttgctagctggcctgctttagccattagcagaagtatttgtcagctgactgggtgccactgtgagggagctgagccgtgcccagccccttcctcagcctgctgacctttctccagggccagggtgagaacagaaattctcagagctgtcgccagttccttcagtgtatggaagggggacggggtgggggctgctctagggtcatggatgtctttaccttggtcctgaagattgcacctggctccagtgggtggaagtctcatgccgtcctgtgggtattaacctgttttttgaaagcagtcgagcggtcagacggagttgttgacggtgagcacgtttattttgatgttccagataagagtaaagaaagtttcaaccagcattttttcaagcacggcggcacagcggaactcaaatgtttccaaaagtccaacctagcccgggtggtatggaagttccagaatggcgagttgaaggccgcaagtcccaagtacggctttgtgggcaggaagcacctgctcatcttcaacctgtcggacggagacagcggcgtgtaccagtgcctgtcagaggaaagggtgaggaataaaacggtctcccagctgctggccaagcacgttctggaagtgaagatggtacctcggacccccccctcacctacctcagaggatgctcagacagaaggtagtaagatcacatccaaaatgccggttgcatctacccaggggtcctctccccctaccccggctctgtgggcaacctcccccagagccgccaccctacctcccaagtcctcctccggcacatcctgtgaaccaaagatggtcatcaacacggtcccccagctccactcagagaagacggtgtatctcaagtccagtgacaaccgcctgctcatgtctctcctcctcttcatctttgtcctcttcctctgcctcttttcctacaactgctacaagggctacctgcccggacagtgcttaaaattccgctcagccctgctgcttggaaagaaaacacccaagtcagacttctctgacctggagcagagtgtgaaggagacactggtcgagcctgggagcttctcccagcagaacggcgaccaccccaagccagccctggatacgggctatgaaacggagcaggacaccatcaccagcaaagtccccacggatcgtgaggactcgcaacggatcgatgaactctctgcccgggacaaaccgtttgatgtcaagtgtgaactgaagtttgcagattcggatgctgacggggactgaggccagcgtgtcccagcccatgcccctctgtcttcgtggagagtgttgtgttgagcccattcagtagccgagtcttgtcactctgtgccagcctcagtcctgtgtccctttttctcttgggttgagcctgtggctcatcccctttgtccttttgggaagcaagtatctattccagtctcaagtcctgcagttgctggagcgcttacgcacctgagccctttgtgtcctgggggagagatggccacctccgtgggctgcgaagagccaccccttcctcttccgattctcctagcagccactcagagataatttaattccagattggaaacgcccttttagtttatcagattggtaacttacatcctgctgcccagatggcacggacagttttctttcacttaattattattttttttttaaggattttcgctcctattgtgttgatgtcttaggtcattttctttttttctttctctttttttattaccagaggagatgttttaatattcatgagaagaggaacattttctagatttttttgttgttatatattgagatataaaatatggctatgttgcttaagattctcagggatagacttatttttgttaacttcattctttcctgctgttaggaacataggcctaaaattgtctcttgagtttgctcacccttttgttttggtagggtttttttgttgttgctgttattgtttctagtttttaatcttattcattttgaaggatttttctttctgaactttttaaatttttatattttcctgccatacatctacaaagtgggttttgagtgagggcaggtggcccagtggctttgggtggcgactgagctggtcccacgaggggaggagggtttatataccccatgaccctgcggcttcttggcgcctcctgcccatgaggatcacatcctgtctctccttgcttccatctctcatcactgcccttggacttccgccttgactgtccatgaaagacagaaatgggttgggtagttgggctcccaacctcggatggtgaccgcaacatcccgtgtgggcggccggccgctcctgcagcccgactctcctgccagtgtctttcaggatgtcaacgggtggtacgattctggcatttgtttctcgctcaccgtgtgtggaacactcattccatgtagagggtgacgaactctggattcccccccacccccaccccgtgccgtgtagacactcatcttctgcatgacatgatctaccattcggtgtaaacatttgtgtttataagatttactttgtttttatttttctacttggaactgtacacatttgaaaagtacccaaataaaccagaagctttatcgttgactgggccagcctttgccttagtgtggaggctgggggcggtggggtgtcctcctgtccctctgtgacggccctgggtgggggttggtcctgggatcttgtctgttctcatcccatgtgtccggtttcttgctttaccttctccgtcatgggaatggttctgacgacttcttcctcagtgccttcttttgtgtcctctgtctcacagcctcatctcctaagtccttccctcctcctggctcctctctatcctgtctgggccctgactcatcttctcccagaagccctcggccggccttggcctcggggcccaacagccgtaagcaggtcaccttactgccacccttcttgagtgaccaggcgcagaaggtgcaggcgctggggaccttctacctcttctgccaggccacaggtgagttgaggggcctgagtgtccatggctgtcccctcgctctgcccttgctcctagctgtgcctgaggttcagctgtctgtgctgatcccgggatcaactgtcaaccgtgcaacgctgttgctagggctgccgaaggggtcatccagcctctcgccgtaaaggtacaggtgttgggtcttctgagcatgtaggctgctgtgcccaatgttgtatgtcagaaaactggacctacagggcagcagagaaccagatgaggccacgatttgctaacctgggttaggtagggaattcaaggccaaccccaggcaacttatgagaaccctgtcttggagttttaaaataggaattaggatacatccagtggtagaatgtgtgactaatgtgtacaaggtcccagccacagcataaataaatacataaatgcgtgaagtccataaggtggaggttttctccctctgctggagactatcacataaggacatggactcttgaaagatggtagtttacccaaaccattctttagctcagagatacccatagccccatctttccctgtgggctttggcctctgcacagaagtgaggaatagagttgatttcaagacaaagcaaatccggtttatcttaaaattgctttttaattgtcgaagctatggagatcttgaaagtgctatgtgttttgttaaattagctctaggatcccaggggcctgtgttgtctgctgtgaatgcaacatgccgttggcagctggaggccccgtggaggctgtgggaggtgggcagaggttgctgcagacctacgtaccctgacatgtcatcagtgaatacatgggccttgatggcccttttgagttgctgtcttaactctggctgcccaggctgctgaccctggacacctgagcttcagcccccctctccaggtccctgggtctcctggtgtgtgtcacggtgcccagtgattcccattttgtgcttgctgctgtggaccaagccttcatgtcgacacctgttcttgttcctcagtaagatattttaagatagatcatttatttatgcatgtgtacaaatctgtgagcgtataaaggggcagaagagacgccttgaagccagagtcacacatgattgtacatcacctggtgtagatgctgaggactgaacttgggttcaacttggaacctgcgagagaagcaggtgctctcaactgctgagccatctcagcacgtctctaaggggcaagccattacatttaggggagtgttttccagtccccggtattattagcaaggctttcacaggtatgggtcctccggtgtgggagagggtgaatgactggggccttccttaaggaagataagacttcattgttagatgcatagaaactacaacatcgggcatttcaacaagggggaattcgaagccgggagttgtttgctaaggtgatggggaacctaggagtgagacaggaaggtgggcttctccaaagactgctacaggaagccaccagcatgggcagaagcaaaataaaacctcactcacacttgccaggcctctgaggttgggcatgacctgcaagggtagccttgccggcaatgttcctaccgccgcactcctcaggtaccacgagagacaggagatgcgctttttgaactttttagtgacctaagggaacactggaagccagggactgaggagccatggctggggactgtgggggccggaagtgtgcagggtgtgagtggaaactgaagtggaagagtgagttcctctcatgcccctcagagcggactgagcccaggctggggagacagctcactgattaaagtccttactgtgggagtgtaaggactggggttctcatccccagacccccacctaagtgctgggtaggcttggtgacccacctgtaattccatctttagaaagtggtgatggaatccccagagcatgctagctggcaggatgagccatttagcagtgctctgggtttgattgacagaacctgtcacctcaagcctttgcatgcatctacacacacacacacacacacacgcacgcacgcacgcacgcacgcacgcacgcacgcacgcacgcaccaagtctctgtcttgagcagacatgggaccaaacccttactctcccttacctactttctcctgtccttttttccacaaacatttgaccacacccggggcctgtcttttcagtcctgtcctccaccaagacaaggcactttagggaaaggcaccgccagcctggtgatggctgggtgggctttggtggtgtgaacatgccagggcctctgctatctttgagcaggtggcaggttgggtcggagttggcagacaatcttatctgaagcagaggccatgtggttttgaactcaactccctgtaacctttctacaaaaagcagtgtatgtctttgaggtctgctgaggaggccaaagcagctgtcccaggtgagaccccagttggctctcctagcccaatgacatgggcagggcagggctaggtgggcagagcaagttgggagccttgacctgcgtttttctctctcctaaaacagctgtttgtatgatttatgtgagtggcttggggctagctgattaaaggcctagtgcgctgtttttagaacacaagacttaaagagagggtgaacagggactcttcagtcccttggcatgtgtcctggtgtccgctctggctctgctggtgactctgagctatcttgggggagcctcacccctctagagggttgattagaggtcagatagacagcaaggcttgtactcaggactattctgcccactcctgcttccacccaggacctccatgtcctctggattggatgagtgttttcccagtgtatgaggcaattcagacgccctgttctgcatacccaagtgagatgaccagggaagacatgaaagctgccccaagcatggctgtgggggaaggtcaggctgcctacagcctaaagcttgcaggaactcccgtttagttccagnnnnnnnnnnnnnnnnnnnnnnnnnnnnnnnnnnnnnnnnnnnnnnnnnnnnnnnnnnnnnnnnnnnnnnnnnnnnnnnnnnnnnnnnnnnnnnnnnnnnnnnnnnnnnnnnnnnnnnntttagttccaggaaaggcagcaggatccggctctgacttttcctccagtctttgtgcccgggtctgcagcccagcactgaggtccggccatacccagccaggtgggtggagggctggagccgctgcactgtctgaccttacactgcagttgcttccccgtgtgctgatatcactgggaggtgcatgtttattctgtcctgctgccagctgccaaaggttggcatatgtacagcacatgccatgccaacacacaccacactgtgacatacactacaccacaccacacataccacatataccaggcaccacacataactcccaccacatactctccacacatagcccccaacaccacacatataattacccactgcacacacaacacatttatcccacatttcacataacccccagtaccacatgccacacgtaccacatcttacatgccacacaccatgcaccacatatcacaccatacatgcttcctttgtgtaccacatatataacatcacacataccacatacacactccataccatatatcatgctacacatacatgtacacactacgtactcagtccataaacactgcacacatcacacaaaccccatgtgtagcacacagccacaccaccaccacatctcacctataccaaatacctacatcacaagtcacccacactacaaattgcccacaccgtaaaagtaccacccaatgccatgtgcgcacaaaccctacaaacttaagacacttacctcaggtgctttacgaacagcataagcaaattgcttttaccaagcggggttcctaagcaagcacctgtacatttttgggtcccctcatttagtccctgtttggggtatggattcggggggccctaagagagctgaggaattggggtagtggggacaatgaaagctgcttcctttccgggcctcctgggttctgggcagcttcaggatctgggctcaaagaaacttttggggctcctttctcctaatgggggcctctgtggtggccaggtgggtggggctgggaaaagggagtccctggtacctccctttctcaaggagggcaggggcacaccagaaagtggtttcccatatccatgacctttaagagtgtcctcaaccattggggcacttcctcattctggttcttcagggggtgggtgtgttaaagatcacatgacccttatagtgagatgcagaactgggtggggtgtgcctagggttcctgctgctccaatttaggaatccatcataaatgcagacaatgatgtcttgagagcatcagcctcatccttgagcagtatctttagtcccccccagagtccagagcccagctccctcattcccagggcctgtttcagttcacagtcctaagaagccactgatggctacatcgtcatctctcaagacttccaggtgcagtcccgattacctgcatgatgaggtgcctgggggcagagacagagaaagggcctcaagcttagcctcccctcacaggtaacagacatgcttgtacttggtctaaattccaggctggccagggccaaataagatgccatctgaactagcagctgtctggactaatggcatgtgactgatgggggaactcatgaaatctgaggctacggtatgagagaagtttctagaagttgagggaagctttgaaagagcccttgtggccagagtgcagacttgtggggactgtgcagcccatggggataggtgggtcagaatccttcccaggaggcttagtagtcactaacttgatgtcaggaagagcccagcccgtgtgcatgactaaatacctgacaaaagcgagtcaaggggaggttttaattatggttcacagtctgagtctatgaggaatgcagcaggggcatgcacctatagtcaggaagcagtgttgctcagtttgtgtttcaacatcccctcctctgggggcatcactgtgtagccttggctggcctggaattttctagactaccacgtcttccagttcccagaaatcctcctgactctgcttcctgaatgctaggattaacggtgtgtgccagccaccatggccaacctcacaggcatgcctagaggcacatctcctaggtgattttagagtgtcttgagctgacaatatctaccatcacatgaaggtatttgaggcaggtggcacaagacagaaacaactgttagcttcagtgaacccctagctaggacatgggtgaaagaactctgggaaacctgtggatgggacgtgcctgggcaactgtgatgcataggtccagttctgggtccgccacccagtgccagatggcacagtactgagggggtggcaccgtccactgcttttaatgctccttctccctctctttgatttctgcactcagaaggaattggatagttaaagaaccaacagagagtaagtacctcttcacctctctcatgttttacagtgatgccacatttaagtttacaggtgctgtggtgtggggtttgtggccaatgtgacctacatgttttcaccccccaccacaaacttgatctacaaacaaacaacaaaagcccggagttagtgtttcatgttcattccttggttgtaatacctcaagagttagttgttccagttggattgtagattgatacccaactgcagaggaatggctaaaacaatatggttccatgaaaggcactgagttgcaaaggaaatgcttggccctaagatctacaggtaacacccaagatcctaccagctctgaatccaaatccacaaagctgctcctgtcctggatctacacaggctctgttgtgtcattgttccttaaactgtttcacagctgtttaagtagtgtcggcatagtattaagtactgtaagaaatgtagaaatgattccaagtctccaggaggaggtacatgtaggttttctgcaaacatgtcatttgatgtcctcagggatcccctgcagatactaagggatgactccagttgtgctccccagttgatggacatctgtatacagatgtgtgtgcgtgcatgtggatgcgttcatatacacctaaatacatggagttgtcggcggctagaattgaaaacacttgagtagaaagcaaatttaagtccgcagggcttgtccactagtctgcagccaggtgggtaggcacaggtgcttccggaacacgagactggcatgttcctgtcttatgtatgtttgtttactttttaattttttaagttaatttattttagagacagaaccttagcatggatctctggctagcctggagttatgagacttactctatagctcaggttggccttgaacttatggtggttaaccctctgtctctgcctgctgagtaccgggactacaggtgtgcttcatcgtgcccactcaattctgtctcagtggcatttttcaattataaaagtaacacttatttatatttgttattcataagctcttggaaatttatttttaaaaattcaagggtctggagagatgcatgggtagttaagagcacttgttcttggaaaggacatgggtttgattcccagcacccgaattgtggctcaggatccctgcagctccagttccagagcatgccatgctgcctcctcatgcaggtggtgcattggtaacaagccagcaaaacacccatacacatacaataaaacccatccccaggctgggaggtattttagtggacaaagcacatgctgtgcggcatgtacgtaatgcctggcaggcagttgcagtagcctacctataatcccagcactcccaaggtgggaaagggagatccttggagcatgctggctagccagtctggctgattcaatgagctcatagtatacttgagaccctgcttcaatatatatatatatacacagtgccaagcaataggcgaagacacatggttgacatccatctccaagccccacatgtatgagttgcattctgttaaccctctggagcctcaccaagcactgtatgacctacatgtttttcagtttgcttttttctgaaatcagtttctctgagagggttctcctgactgtcagtcactgtagtggcttcctaccatttgtatgtgtcgtcgtcgtccccacccccgccccccggacatttcctgattgttactaacagaaacaagcctgtggccctccagttgcattaccgctttggagccgtccctgggatggtccagttgtatttctacttgatccagtgtgagaggaaagcctgggacaacagcacagggggtcattgatgagggaaccagatgatgatgaatagagggttggtgaagtgaggagactccaggcccaaagttataaactaaaaatctcttcaaaagtccagtctgtggggctggcatgctgttggtagaatggtcacttagtatgcatgaagtcctaggttagatcctcagtactccatcaacttgttcaggggtgcaggcctagaaccccagcacgtgggaggtgaaggcaggaggatcacaagcgcaaggtcatctttggctacataaagttcaaggatagcttgggctacactgaggtcctgtcttagaaaagaaaaaatgcaacctgtcacctgtaactgagtagtgctaactccctgcctggtaccattccttccccagggcaagttctcccacccttggccacccacacaccctggcatcatggcggggacaatgccaggtgattttaagagttcccaggttctgccttggtggttgttatttgttgttattttttgttgtttttcctgctcagtgttttgagcccaggtggagattgctatttcttttctccccgtttgaatgtctcccatcaagcgtgcgtgtgtgcgtgtgtgtgtgtgtgtagatggcatgtgaaggtggcaggacctggctggctggtccttcctgtccagctcagcttggtacatcacatacctggtaacagtagctgacaaaatgtagcaccacgaggctggtttaaaccattgggccatcttcagccaagccccaggtagggccagggagtgaaccatttatgagtgtagctgctttgttttgccttctccttggtggatggagggcagcctgcccttgcatggcctgaagctctggggatctagggtgaagtctgagacccagactatacatacccataagtcagcactaacagggaagtgacctgttgccatcacagc

SEQ ID NO: 164 - DNA, 2769 bp, Mus musculus
gaattcggcacgaggccatccatgtgtgcccgttgctgaaggcctcggtggcccctgcccatgaggatgtgtgcccccgttagggggctgttcttggccctggtggtagtgttgagaaccgcggtggcatttgcacctgtgcctcggctcacctgggaacatggagaggtaggtctggtgcagtttcacaagccaggcatctttaactactcggccttgctgatgagtgaggacaaagacactctgtatgtaggcgcccgggaagcagtctttgcagtgaatgcgctgaacatctctgagaagcaacatgaggtatattggaaggtctctgaagacaaaaaatccaagtgtgcagagaaggggaaatcaaagcagacggaatgcctaaactacattcgagtactacagccactaagcagcacttccctctatgtgtgtgggaccaatgcgttccagcccacctgtgaccacctgaacttgacatccttcaagtttctggggaaaagtgaagatggcaaaggaagatgccccttcgaccccgcccacagctacacatcagtcatggttgggggcgagctctactctgggacgtcctataatttcttgggcagtgaacccatcatctctcgaaactcttcccacagtcccttgaggacggagtatgccatcccgtggctgaacgagcctagcttcgtctttgctgacgtgatccagaaaagcccagatggtccggagggtgaagatgacaaggtctacttcttttttacggaggtatccgtggagtacgaattcgtcttcaagttgatgatcccgcgagttgccagggtgtgcaagggcgaccagggcggcctgcggactttgcaaaaaaagtggacctccttcctaaaggccaggctgatctgctccaagccagacagtggcctggtcttcaacatacttcaggatgtgtttgtgctgagggccccgggcctcaaggagcctgtgttctatgcggtcttcaccccacagctgaacaatgtgggtctgtcagcggtgtgcgcctacacactggccacggtggaggcagtcttctcccgtggaaagtacatgcagagtgccacagtggagcagtctcacaccaagtgggtgcgctacaatggcccagtgcccactccccgacctggagcgtgtatcgacagtgaggcccgggcagccaactacaccagctccttgaatctcccagacaaaacactgcagtttgtaaaagaccaccctttgatggatgactcagtgaccccgatagacaacagacccaagctgatcaaaaaagatgtaaactacacccagatagtggtagacaggacccaggccctggatgggactttctacgacgtcatgttcatcagcacagaccggggagctctgcataaagcagtcatccttacaaaagaggtgcatgtcatcgaggagacccaactcttccgggactttgaaccggtcctaactctgctgctatcgtcaaagaaggggaggaagtttgtctatgcaggctccaactctggagtggtccaagcgcccctggcattctgcgaaaagcacggtagctgtgaagactgtgtgttagcacgggacccctactgtgcctggagcccagccatcaaggcctgtgttaccctgcaccaggaagaggcctccagcaggggctggattcaggacatgagcggtgacacatcctcatgcctggataagagtaaagaaagtttcaaccagcattttttcaagcacggcggcacagcggaactcaaatgtttccaaaagtccaacctagcccgggtggtatggaagttccagaatggcgagttgaaggccgcaagtcccaagtacggctttgtgggcaggaagcacctgctcatcttcaacctgtcggacggagacagcggcgtgtaccagtgcctgtcagaggaaagggtgaggaataaaacggtctcccagctgctggccaagcacgttctggaagtgaagatggtacctcggacccccccctcacctacctcagaggatgttcagacagaaggtagtaagatcacatccaaaatgccggttggatctacccaggggtcctctccccctaccccggctctgtgggcaacctcccccagagccgccaccctacctcccaagtcctcctccggcacatcctgtgaaccaaagatggtcatcaacacggtcccccagctccactcagagaagacggtgtatctcaagtccagtgacaaccgcctgctcatgtctctcctcctcttcatctttgtcctcttcctctgcctcttttcctacaactgctacaagggctacctgcccggacagtgcttaaaattccgctcagccctgctgcttggaaagaaaacacccaagtcagacttctctgacctggagcagagtgtgaaggagacactggtcgagcctgggagcttctcccagcagaacggcgaccaccccaagccagccctggatacgggctatgaaacggagcaggacaccatcaccagcaaagtccccacggatcgtgaggactcgcaacggatcgatgaactctctgcccgggacaaaccgtttgatgtcaagtgtgaactgaagtttgcagattcggatgctgacggggactgaggccagcgtgtcccagcccatgcccctctgtcttcgtggagagtgttgtgttgagcccattcagtagccgagtcttgtcactctgtgccagcctcagtcctgtgtcccctttttctctggttt

SEQ ID NO: 165 - DNA, 2586 bp, Mus musculus
atgaggatgtgtgcccccgttagggggctgttcttggccctggtggtagtgttgagaaccgcggtggcatttgcacctgtgcctcggctcacctgggaacatggagaggtaggtctggtgcagtttcacaagccaggcatctttaactactcggccttgctgatgagtgaggacaaagacactctgtatgtaggcgcccgggaagcagtctttgcagtgaatgcgctgaacatctctgagaagcaacatgaggtatattggaaggtctctgaagacaaaaaatccaagtgtgcagagaaggggaaatcaaagcagacggaatgcctaaactacattcgagtactacagccactaagcagcacttccctctatgtgtgtgggaccaatgcgttccagcccacctgtgaccacctgaacttgacatccttcaagtttctggggaaaagtgaagatggcaaaggaagatgccccttcgaccccgcccacagctacacatcagtcatggttgggggcgagctctactctgggacgtcctataatttcttgggcagtgaacccatcatctctcgaaactcttcccacagtcccttgaggacggagtatgccatcccgtggctgaacgagcctagcttcgtctttgctgacgtgatccagaaaagcccagatggtccggagggtgaagatgacaaggtctacttcttttttacggaggtatccgtggagtacgaattcgtcttcaagttgatgatcccgcgagttgccagggtgtgcaagggcgaccagggcggcctgcggactttgcaaaaaaagtggacctccttcctaaaggccaggctgatctgctccaagccagacagtggcctggtcttcaacatacttcaggatgtgtttgtgctgagggccccgggcctcaaggagcctgtgttctatgcggtcttcaccccacagctgaacaatgtgggtctgtcagcggtgtgcgcctacacactggccacggtggaggcagtcttctcccgtggaaagtacatgcagagtgccacagtggagcagtctcacaccaagtgggtgcgctacaatggcccagtgcccactccccgacctggagcgtgtatcgacagtgaggcccgggcagccaactacaccagctccttgaatctcccagacaaaacactgcagtttgtaaaagaccaccctttgatggatgactcagtgaccccgatagacaacagacccaagctgatcaaaaaagatgtaaactacacccagatagtggtagacaggacccaggccctggatgggactttctacgacgtcatgttcatcagcacagaccggggagctctgcataaagcagtcatccttacaaaagaggtgcatgtcatcgaggagacccaactcttccgggactttgaaccggtcctaactctgctgctatcgtcaaagaaggggaggaagtttgtctatgcaggctccaactctggagtggtccaagcgcccctggcattctgcgaaaagcacggtagctgtgaagactgtgtgttagcacgggacccctactgtgcctggagcccagccatcaaggcctgtgttaccctgcaccaggaagaggcctccagcaggggctggattcaggacatgagcggtgacacatcctcatgcctggataagagtaaagaaagtttcaaccagcattttttcaagcacggcggcacagcggaactcaaatgtttccaaaagtccaacctagcccgggtggtatggaagttccagaatggcgagttgaaggccgcaagtcccaagtacggctttgtgggcaggaagcacctgctcatcttcaacctgtcggacggagacagcggcgtgtaccagtgcctgtcagaggaaagggtgaggaataaaacggtctcccagctgctggccaagcacgttctggaagtgaagatggtacctcggacccccccctcacctacctcagaggatgttcagacagaaggtagtaagatcacatccaaaatgccggttggatctacccaggggtcctctccccctaccccggctctgtgggcaacctcccccagagccgccaccctacctcccaagtcctcctccggcacatcctgtgaaccaaagatggtcatcaacacggtcccccagctccactcagagaagacggtgtatctcaagtccagtgacaaccgcctgctcatgtctctcctcctcttcatctttgtcctcttcctctgcctcttttcctacaactgctacaagggctacctgcccggacagtgcttaaaattccgctcagccctgctgcttggaaagaaaacacccaagtcagacttctctgacctggagcagagtgtgaaggagacactggtcgagcctgggagcttctcccagcagaacggcgaccaccccaagccagccctggatacgggctatgaaacggagcaggacaccatcaccagcaaagtccccacggatcgtgaggactcgcaacggatcgatgaactctctgcccgggacaaaccgtttgatgtcaagtgtgaactgaagtttgcagattcggatgctgacggggactga

SEQ ID NO: 166 - DNA, 48244 bp, Homo sapiens
  misc_feature (36673)..(36711): "n" at positions 36673 to 36711 can be any base
  misc_feature (40035)..(40119): "n" at positions 40035 to 40119 can be any base
  misc_feature (42958)..(43306): "n" at positions 42958 to 43306 can be any base
  misc_feature (47841)..(47909): "n" at positions 47841 to 47909 can be any base
cctgacccagtcacctcccaaaggctccctctccagaaaccatcacattggtggttaggatttcaacatctgaatttgggggtaatccagacattcagaccatagtatcacctttgaaagacatgacaccaggcatccctttagggccgcagggttaacacagtcctccctgaggggctggccagccacttcccagaacaaccccacactgtgcctgggagccagtgtccagtagggagaccgttggcccccttagaggtggcagcaggtcaacattaggccagtggaagatgattatttttgctagcactaacctgcttgggcccaaggatgcatgcacacaccacacaccctccagaaaagacagtattgtctgtatccaagtctgaagaatagagtgatgtcacacaaatggcatgacagtctgcatctctaccatgctggctgctgcttagaggggtccccactcttcctctgaagggccctgttcgtgccgccactctgcgtgcatcctcatagcgcttgtcctgccgacattgctgatagatggatgcctgtgttcttcactcccaccgccctctgtctctctccctgggtttcccattctgtacatgctgcacccaggggtttgggaagtgggtgagggttagagcatgtctctgagatatcctggctgtggctcgcttgcccctgcagggatgtggcttgagggtgaagtagactggtcctggcagctgccctgctgggtgagtccggcccaacacaggtccagggctaggcatgtccctgcagagctggagtgttggtctccagggatccattttaattctaggaaaactgaagttggaacaataaactgtttattatgcttgtgacctagacagctcctgaaacccattcctgattcctgatgggataaggccattttatcctcagtttgcaaggcagtgacatcagcatcctaactggaggtgggagaggggtttctgggggcagaggacatcccagggtggggatactaaggtggccaggtactggcagggcatggttggtgagggctgcggtgtcttctgtttcccagcacctggctgcctgcttccagctgggagggaagatgtggtgagtgcgtgtcctccactgtcctggttgtagggcctggagagactctaagctttacctgccccatctgggcaaacccctgagataagaaataagccagaacacgctcccccaggcagtagtttgcatgcagtgaggtcaggggtccaggtaatgactgcctatgttagattggccagtccacagctgtcaccagagatcccctttcagtttccctgggatgccagccagggcattttaatgccagtgttgcatcctgttgctggcagaagcactgacaccttccatgtggtagtgactggtgtcccctctgtaatctaccctagctgccagacagctgatcccaggaaggagccgagacacgggtgactggacagtccccagatggcattttggttcatggttcctgccttacaggacacttgccagcagtcactattcacatctaagatgcaacactagatcagaatgtatgttctgcaacagagtgacacatgcacagatgcacatatacacacatgcacacacagatgcgcacatacatgtctgcgtacacatacacagatgcgcacacagatgcatgcacgtatgtgcacatatagctgtgcacacatacatgtatatgcatacacagatacatatgtatggatatatgtacacaggcagacatgcacaggtgcacacatacattatacacacacatacacagatgcccatgcatacacatatgtatacacatgcagagatccaagcagatgcacatgcactcacacaggtgtacatatgtatgcacacagacatacacatgcatgtgcagacatgcagacatacacatgtacacaacacacctgtacagatgtgtacaaatgtacaaacatggataggtgcacatatctatgcgggttcatgtgcacacatacagaaatacagatgcacatgcgtgcacatacacagatgcatacacacagatgtacatgtgtccacatatatatatacatacacgcagacatgtatgcacagtggttgctgggtactcccattttctctgctgtgatctcctgccttgatttgaagacccctgggggtgggagagctgccttctgacaagtactgacaggcaaaagagtgtggggctcagagcccccttggagttccattctgctgacatttaaagtgggctcgtgcaccctcatgaacagccccaattacgtgtaagtaatgagagtgacatttcacaaccctgtctttctaatgggctcctgtgtcaagtcattctttctgaatgcaaagggcagcaatttcacactgtcagggcaaaatgcacatgcatacagctcagctcccagcgggatacctttgcttctcagaaatggcgaagaaagccagcaaaatggcctttttctccttttgttttaatttaactatttagagtgaggtccttaatgtaacacccatcaatgattatggagccactgttctgaaagaactcgcagggccggcagatctgtgtgagttgtggtgtgtgctttgcttaaagcaactttaaaattatatgaaacaatgcattcttgttgaaaaaggaaaaaaaaaccctccagtgtcacaaagaaaatgtgcagccccctccccctccctgggaggagcagtatgtggcatggggtctgtcctgacctttggctactcatgtggactgttttaaaggccatttgagaagagcagcagggcctgatttatgccatcgagaatctggtgtctgctgatgagatcaatacactgcagacctggatataaatccgtgccaggaagcctggtggtcaatcattgttctcagggcagggcctggaagccaggtgggggtgcccgtgccctgctgagctctacatggcagtatctggattggtccaaggtaaaagcaattaagaaaaaggtttcttttcaacataaccagtttgagtaaccgcataaacagcaccagtcctgacagtccttcgtaaccatttaaagccacacaggagaacctgctggcttccacctgggcacctgctgacactcctggaaataccttctctcagccacattcgtttggggatggctttgccatccctgggtttggtcgtggatactattacaagatttgttttcaatctctcttcactggcgattttgttttgtggaactttctactcttggctccttacctttgtcctctccgggtctggccctagtcttctcactgggatgtttgtgtttctcctgttctacctcaactaagtcagggaggcgtttttaggtccttaggccaagtgctatgaaaacaataccacagagggggatggagtgtgggggtcaggggaggcaaagggtgactgtgggatggagccagccaccagcagctcctgggggtagaacagtctggaagagggagcagcaagtgccaaggctgcaaggcagcctgagacgggtggggtgcatcggagggagggggcaggagtggagtggaagaggctggccacattaggtgctggcattctgcattaaatcctgtgccactgcccagcacttcggctttgcggtgaacaatcctatttttacagcgtgtttgagcccccagatctggctgccctagggacccaggctctgcacagagtcagctcactcttcccgtccttgggagcctcccttcagggggtcgtgtcttctgcttctggatccactgggctgctttccccaggctgtgaggaaccagaacatggatgtctttttaaggttaattcattttatgagagtaattaatgcaggtaattttaaagtgaagtagttcttctttaacttgagagaggaagcagcacttgcttgtcttgtccctttgtcccttccctgctgccctgagacactgagtttcaactattttcactattttggtattttccttcaaattagatatgcctacatttcctgactttcccatcttagatgttgtgttatgatggaagacaggattgtgttctctgactcttgtcccctccctttccctctctttcttcccccagacctccagtggagttagttgtaatttttgtaatgggggctatgcaactgggcagtgataagtacactctggttacatttccattcatgggtcactcttgcttccctggggttaataacttcattttctaatctgtgtatctgttctaattcatcttcagactctttgccagagccttaaaatgcatttctgagaacaaagccacagatgcaatcagtaatccactgtgccttctcctgccccgccccattggagcctctgcctgctccccagctccccgctctctctgcctctcctccactcgcttcctaagaaagaagacctgggaagcagctcccttgttttggtggagcaaatcctgcagtagctttctgagaaagaagctgagggaggtaaaacatttgagaacttgtaggtttgaagcagtgttctgtactgcactcatactgattgataatttgactagatggggaattctaggtatgaagtcatcttccctgggattcaaaggcgttgctttgctgcctccagtggggcactcagaggtaatttctttgtggcctgtttctttctggaagcctcatgtaaccctcctttcaggatgatgtgtctggtgtgggcgggttcctttcattcactgtgctcctgggcgctgttattccgaaagctcaggtccttctgttctagttattttctttttattactgctttaataattcctcattttttttcccggagctcctgccagttcatgtgggactcctgaatggatcgtccagttgtctgttcccccttttttcatctctgctacgtgtgtaacttctaggaaacctctttagtttactttccagcctttcatttctttcaccacattttacttttaagcttgcttccattttccaggttgtgtttctttgtgacttcttccaggccctggctcaactctggtctgaaattcaaatcagtcagctctggtggtgtgtgacagggttggtggtaaacacagccactgttaaaaattaaatatgtggacttaaaatgaaacaaattatatttaaaaaggtaaaatactcagaactcattcctttctagtatcgtgtgcattctactgttatctgtgtggttgcagttactcgcctcttgtatctgagatggcagtgccatgtgctgggtgctgctgtgcacctctccccagttcagcggcatcattctgggagctcgaaagcagcatttacaccacagaaatcagcgtgtgctgcaagctgggcaccccccaccttaccccaccgcccacccccactgcccaccccgtggagagccagttgttacagcttgccagcacaccgttggttactgctcacctattaatagattccaaagtcacctccctcctccatttttatccttaaagttcatatccttttagagtcatttcattgggtttccagagagagttgaaataaatctctgtgttctcccatctcctggctctggactcttagcctggcctgaccccagcatgcttattgggatacgcagaggactgattgcagttgggggatctagataggaattagatcccatgtaaaccatatctctccaacagtgatccagcatctttggtatttgacccgaaatgaactgggccttgtgggtcttgcgtctctgctcctagccctccggtgtgggcacttacttccttaacgtgtccaggccatgaaccctcacagaggctgcttttgtgactggcaaggaactcctaggcctgttccttgttgttactgattttaatagactttattttttagatcaactttaggttcatagaaaaattgagaaggtggtacagagatttcccatatgctccttccccacacatgcacagccccctcattttcagaatccccccacagagtggtgcctttgctacagtcggtgaacccacataggtaccttatcacccgacatctgtatctggacattaggattgccagttggtgttgtacattctgtaggctcggacaaatgcatactgacatgtgtccaccgtggtagtatccctgccagcctagtttccctgccctaaaaaccctctctctccccagcccctgggaaccactgatctttttactgtcttcatggttttgcctttcccagaatgtcctatagttgggatcatgcagtatgtacttctacagattggcttctttctctttaatgataagcttttaaagttcctctgtgtcttttcatggcctaatggcttatttatttttaatgctgagtaacgttcccctgtctggatgtagcggtttgtatacccactcgcctgcccctgggctgtctccacggctggcttcctgtgtggttggcacgccttacctctgcaggctccgcatccgtcttcagagcgccttctcccatcccatggcagctcattgctgtttcttttgtgtgtatggacctttgcccagctgggggacatgccacgagagaggttgtttctgctttatccttgctgtgcacagcttggcactggctgggacctgggtctgggtgtggcttggaggagccaatgtcagttcattgggtttcactgggctgggactgcagcacatggaccaggccactggtgtccttgctgcatgcatgacaagaaccctctccaaggccctgcctgccgcaggcctgcctcctcctcctcctcctctagtggcgcgggagccagtgtgaagtctctcacaatgcgagtgtgcagtcctcttctgctttaagggatggggcagcctggccacgttgtcacttctggctctcactggctgtatgatgtttgtcacatggaacgggagaaaggacgcatccttaaaatgccaggggatcattgctccaaaaggaggggtagctggtttttaatgggagcttttctcttgagggactgtggatagcttgtcaccactgttaccatcctttcttatgtctgtcattgcatgcaatgaggactgagaagagcaagggcagcaggaccctggaggggcatgggatgtttgtgggtgccaggccctgggctggttgcttccacgcagccccactccagggcgtgggttctgtggggccaggacttgtttgttccaggcttagcaggagctccattcgtatttgtcagagcaataaacattattattatcagatgctaattgattagttatatattaatatgatttagcagataattctcacaactttgtaggccaagtaggtcaacttctgttttgcaaacaaaaagtgacaccattatggcaaggagctgcaaatgtgcctggaattcagaagatctgaacctataatttattgagtcttcttcattgggagcctatgtagaaaccattactggtttgggagctcaaagtggagcagcttttgggagccactcctaattaccaatcagttatacagaggaaaagcctctcagatgaatgagactgtgcagtgggatttagaccggcaacttcagaacagacacatctggaaatgttctaagtggtgttgacaggcaggagagacagccgttacacagccatgcagaggggccgagccctgtgtgttcaggtgtagccaggacagtgcagtggagggagtgtggatgaggagcagttggatggaggtagagtagggttgtccatggccttgctggccatgatgaaaatgtgggccttattctgagtgatgagaaggtgttgaaacatttcacatggggaaaggatatgatctggatttatgataagagcatgactttggccactgctactttgtggcagtggactggagggaggttgtgtcagtttggaatggtatttgttggtaacaaaaatctgcaagcaagtaatttaaagattttaataattttattagcaagtctgcatagactcatagcctagggtctcataggctcttgtgggtttcacttggccattcttagaatgagacttttatcttcatgttgacagcatggctgccagagctccagccatcacattctagttccaggcagcagcaggaagagaaggactgagggaattgctagctgaatcagcctcctttaaagagctttcctggaattgccatctaataaattccacatacagtttttttggccagaactctcaccagagaagctgggagatatagtgagctgggcacactgccaacccaagtaacctcggaattttgttagcgagggtgcaggaacatggatgctggggcaggaagccagtgatctctaccatggaagcaagaggccaggatgagaggtgagcattgctcagatgagtgatggtggtggagatggacaggaggagacaagccccagatgtgtttgaggctgagcagcagcaccatctatggattgggggtgggggtggggttagaggtagatggggtcggcccctgactgctggtgcttttttttaggtggggacatggactgtaggaattggctggaagcagagtgaggttctgtttcggctgtgtctggctgggtgtggaaggcggcatgtggaggtggtagggaggagtggggttctagagtctggagctcaggggtgtggttgttccatgaccctcacaggactcctggatagaagggggagcaagggactcagggatcccaggttgctgttttgagtgaactgtttacagaagtgtaatgtgaaagtgcccaatcactgggtgcccagctcaggacattctcatagagtgaacccaggggtgcagctggccccagatcaaggtgctagacgcccttgggccagtcctgtggcgggttacgctgtggggcccagcaaaggtacaccaggacagtagccatgcagtcatcagagaatgttggggacatgagagatggggccaggaggcctgtgcatgcctctcccaccaccagccccacaatttcactaagcagcattaagcctgttcttttactaagggctgtttcttactgggcaaatcagagtgagttaccaccatttctatggtgcatagacttctttaagtgagactggaagagctagcagggtcccatttggggcaggaggtcagacactcctgcgtggtgaggcctcacgtgcgtgtgtttctacaggtgtacatccgtgcatgtgtgtgtgtacatatgtgtgcgcatatgttgtgtgtgtgcatgtgtgtgcactcacatgtacatcttagctctctctgcagcctctggtttttctggccgtttcctcgctgagcgttacaaaggcagagtctctaagggaaactgaaacccgagttctcttccttcattttcatctcattaccagctggacacagcagccacacaggaaggaagctgggcagccagccggccatgtgtgtctgccgggtgccccacaccaggtcccctccacgtgtctgtcctgtgttctgggctggtagctggaggagcgggaagcactgactcctgaagaccctggcttcgctttcctgtgtccgttgggctgtccacttctaagactctctttgtcccccgctgccttccgtattcctcagcagatggacccgggtgaggatccagggcaagcagaggggctacagagcagtgagaagcaggtcatcactcaccatgggtcctgccttttctttctcatgtccttccagcatttcttctgaggccctgaagaagtatcaagtgggctttgacattgcggtggtgagagcgacccctcctcacctggagaactgggaaatgtggattctcagggaccgcgctgttcacgagctccaggctgtgctgctggccctggtcctggggcgctgagccgcatctgcaatagcacacttgcccggccacctgctgccgtgagcctttgctgctgaagcccctggggtcgcctctacctgatgaggatgtgcacccccattagggggctgctcatggcccttgcagtgatgtttgggacagcgatggcatttgcacccataccccggatcacctgggagcacagaggtgagtgacgaaacctgcaggggtgctgatggcctgggatggggacctcactgcctgggatgctgaggtgggtggctggggacgggacagggaccccacttcctgggatgctgaggcgggtggctgggaacgggacagggactccacttcctgagatgctgaggtgagtggctgaggacgggatggggaccccacttcctgggatgctgaggcgggtggctggggatgggatggggaccccacttcctggaatgctgaggcgggtggctggggacaggatggggactccacttcctgggatgctgaggcgggtggctgaggacgggatggggaccccacttcctgggatgctgaggtgagtggctgaggacgggacggggaccccacttcctgggatgctgaggtgggtggctggcgatgggatggggaccccaattcctgggatgctgaggcgggtgactggggatgggatggggactccacttcctgggatgctgaggcgggtggctgaggatgggatggggaccccacttcctgggatgctgaggtgagtggctgagaacgggacagggaccccacttcctgggatgctgaggtgggtggctgagaatgggacagggaccccacttcctgggatgctgcggtgggtggctggggacgggatggggaccccacttcctgggatgctgaggtgagtggctgaggtcgggatggggactccacttcctgggatgctgaggcgggtggctggggacgggatggggactccacttcctgggatgctgaggcaggtggctgaggatgctggcatgtgatctgttggattctctgctctgagaacttttgtctgagcagacaggcctactcagctgatctaagggagaggctgtgacaactgtagatactcagcaaggctcgtgcagacctcctgatttggtttctgaatctggggacccctgacaggaagcttccctccctcgtacctagtaatgttcgcggcgtgctgccaaagcacccgccccactgagcgtctgctccaggcgcctgagaagaacagtgaggcatcataaggatgctcgtcctacgtgcagctgagcctcatgccagctactttcctttcctgctgtttagtttttttttagttatttcttctcttggaggatgtgtctggggacccgggtttctgactcagtggattgagagcttacaccctgggtcctgagcaaggtgttgcttgcaggtggctgagagctgtcagcaatataggccattgttgtgctgagagagaggacctgctgcctgtgtgcatctctcttccacatgggaaaattagaacagaaagtatgaacacctgactctctttgttttttctcgaagtcagggtctggctctgttgcccaggctagagtgcagtgggacaatcatagcttactgcagcctcaatctcctggacacaagcagtcgtcccaccttggcctcccaaagtgctggggttacaggcgcccgccaccacacctggcccacctgactcttaaataaagcagactcttggtaatatgtaaaaagccaaggtcaaaatgctcaaattgttgtcaggacagttgaagaaacaggtcctaaaaaaaataatgctgatacatttatattattcttaagcagctattgctcaaatcttcattttcctaagtagctattgatacagtaacctaataagcaaagagacgtcacttgtttctctgtctataagtttgtggtggtgatcactgagaattgcattcgttgatggatatattctccaaaagaaattttgtgaagattttgaagtaaaacattcttttcctgaataagaaaatcctaagtcattgtattcctgtacacctaatctgtggatgacaaggcatgtagaccagagttgggtgggcagagggtgggagccatcacaggaagcatctggcagagcagggtttgggattctgggatctgagggagcaggaagggatgtccgactcacagcttcaaagtgagcacactggctccgggcttgagctctagggctgtgagtggttcccatgagcacacctgatggctacactgtgggtctggcgttgactgaggccacctccactgtagcagtgcctgttgcagcaacacatggccctcgagacatgactgcacccagacgtgctcattgtcactgagacagggacctaggatgtgctcaggtttaaaaatgcttccatcgctcttttcttcctcccactctgaccctgcccttgcatcccacagaggtgcacctggtgcagtttcatgagccagacatctacaactactcagccttgctgctgagcgaggacaaggacaccttgtacataggtgcccgggaggcggtcttcactgtgaacgcactcaacatctccgagaagcagcatgaggtacgtcctgggctcccctgcatgtccacatagcccagcttgagtgggcagcctctcctggccccactgtggggctgggggctgacttacctggagcctccattctgtagctgtgaccatgcagccccatctttgggtgtccaccagcagttcacccggggaccaccctctttgcttttttttttttgaactttttattatgaaaaaatctcaaacatacctatgagcagagacagctatgccatgagccctgtgcccactgcagcttatgcaaggccgggtgttcagtcttgcctacagtaccctccacctcctggggcattgaggcagatcccgacaccacattcttcatctgggtatctcttactggaaagggccccttgtcgtgcaaataatcaaaaatagcttctccaaaatttatatcatcatacattcagccagtgttcatatttcaccgactcttgtggatgatgcttgtttagttggttcaaacgtttagtttgaatcaggttgcaaccacgctgtcccaatccattgcagctggtcaccctgtccattcagtctccgcttctaggagccagcctcggtttccttcctgagaaagctactctgcacagcccatcccatgtcccactcttcacattgctcctgattcctcggtgtctttaaacattttaaaaaatcaaaccgaatttaaaatttgattgtagctcactgcagcctcaaactcctgggctcaagtgatcctcttgcctcagcctcctgagtagctgggactgtaagtatgtgccaccacacccagccccactcatggtgtctttagcatgcacctctgtcttcacatccccagctgggtgtcagatccaggctcatccctctcagggctgtgaggcgggcttctccatggaggcaggtgttcctcctcctcagtctcggtggcctttgaccagcgaagtctagatgctcttctcatcaaagattgcaaaacgcaatgttctgattctacctctccttctctacttgttagctggaaatcgtataaaaggggaagtgcccatcaccagctattttggtccgtagaggtcccatttcctttgggaaatgcagaatcgatgcttggaatctttgcctttatttaccagttttcagaataatgagttaatgagtcagtttcccctctgaagggcaagagtgagttttttgattgatttttagtgtcacaatgaagtcatagatttaaagatatttgctcttctttgacccatcacagtgaaacacctacctcatgctcaaatcgtcgcatccatggtcaacagcagcctgtttgggttggctcctgagacctcgcggtgtggggttagttttcttgctctctggaatctgttccaggttcacgctggacattttctgcccagatctctttttgttttcatctccagggtctagcttatttctcaatttctgtttgacacataaatgagctctgagcattatgctctgaaaacaagtatttggctgggtgctgtggctcacgcatgttatcctaacactgtgggaggtcgaggtaggcggattacttgagctcaagagtttgagaccagcctgggcaacatggcgaaaccctttctctacaaaaactgcaaaaaatagccaggtgtggtggctcaggtcttgggagtctgaggtgcttggaagtctgaagtgggaggatcacttgagcccaggaggtcgaggctgcagtgagctgagatcatgccactgcagtccagcctgggcaacagagcgagaccctgtctcaaaaaaacaaaaacaaagtattcagcactgtgaggcactctgagcagaaagatgtggtggtctcacctcactcagctcttactcttcgcgtgtctgttaaattctcttcctctgagcgccttcctgaccacacaggctcacactcggtcttgggggaattgtggacagtgtgtttgtgctggccccacaggtgttcagtgagagccagacattgctctgttaatgacaccatggtggtccctcggggttggggagaggcttggggacctcttatacttaaaagaaaaaaataaagagacccccgccaagcatcagtgaaaatccctgcaaacgtgatcaagagtctgttgaagtgtacgttcccttgtccttatgcatttcatgcgagttgacgaaatcatctgtactttaaatgctgaaggaagtggctattttaaatgagactctgttccgcttttgtgtgcccctatcaggacttccatttctatgaaatgacactcccttagtactgtgtctgcagcctgggtgctgttcaggaactcacagagttagttagaaacctaaagtggggttcctctcctcatactctccctcctagaagccctgtgtgcttcctaacctctgagtcctgacacctgctacaagccttttggtggagaaaaatacattgttactggtttcttttgcatcagttatggaacatcacagagagagggggcattttggggaaggtgaggcagagatagatatagaaaccttcccttttgtcttatgttgctttctattctgtgggggctttggagggcaaggggctaaggcccccaccccctggaagtttctgatcacgaattgtccctggtttgaaagaagaggtggtaggaacatggatcttactaagatggtgcctgagctgagctggtggtgttagttcatcacttcctcctgctgccaacatgcaagtttaaggaatcgtaaatctccctttctactgatacagtgaatattgtggcttttttttttaaactggactgtagagtcacttttttttttttttttttttttttttttgagacggagtcttactctgttgcccaggcacacgaggctggagtgcagtggtgcgatctcggcttactgcaaccttcgcctcccgggttcaagagattctcctgcctcagcctctcgagtagctgggattacaggcgcccgccaccactcccagataatttttgtatttttagtaaagatggagtttcaccatgttggccaggctggtctggaactcctgacctcaggtgatccgcctgcctcagcctcccaaagtgctgggatcacaggtgtgagccactgcgcccggcctgtagagtcactttgaatggatggaaaaaagcccactttgatgtttgaaaatacttatggtttaggtttttgaaaaataatttaattttctccactttcacgagtttgatttttgctgctgttttatggtgagtgatggaacttttggagctggtcttccagactccactggtttcaggataaggatcacagtgaggatgttcatgaaggccccaggctgctcccctgctctctgaacctcccttgcagtctgagaattgatcatctcaggagaaacctctaggctctaaactctatcatgtgcttttaaaattgtgcatttttatactagtatctctttaaaagaatatgcactgatatggactctatcccaacaggtgtattggaaggtctcagaagacaaaaaagcaaaatgtgcagaaaaggggaaatcaaaacaggtaaatttcttttgcaagctacaaagaatcccattcaagtatttcttggttgttttaatctactgaatgccagcatgcctgcagtgcaggccagccttttctccaggctctgttcattctgctgggcttggttttgttgtgatgcgtcttggagctcatccctctattcctgagtatcaggattgggtttctcaaagcaggtgccaaacatatttggcctttgagaaatacttttttaaagtttatatgaattgaatgtattcagatggcctgaaactttgactacagaacactggtgaatagtgaagcccactggtgaatagtgcagaaattcagggtttgttctgcttccttgcacccagaggccttaggcttggaggagttgctagtcatgcagtttttctcaaccccttcgttggacttgcgacagagatgccccatttattcggcctgctgtgctcaacctcttgcaggagggagcacatgagtgagcaagtgtgggatctggccagctgttttgggtgccagcaggagcaggctttgtgtgagccctgagggtggcacccaggttggggtgcctgtgacccccgcagccccagagggtgcgttacagtgctctcttatctctgctctccatggacagtggtgtgttataagctcagtgggccccttttctcattgtgtgggacagctgtcctctgccagtgagggcaaagggccagtatgacagccttttttgggtacacacactcagggtcctgagctcttgtccggcatccaagaagaatgaggttgcatggacacttaaaggatggtggagtcagagaattttgtttagtgttggaagtggctctcagcggagatgggagcttgagagggaacaggacgagcaaataatcttccctgaagtctggccagctctggccggctcttctccaaagttaagccatttctccaaaatccagccatccctctgaagtcaagtcacctctctctagtccagcaccttctcttctctatcaactgagtctgggctcttataggcacaggatgagggcagggtgggctgtgggtagtttcggaaaaggcaacatctgattgtaaaaagatgttcagaaagaaccaatcgggagacggcgggcaaacagggatagaagttctcactctgggctgcgggttttaggctttttggctcacatgtggggttttgccagggacctgcccctgtctgcctagactttctctggctcctttctctatcactgggacttttggattcttggcacacgtccgtccctttggtccctcaggcccctcagtgtggtactcattcagggagccctgggccgaatactcattcccgtctgcagctctaggttaccctcatcaccctctgagccatcatgtccctacctggcactgggcattcttcctcaatggtggtcaagacaagctgagttaaaggcaaaaaaagaaagaaaacccaaagaagtctatgctaaactttcttagcaaaatgctaaacacttgcactgaagtctttgtctctaaatccaaagttagattaggaaatgagaggaaaagcaggtggtgcagtgtagctccggtttccgggggtgtgcaggtgggttggggtgaatagtgaattacttccaaccagtctaaaaaagagaactctcctaatctgggataatttcagactatagcacatgtaacgcaagtacttttagcctaaaatagtgggttctgaaatggtatctttgttttcctgcttgggcctttctgatgccaagccgggctccaggctctcctagtgcagccactcccatgggggctggactgggaccctgggttgggtagacctagtgtcgctgttcctagttctgtgcaagttggaggcagggtggggtctccagaaacagagaggaaattctgtagggtggacacttctccaggcctggcaacagaacaagtggtccacgtacttagcaagagtaaaatatattgctttcaacagtgggtgtcccagtaagatttgaggtaagcattcattgagttttttttcagtcaccacatctttgctgagtatcaattagggactgaaacaaaatcctgtttggcacctgaacagcatgtggacactgcagagacacaattactcaggccagtttcagctttaggtttgcctaggggtggggttggggtctcagtgaaccttccactgtacgagaacaggccagtgtgtgaagaggagttgcagagggtctagatgacaagacaaggctgagaatgcacacatgcctcgttggcctggggccacctgtgagctggtgttggtgaatgtgggtctgtgcccctgagatgaacggcgtgagcagtttgaatagtggagggcatctgggctggacggttgctaatggtgcatttttcttccctgcagacagagtgcctcaactacatccgggtgctgcagccactcagcgccacttccctttacgtgtgtgggaccaacgcattccagccggcctgtgaccacctggtaaggctgatgggcacctccctgtgctcacgccagcctggtcagcagttaaagtagaagggggctcaaagcagacgtaaagctgtctccaccctaaaaaaaaataggattttctcagagccagctgcagaaaatgggggcagcttgtggcccctctgaaagtcttgcacagctgctgtcaggggcacacagcccacttggctcctctaagtttcggtgtccatggccaagggtgaggcctggggtgcagctcaaggtgctgggagcccttggtgctagtgcagagcatgccatggaggggcgtgctggaaagtacagacagcctgaacatggcattggggatgtgctgggaaggacaggtagcctgaacatgctatggggtgaggggacgtgctggaaaggacagacagcctggcagctctgggcatctgggtcaggtggaaaagtcaggacttgctcctggcttgtgtgttcttggttggtgcatctgtgctctggctgtgggacccacccttctggtcggctgtggtgtgcagcttgctcactgaaccactcctgggtccacccactcaggggcagcaggtcaagtgtgctgagcaccttgagaagcaagtccggcctctgtccctcaccggctcacatccttgactgcccagcctggtatccggcacctccccctgtgtgacggtcctttctatccagataatctgatgagcaatgtgatgatcatcagagagggagaagtagcattttaaataagtccatgtgaacatggaaaatgaagcacattttctactgtgtatccctggattttaatgagtcctgataaatgtaaaatatgccacagtgaaaagcatcatttgctagaaccctaaattaattggaattaaaatattttccaatcttgagtcagagataaatgacaagacaacgtatggcctcattagagacttgatgaggaagcctggtatttgcacacagacgtctggggtgagattcatagtaggggtctacccagctgcctgtaccacagatgctggcaacgaaacctgatagggggtgggggtgctttggggatagtaagaccctcagtcctcaaagacagtcgtttgtatttacttttgtgcagaaagtacggttggaccagaaacattttgcacaacaaaggatttttctggctaaactcaatcagaagcttaaagttctgtcatttaaacttacattctgtagataggttagctgttgaggttagaggatactgtatttggtttaaatttagacctataatttttcctaatttttttttttttttgagacggagtttcactcttgttgcccaggctggagtacagtgatgcgatctcggctcactgcaacctccatctcctgggttcaagcgattctcctgcctcagcctcccgagtagctggattacaggcatgtgccaccacgtctggctaattttgtatttttagtagagatggggtttctccatgttggtcaggctggtcttgaactcctgacctgaggtgatccacccgccttggcctcccaaagtgctggtattacaggcatgagccaccacgccccgtcaatttttcctaatatttttaataaaagttttcacagctgcagaaaagatgtatcacttgtatatcctggcaacctagattgcacaattgggagtgtgtgtgtgcacgtgtctgtgtgcctgtgcatgtctatgtgtccacatgtgtgtctgtgtacatatgtgtgcttgctgaactatgacccgtgactcccaaatgccttcacaggcatctcctaagaatagtaacattttcctatgtaacttcagttttatcattatatctaagaaaacgttcaatcattccccagcatcatccagtctccagtccccgttcagatttccccaacagccccgaaacctcctttcaaggtatgctaaatggtcacatccagtggggttcacattccctaacctaacaggtgaagagctgtgtgctgctttaactggcctttcaagggtgtcagctgcggccttccacgtggtctgagccttcctgctctgcttccgagagcgtgtttccagccagcctcctgcagcagaggtgctgggtgcccttgccccgccgtgggccctgcctgtcttcagcatgcccaggctgttggctgcaaagtggcatccccacgcgtgttctgtgtgctctctggttcccggcaggctcagcccctctctcgtctgtgctgtccagatgggtttcttctgtcacttgctggattttgcctgtttttctcctggatgccctttctcactcgtttgtccacacttctcacatgttcagggatggagacacctcatctgccattctgtaggcatttcccccagtttgtcacatatttaaccttgccgtattatttccccatgtggaactttccagttctctctgtggttggatctgtgcattgttttcctcatgtggctgtgggcactctggccaggtaaagagaggacccccagatggaaacgccagcccctgctctgttttagtacagtgcggttctgtttttagtattcagatggttgatccatctggagtgtgttttggtgggtggagcgacgtagagattctgcctgtttatgtttttctgcttcctatttattgggtcacctagctgcttagaatgccgtctttattgatgttaaaattctgctcatgggcttccgattacatactgagcacgtcctgtgttgggtttatcctggtggctttccagccctagagccatcagcgttgccatttccattttgcagatgagtaaattgagggtctgagatcttgagaagcttggccagggcaacggagcaagggcaccaaggtgctgatgtctagacctgagctgagcaacacaagccctggccctagtgggcgggactcctgtagctccacacctatctgctcggccctgttggtcttccgagaagagcaaatttgtaaaatgaagtggtacagagacacattgttactatagaaattcagccatctgatgatgtgctctctttttattcaattgtagaacttaacatcctttaagtttctggggaaaaatgaagatggcaaaggaagatgtccctttgacccagcacacagctacacatccgtcatggttggtgagtcctgcccctccagttccttcaccgtgaagattacagtggcatgttaattaccaaacaggatatttggatcttctctgaagtgctgtcttccttggctttgtttaaataggagctatccttacaaaaggcacatgtgactgcatagaccctttaacttttgaattcattgtttgcaaggataatagccgccatggtaaacgtcactttgtatccattgctggctcatgtcatttggataatccccgcgtgctgagcagatgctcctgtttgagagtaaggttttgactgagccacatgctgtctgcagtggtctctcacctctgagcaagtggtcatagcctggtgtgtacccactgttgcatctgccagcattttcctggatgtgggaattccttgctcatgtttacttattgccccatgactcttaaaatgcagctgaacatggagcatgaaattatccccatcaaagtgagagcacacctgtggtcctagctactcgggaggctcaggcgggaggacaggagtttgagaccagcctgggaaacagcaagaactcatctcaagccaggctcagtggctcatgcctcgatcacttgaggtcaggagttcaagaccagctggtcaacagggttaaaccccatctctaccaaaaaatgtaaaaattagccagacatggtggcgcgcacctgtagtccaagctgcttgggaggttgaggcaggagaattgcttgaactgggaggtggaggtggcagtgagccaagatcgcaccactgcactccagcctgggtgacagagtgagactctgtctcaaaacaaaacaaaaaaacctcatctcgaaaaagaaagaactagaagacacaggacaccccaaaagttgaggagactgtctttccctttccccaggcagggacttaattgggttataaaggaaaacaccgtgttgaatgtttgtcccagtgttggtgccatagcctgagaggttggttcccttttcctcttttcttctgggcccctgcagatggagaactttattcggggacgtcgtataattttttgggaagtgaacccatcatctcccgaaattcttcccacagtcctctgaggacagaatatgcaatcccttggctgaacggtaaggaagagcagtgcaccttagtgggaggtgcgtgtctcctcatgagtgcacacctgttgatctctccttttctgtctctgagccctgggggcccccgagcttgtgttagcccctgtttgtgggggatacttcccaaactgtccagcaatggccagagtcccagggcaccttgttgggtgttttcactggtaacagagtactgttttaagacagctccccactaaccccccaaaaatggatttgggagactctcataaaattgagaatctgatagtagatggtaaactaagactaatcagatggggacatggtataatttccagaatgatattaaagtgtggcaccaacactggtgtgggacctgcctccgggcccagcctctagtgcccggtcagatgggctctgggtgccttgttgctgccagcagcacatgtccgatgtccgtcttcaatgtgcaggaagaagctggtggctgttcatgggggcttttcttgtgggtgccagccagtagagccttgggttttgaacctcttgaccttagggcagatcccaagaccccagattcagggacagtcggccattcctcagggtggggcaggatctggtggttagagtttgtttatgtgaagcatgtgttgtttaaaccagcaaatgcatgccttacgtaggtctctgatgctggtaccatctggctccctgccttccagtcaggaggcccagcctcagttcttggggtgaacctgggtgggatgcactgcagaaccactgtcgggggcacctctctgaggccgaggaggtcggggtagggcaccatctgggctcagggctgtcatcatcctcagatcctggagtttctgtttggattgtggcatgtgcacactccagacatccttgcagggaagccctcaggcccccaaggtagtgttggccggcctcgtgacctcatgggtgcaggcagtcccccagctctgtgttctgggataatcactgtcctctctctgcagagcctagtttcgtgtttgctgacgtgatccgaaaaagcccagacagccccgacggcgaggatgacagggtctacttcttcttcacggaggtgtctgtggagtatgagtttgtgttcagggtgctgatcccacggatagcaagagtgtgcaaggtgagtgccaggcactctggcttcgcttggcccctgccatggcaatagtgtgcctggatgatgggtggctcctgaccttcgtctcaaatgtcactttccctagcactttattcccttgggcctcagatgcagctctcaatggatcttatttctgggggttgtggggactgagggagtgctggcccccatgtgtgacccattagcctcctcttctcaggaggttctttcttttaatgcaccctcttcaaacctctagcttataaaaagcaaggctttgtggaatgtattcaccagagtctgttggaatttcaccatttggctcttaatctacctaagagtgaaacattaaccgacagcttaagattaagaagagagaaccaatacagaagtttgtcaaaacacaaatctttaagtacattaaaaggggagggtgcctttaaaatgacacactgtaggcacagtgctcagcacaagagaatggcctatgggcttgattacaggaaatctcaaggttgctcagtggcagtttccaggaggtggattgtcaggcctcaggggagctgggggaaaccacatgaaacacagccgccatgtccctggccaggagctcatctcggagcaggtagccattcgtctctcatggaaattggtagatagttcttgcgtggccctttctcatgtagtcatgaccatcaggacatcagagaagcagggttcctttcatgcctatggcgcacaaaagtgggtgcctttgacaccgttcccttaacagccccttgcataaggaagaaggttgggtgatgtgcacacctgagtatccacctggtgctttgctccctgcccaggccttccgtagccagggctcactgaccagatcctccagctgccccccagccgtggctgccatgctcctgtcttgcagaccaggaaaccatcctatcaacagtatcagtgttgggggcaagccagtgccccttgagatggggagggtgctgcagggccagagctcctggcaggcgtgcacagtgctcagaatgctgtcagagcagcactggccaggggactcgagccctcccctgccatcgggaagccaaggatcagacttgccttgaccttgacttattacccagcactgagggtttgcagcaggatcagtgagcagattcagcgatgcacagagcagccacctccacccccgacaagtttctacaagtcttaggcacactgctgtcatcccctctgatcccttttttttccccatacttgtttgaactcctggactagggtggtttgagcttaggccccacagctcctgcctaccacgcaggcacacatgaacccttcacctgctgcccgtgacctgaaagccacatgagacccctgacgaaaaatgtgctagaaattattctttgctaaaacatcaaggaggaaaatgaagtccttttatcaaaaagagaatttgggctcctgtaatcacacagcagagatgaagggggaacattttccctgtgtccaaaataagtaaggctgcttctatttcatattcttctgcactcaggttttgtggtttcagtatttctctccagaccacacacagtcatgtgtagtttataattgtgtcttggtcatcggatccctgaaaagcgtttataaagaacttaggttcaaagcactttagcagatactttgggtagaaaggaagtgaaggatctattcctttaaagggaggaaggttcacacatttgcccaagacaggctgcagggccggtggctgtcccctggaaggaggctgccgccacttgccccacccagagcatgttcattgatgggccctatgtcaggaaagtcacacaatgccaggggccttggcagttggaagtgtgtgagcacggcagcacctctgcggttgcaggactgaatgctgggcacaggcaggcatggacgatcaaatgagctttcagtgagagggcttttgtccgttttgttttgtgtgttaacccaggagcgttctgggatccaagctggaacctggacgtggtgctgcgggccactcacataattgcggcatctgtctcctgttgcccgagctttgtttcagtcaggcacagccgcgctgtgctgggccatggaggggtgcacctctgaccttagtgcttgctcacaggggatccactctcggcccaccacgtcttcttgttggggttttagggggaccagggcggcctgaggaccttgcagaagaaatggacctccttcctgaaagcccgactcatctgctcccggccagacagcggcttggtcttcaatgtgctgcgggatgtcttcgtgctcaggtccccgggcctgaaggtgcctgtgttctatgcactcttcaccccacagctgtaagtgccctgggtggagtccccctccttgctcccttgatgccgccaggtggtcccgtcacctctttcccctccccaggaacaacgtggggctgtcggcagtgtgcgcctacaacctgtccacagccgaggaggtcttctcccacgggaagtacatgcagagcaccacagtggagcagtcccacaccaagtgggtgcgctataatggcccggtacccaagccgcggcctggagcggtgagctggggcactgggggcgggccgtgctttcccttcaaggcccagggcatggaatccagtacaggcactggggcctgctcatgggctgggtacctggccacgccaaggctctctgcattgggacagggacggccgatgagcacagctcatccttcttcccttttgcatgttacgtaacagccattgctacactattgcacaaacaagaaggctggggcagctgttttgcacaattaacattgcataacaattaggtctgtttcattttcagtttcttacagagaaacacatgattccttggcaaaggcctctgcactgtccactagtcaacaggagtcacattttttcctcctaaatatagtgaactttatgtagaaattgggaatttccaggccgattccttccctcacatggggaaatgggtgtgacaggcatgtgcacagccctctgtggggctgtgacctacatggggtgtcctggccctcagagttcactgcagcaccagctccctcccaagggcagctgtccctgacaccatcatggctccttctatgcatagcttcgtaaaatgtgttcactcatggtcacagattttggtttacacacatcagggagctagaacaggaaaaaagaatccctcaggctcttatgctattttaaattgtcctggttttagccatgtttagcattcttttcatgagaaagctgcaaatcagtgttctgttttttaatttcaaaagctcaataagtgtttttcacttacaaatagatacaaattccttccctgagtatgtatcgtgaatgcaattctgtcttgcagatgtgttttataactgtgtcctctgctggctggggagaggccacctttcctcatagtaaagttattcactgctaccctcatttcaaggcatgcattgtgtggtttccaggttttgcagccccccctgcgttggctgcttgtgtggaagcacccgttgcgtggtgggacacgagcacgttaacagcggggattttctccctgcagtgcatcgacagcgaggcacgggccgccaactacaccagctccttgaatttgccagacaagacgctgcagttcgttaaagaccaccctttgatggatgactcggtaaccccaatagacaacaggcccaggttaatcaagaaagatgtgaactacacccagatcgtggtggaccggacccaggccctggatgggactgtctatgatgtcatgtttgtcagcacaggtgggttccgagggcttggcaggcttgacagtgacagcacatctgtgtcctctggtaggaaaactgggaaatccaattattctttcgtgagtagttccattgcctccctcgaggtgacctgggaggtttgtgggagcgtaagaagatttctgagaagtcaccacaccaggtggctttcagatctgggaccaccaggctactggaggtacttgttaaaaataaaaatgcaagtcctggcctgtggctgggctgggctggggcagaggagtactggccgccgaggagttggggcagtgcccacgcagggggcaggtgtgagccacctgggaggaggcgtcagcctggcgtttcctgactgctggcagaggaccacgtccctgcttcctggccgaggagccaggttttagatgtgccctggcatgtggactctgaaataagcacttctggaacagggacaggggccaggagccacggtggctggcagcgcattgtggcctgcccttggagcctcccagccaacctcacatgccccctgtcctcaccgcctgcctagggcacttaccagtgacaccccgagggctggtggagcatgggagccccctcatgtggcacttagcctcaagtgtaatgtcgactgttggtgaggattcttggggtcaaccatggaacagtttattttccttggaaaaaaactggaataacccataacacttgggtttccagttgtctgttttgccaaagccttttcctttttttgtttctaatgcgaaatcatcattgttttctaagtatctgtggagggaatgacttgagagtgaagagtgtgaagtttgccgctgtggtcactgtccttggtttctgtgtctgggttagtgtcactgacctgtagctttggccctgcagaccggggagctctgcacaaagccatcagcctcgagcacgctgttcacatcatcgaggagacccagctcttccaggactttgagccagtccagaccctgctgctgtcttcaaagaaggtaaagtgacgcaggcagctggaccgggggcttctccgctcggtggctttgattctaggtgacaggagagttggcaagctggagtcgggctcctgggcaggcccctctgtctgtctgccctgggtgagccaaccttcagagtttgacacagagccattccgtgagctgtgggatctgaattggggaaggcaggaaggcagacctggggagacgggactttctcttcgaagttgctggaatgtcattgagttgttggtgcagctttacaggctgtggagaggtgggcactgctccatgaagacacctttttatgccctgagcttggggggtgtgcagactgcatctgtgggatatgatagtgatacagctgactcgtcaccgtggaaaatccacaagagaagtggttcgtctcatctgtaaagctgtctccacctgtggctgagactctggtctggcctgcaatactcccaagcagcccttggcaggggtgggtgggcgggcatccacgctggcctttagggggctgcctccctggccctggctcctaacgggacctccaaccaccttgtgggatccaggcccagtcagtcctctcctccctcagctgggagcaacaggcagaggaagagggcccctgtctggccgggtaagatacctacccttggcaggtgcgtatttgcaaacacccctccaggtcttctgtcctcttccctcccctgtatccacaaagcttgggagcctgggtccttttacgtggtcacctcccctctgctaatggagagttctccctcagatctgaaaggaaaagagaatgaaatagcctgagcaagttataagccactgggtactggcatctgttcaccagcctctcggtctccaggacacaaagggagccctggagatttgaagggtcgacgctttagccactgtggggcctcaccccagcctcgttgttgaaagaaggggacccagaagctcttctggggccatcgtgctgttcagtggcctcagccagactgggcaggcacctacaacatctctaaaatgtggacttctcattagaatgaagattgggcccctggtgtggacattcgtgagaatgacactctgttccaagggtcacttagggacccaggctggtggaggcttccagggcacatgggcactgatcctcaaaggcagaagggggtaggaagaggagggccgcacagagggggttacgggtcagtgcccacccgccatctcccagaactcggtcacatggccacaccagggcagctggccacacagggagcctcgcgcccaggaggaggagccagtgggtttggggaagcgcttgctggtcctactggaccacccgacccgcctgtctctgtaggagcctccattcgtggggacgtggcttagttgcctggacaagcggaaatacatcctgcctgccgtggggtcctgtgccttctccttgggcctcagtaggctccaggtgggggtggaaggcccagctccatggccatggcagcaggaagtggctgttcagtggtaaaaagactgtgccgcctgaccccatcaggctctctcacggtgatcagcaaatggagaaacggccagtaccacgccctccccctgtcctacagctggggaggtgcgctgtgcctccaccctcacctcctctcccctgatgacaagcatggggttttgctttttattttggtaaatacacatcagatgaaatttgccgtcttaaccatttttcattgtgcacgtcagtggcattaagaacattcacgttgttttgcagccattaccactgtctgtctgcagggtgcttttcatcttcccaaacagaagctttttacctgtgaaatacaaactcttcattttcccctcctccagccctgggcagccgccattctgctttctgtttctgtctgggtacctcatatgagtggaatcacacagtatttatccatttgtaactggcttatttcacttaacataaagtcctcaaggttcctccctgctgtagcaggggtcagggttttccaaggctacatactcctctgtcgtatgtgaataccgcattttgtgagtcccgcattttgtgtgtgcgttcatcccttgatggacacggttgctcccaccttctggcttctgtgaacagtgctgctgtgaacgtgggtgtgcagatacctcaagtccttgctttccattccttgggcgcacacagcagatgcggtttgctcggccctctctgagcccaccgagtaggctgtgtctgtattttcaccaggactccttgggatgctgagctacagctagcgtggcagagggcaaggaaggcacttagacagctcagttgcctctgatcacgtccaccgtcactccaacctgccctcggggtctgacgcgcacacacagcagcagagacagagatgggagcatgagagctgcctgcaaggggacaatcctcaggcccagggaaggcggagacagggggcgtcgaggggcaggagtgcacaggacaggcttgctctcagcgggcctcactcatgctgccaggtgcctggtcaggctttttttctttgcctttaaaaattttgtcttgaaataattttaaatttacagaagagttttgatgattgcacagaaggatcttgagcgcccccacctagctccacatgtccgatgtctcacatagccagtgtgcatttatctgagccaaggtgctgtcatggtgcagtgcgttacctgaaccccagaccctggaccctcctacctcccgcccaccacattcctggctcagcacctcaggttgcactggacactgcatctcctcggcttctgctctgttcctgcctccctgacctcagcactcctggagaggagtagtctggtgttttgtggtgtgtctggtgtattcttgtgattatcttggggtcgtggttttagggggagcaccaaagagggcgctttctggggatggggcatctgtatgactcgcaccagcgtgatgaccttggtcattctgtccaagtcaccaccgtctttttccatgtcgagtgtgtcggggcatgtagtccacactgggggtgggggagagtgagccccacctcccaggggagtcatgtgggaaacccccacagtcattcatgcttatttgtagggacagacttggaggctacagaaatgccctgttctcccacccactgacatccacattgaccagtgggtcctgcctgcagcagttacagctggctgtcctgacgaccagttcctccttccctgtcccctcttcccttccacagtcatcccttggtctctgtgtggcgtcgtttagtttttaaagcttagtttcatttgggctgcagcccagccccatccgggagaagcggaagctggggctgagtctcccgcagggtgcaggaggtggtctggatccccttgggacaggccttgccccccagagcccaccccaccctccacagctaccctcaagcctctctttggggtgaggagtcaggcgggccccacttggccacccagggcaccctgctctgcactgcatggtgttcacgccacctcgcaggtgccccctgcgggacccaacaggaccagctgtcccttggaagttacccagcttggctttgctgccagagaatgtttccgccacctccacaagccgcgcgatgcccgaactgtgatctgggatgtcatcctcaatccttcccacaaacgtggctcacacatggcctcatctgcccaggtctctgctgctgctgctgctgtgaggccagcggcgggccaggttccctctgctgtgtattatcacagtttccatccttgggggctttccctttctctcgtgggtctgtgtccgcacagctggatgtgtggcctggggcttcctgtattggcatcagggcctgtgatcttccaaccacactctgaagttgactccgagcgtatcctctgaggatgaaggtcgtgtttcatctgactgtaaaccactaagtcatgtgtaaatttgggaatcttgtattgttaaccaaaaggtgtccccaggctgttgaggcagatgccctgggcagaggctagagagcgcgctccacgggccacctccaggtctgttgcacgcccccgagcttcaggtgggtgcactgcatgtggggcaccctccttccagctgagttccgttcaaaagcagtcagcagccctggatgcctgtgtgctgggcactgctggtgccaggtgggctgatgggatggacctgaagctggtgtcactgggaaccaagtgtcccagaaggtgggagagtctcacctgccctctgctgtgggtgtggctgctctggagctcggaggttgacttcccgtctgtgagctcttcccttttacatatagataagtgaaaagcaaaaggcattgttccttttttatgttttgtatcacgatctcctcatcctttgcatgtcgtccgtttggcatccctgttatgttaggcctctgctggatccagaccctcacgagaggctccccgcccacaggtgctcacattctggctcgggggacgaggttgggcttcgaggtggtgtgcttcagcctctggctgcagccccttctcacctatagtgaggccgggaagatgaccgggagtgccaggctcatgcatcctctgctgcagggaggagatctggaggtggggactgaacagcctccccactggctaagagaaacacgtgcagagaagcgctttgctggagggcaggcacctgtgggtgcccagacaggggagagagggatttggacctaaggcccagtgagccctgacatagcacgtggattctgcaggaaggtcacagacctgccttgtttgcctctggttctgagtacctctcctccttactgcaatgtcccctgaaggtacactctggctgcttcccacacactggtgcagaagcagaggccatgctcctggatgcctgcttgcctgatgctagttcttctctgtctcatacacgcagggcaacaggtttgtctatgctggctctaactcgggcgtggtccaggccccgctggccttctgtgggaagcacggcacctgcgaggactgtgtgctggcgcgggacccctactgcgcctggagcccgcccacagcgacctgcgtggctctgcaccagaccgagagccccagcaggtatggggcgggatgcgctgcctggggatgtcccccatgtgtgtgggtgaataacacgtgccggttgttttgcaggggtttgattcaggagatgagcggcgatgcttctgtgtgcccgggtgagtgactcctcgacgtcccatttcctttgggagtggcgaggtcttgtagccatttcacggtgcttcagttctgtggcatttgtgtgtgttttgtttttctttctccactcggaacagaggtcaagtgttctgtagcagactcgtggtcttctctgtctttttttcttgccgaaagagtacttgaagccacttagagtgtatctgcttactgggaagcagtctccttccaaaaccatcctgttttctttctgcttagcttggggctcattaagcaaaacctaagcctgttataaatggggagaaaggagcccatgagtgattaatcctcaggcagtgtaagggctggggtggtgtttcccctggggctcccacctgggattcacccgcctgtggatgtctgaaatagcaccacacccagagggaggggtggcatcaggccagatgccccttccccagcagccaccttccagggtgctaaaggcagacttgaccctcagttctgtgtcttcctgaccctgacaagacagctgtcatcagactaagaaaggtttaggcagctgggcatggtggtacacgcctgtagtcccagctactagggaggctgaggcaggaggattgcttgtgcccaggggttcaaggctcagtgagcttatcatgccactgcactccagcctggggtgacaaagtgagacccagactctaaaaagaaaacaaaagctggccgggcacagtggctcatgcctgtaatcccagcattttgggagtctgaggcaagaggatcacttgagctcaggagttcgagactaccctgggcaacgtggtgagaccctgtctctacaaaaaatacaaaaattagccaggcctggaggtggtcacctgtagtcccagctactctggagactgaggtgggaagatcccttgagctgggggggttgaagctgcagtgagctgtgattgcaccactgcactccagcctgggcaacagagccagaccctgtttcaaaaaaaagaaaaaaaagaaaagtttaggcaggaggagagtgctgagatgcactgaaaggccagtcttccttgcagccattagcagaagcgtctcgtgtctgattcaaagagctgacactaggcacagaactggcctctgctcagcttccccagcctgacgcgttttcttctgggacacgggtgagaaatgggatttctgctgctcagagctgcctccaatttctttgtccccatgggctgtcatccagggctcatctttgctttttggtcacgcatgtctttatctccttagttgttctggaagattccatgttgctacagtgggtgaaactcttgcgtcatcttgtgggtattttaaagaagttgttaaatagcaaatggggattgttgacgctgtgcacgtttattttgatgttccagataaaagtaaaggaagttaccggcagcattttttcaagcacggtggcacagcggaactgaaatgctcccaaaaatccaacctggcccgggtcttttggaagttccagaatggcgtgttgaaggccgagagccccaagtacggtcttatgggcagaaaaaacttgctcatcttcaacttgtcagaaggagacagtggggtgtaccagtgcctgtcagaggagagggttaagaacaaaacggtcttccaagtggtcgccaagcacgtcctggaagtgaaggtggttccaaagcccgtagtggcccccaccttgtcagttgttcagacagaaggtagtaggattgccaccaaagtgttggtggcatccacccaagggtcttctcccccaaccccagccgtgcaggccacctcctccggggccatcacccttcctcccaagcctgcgcccaccggcacatcctgcgaaccaaagatcgtcatcaacacggtcccccagctccactcggagaaaaccatgtatcttaagtccagcgacaaccgcctcctcatgtccctcttcctcttcttctttgttctcttcctctgcctctttttctacaactgctataagggatacctgcccagacagtgcttgaaattccgctcggccctactaattgggaagaagaagcccaagtcagatttctgtgaccgtgagcagagcctgaaggagacgttagtagagccagggagcttctcccagcagaatggggagcaccccaagccagccctggacaccggctatgagaccgagcaagacaccatcaccagcaaagnnnnnnnnnnnnnnnnnnnnnnnnnnnnnnnnnnnnnnngacaagccctttgacgtcaagtgtgagctgaagttcgctgactcagacgcagatggagactgaggccggctgtgcatccccgctggtgcctcggctgcgacgtgtccaggccgtggagagttttgtgtttctcctgttcagtatccgagtctcgtgcagtgctgcgtaggttagcccgcatcgtgcagacaacctcagtcctcttgtctattttctcttgggttgagcctgtgacttggtttctctttgtccttttggaaaaatgacaagcattgcatcccagtcttgtgttccgaagtcagtcggagtacttgaagaaggcccacgggcggcacggagttcctgagccctttctgtagtgggggaaaggtggctggacctctgttggctgagaagagcatcccttcagcttcccctccccgtagcagccactaaaagattatttaattccagattggaaatgacattttagtttatcagattggtaacttatcgcctgttgtccagattggcacgaaccttttcttccacttaattatttttttaggattttgctttgattgtgtttatgtcatgggtcatttttttttagttacagaagcagttgtgttaatatttagaagaagatgtatatcttccagattttgttatatatttggcataaaatacggcttacgttgcttaagattctcagggataaacttccttttgctaaatgcattctttctgcttttagaaatgtagacataaacactccccggagcccactcaccttttttctttttctttttttttttttaactttattccttgagggaagcattgtttttggagagattttctttctgtacttcgttttacttttctttttttttaacttttactctctcgaagaagaggaccttcccacatccacgaggtgggttttgagcaagggaaggtagcctggatgagctgagtggagccaggctggcccagagctgagatgggagtgcggtacaatctggagcccacagctgtcggtcagaacctcctgtgagacagatggaaccttcacaagggcgcctttggttctctgaacatctcctttctcttcttgcttcaattgcatacccactgcctgcccagactttctatccagcctcactgagctgcccactactggaagggaactgggcctcggtggccggggccgcgagctgtgaccacagcaccctcaagcatacggcgctgttcctgccactgtcctgaagatgtgaatgggtggtacgatttcaacactggttaatttcacactccatctccccgctttgtaaatacccatcgggaagagactttttttccatggtgaagagcaataaactctggatgtttgtgcgcgtgtgtggacagtcttatcttccagcatgataggatttgaccattttggtgtaaacatttgtgttttataagatttaccttgtttttatttttctactttgaattgtatacatttggaaagtacccaaataaatgagaagcttctatccttgatttggggaagacattccttagcggaggctgtgcagcctcccgcccctgcatggcccaggcgggacagctgggctcgctcttttctgtccgtttcctgctgtgttttgccctctctggcctgtgacgtgctcctggcgacttcttcctcagtgccctctcttttctgtcctctctgtctcacagcctcgtctcctaagcccctccctcctcctggctcctcttccctgtcctgtctgggccatgtgggggacaggaggctttcctctccctggaccccctggccagcctcgggtgcggggcccgacagcagctcgagggtctccttgctgccgcccttcctgagtgaccaggcacagcacgtgcacgccctggggaacttctacctcttctgccaggccacaggtgagttgggccctctctgtcccctgtgccctgtccatctgtctcctcccacaggtggggggcgggcgggggcatcctccacatccctccacatgttcctttaccttccttatctgtcctggctgcgtccctcgggttgagccgtttcacgctttcattgtgggtccatcccgagggaaactgtagacagtgtgaagccacttctagtgtacaggggtcaaccagtgttttctgtaaagggctagatatttaggccttgtgggctgcaggctgtgtcacagccactaagctctgctgttgtattgtaaaaccagccatagtcaatacacaacgagtggtcagggctgtgtgccagtaaaactttatttataaaaatgcacggtgggccagatttgccccaaaggccccagtttcccaacctgtggtatataggattgcttctcccttaaaaaaaaaaaaaatttcaagagacagggtctccctctgtcaccaaggctggagtgcagtgacacaatcatagctcactgcagcccctgcctcctgggcttaagccatcctcctgcctcagcctccagagccagagtgcttctatttctgctaacaatttggaggttgatatacgtggtatttggaaattttaaaaaattaagagcttccagaatgggagttgttttaatgacttgcttcgtggtatttaaaagcggaaaagattggcgggcataatccccctgctttgggaggccaaggcaggaggattgcttgaagccaggagtttcacagcagcttgagcaacatagcgagacctgatctctacccaaaaatgtgaaaaaaactaaccaggcttggtggcacgtgccttgaggattgtttgagcccaggagtttgaggttacagtaaggtatgatggtgccactgcactccagcctagatcacagaacaagaccctgtctcaaaaatcatcatcattataaaaacagaaaagattgagagactagtgtactcctctgggacctggaggcatttgccctggattggaaaatactcggatgggatatctgctcttgaaagatagtagatgtccagaaccacacttcaaagatgtatcctgtgcttcaggcagtgcgtggtagccctggtggcccctgtgttgtcatctgactgatcagtagatacagaaagaaaggaagtggcctgttagagcctgccccgggggagggatgaagttaatgaagaggaaaagcaaacccaattgctctctttttaaacatgttaaacacactgtcagtagctcctgagagttttaaggtgctgccctctcctgttaaacaagctctgagagccccaggtggcccatgtctgctgaggccagaatgtcccttggcagccagnnnnnnnnnnnnnnnnnnnnnnnnnnnnnnnnnnnnnnnnnnnnnnnnnnnnnnnnnnnnnnnnnnnnnnnnnnnnnnnnnnnnncagccagcactggacaggagaagctgccggtgagcatggagcactgtggagacggagctttgctaggctggcttgtgtggttcctgccctccactgggtgctacggaccaagggctgtgctgagccccctgtggccgctctcacagctgaatggtgctcctcggccagctagtttgccttggtgcaggcatcccagaggacttcatgtctccatggagactgtgtcctgtcgcagcactggggtccttcaggcagactcaggaagctcctcctcggtggggaggctgggaagcgggcgggtctctatgaactggccgtggacccagggctcctttgcgggcagatgcaggcaggctgtatggtcaggcaatgttggttggttatttatttatttatttttgaggcagagtcttgctctgttgcccaggctggagtgcagtggcacgatcttggctcactgcaagcttcgcctcccaggatcaagcgatcctcctgcatcagcccccctagtagctgggattacaggcacacctcaccatgcccagctaatttttgtatttttagtagagacagggtttcgccatcttggccaggctggtctcaaactactgacctcaggggatccacctgccttggcctcccaaagtgctgggattacaggcatgagccaccatgcccggctgctgttacatttttaaatgtgaggctccaggtgtaccccctgtagctaggcaggcatacacacaagcccctggggtcagcagggaatgaaagatgggtgcccagggagaagggacatcactgttacagcaacagaaaccaccccagatatttcaaccacagggcatttaacacagggaattggttacaaaggtgatagaagggctgggaacagtgggaaggtgaggtttccattatcagccatgggcaggaagagtgaagtgtcaaacactcagtctcacttgctgtgccaccgaggctgtggccgtgtgatctgcagcctctccctgcccgccacactgccttcactgctggaggtcctacttgaagccacaaaaatgtttcttccttccaacttcctgtctcctgtcaatgactcccatggccagacctaacagaaagctggcggtcacagatggatatggggaatgtagctgtgggcttgcagcagtgtggccaggagtagtgtgtagagggtaggggagctgagggaggagggcagtcctttgccagtgctcaggatggactgaacagattgagaactgaggcccccagccctccgccacccccttttcacgtggtctttactttctctccagaggcatttggccccatctgggacattctcgttcacttgttccactgaggccacagcctgcgaaggctgtgagacctccccagggagcaccagcttaggagagagtggcttcagccttttcaagggtgggccgaggccagggcatcatgggcatgccgtgaactcagaggggctgtggctgtgaatttcccgagtaggctccagggttctgttggggtctgtagatgcttcctgcgacagaggccacagtgtgacttgcaagtcccagagactttcctgaggagagtgagtgccattttctgccttgtgggccaggaatgagccattccaggtgaggcccagagcctggagattgcaatacagtgcactcaaggcacaggcctaccgcttctgcctgtgtcctcccccagccacccagggcagggctgctttggaacttggctgggtttttctttgctataatggctgttttcgtggtagctgtcacagtggtttgggggctgtctgattaaagggctagcaaagtgtctttagaatatgaaacttaagaggacattcgtggcatcttcagttccccatgctgcgtcctggtgcctgtagctctgctgggtgaccctgtgtcttggggagcgtctcaccccccagagagggctgactgatggaaggtcagctggtcagggttgcacttggggactgggtctgccccagagctggtggaggcccatgtgtcacccaggagatgtccccacctgccccaacacttggccagtgctcagaaagtggccccagggacttggccatccaggagaggtgagggccctctgaggccaaagcgcttcctgaaaggggatcggggtgggtctgcacaggggaaaacatagcctgtggtgtgtgcagaggctgccagggcacaagggcccaacgtggggtgcggtggaggtgatgtggccacgtgggcggagtagggcggagaggcctgtgtcctggggatgcgagagcttgaggcctggtggtggggtggaggcccacccttgtcctgcacccaggggcctcagtgcccatccaagggagggacagggccacacctgtgggcctgtgtcaggagctggggtgggagattggccaccagtgccactctccacctagacacatttcatcccttctccaccacagttctcgcctctaggaagtggaattatcagtggaagatgatacggaaagatccactgatggccctggcacaggccagccttgtccctggggcaggatgggacggtcctgagaaggccctgggacaccctaggggtgtcatagtgggaactatgcctttgcagtgcccaggtgagacagcacatggtgtcaccccaagcatggtaccctgggctcagtgacaagaggggtgggcaggtcaggactgcactgccttggggcccgtgccctgggagccgctagccctatgatgcctgagtacctgggggactgagtgcatcggcagggcctggagcagtgggagtggccgannnnnnnnnnnnnnnnnnnnnnnnnnnnnnnnnnnnnnnnnnnnnnnnnnnnnnnnnnnnnnnnnnnnnnnnnnnnnnnnnnnnnnnnnnnnnnnnnnnnnnnnnnnnnnnnnnnnnnnnnnnnnnnnnnnnnnnnnnnnnnnnnnnnnnnnnnnnnnnnnnnnnnnnnnnnnnnnnnnnnnnnnnnnnnnnnnnnnnnnnnnnnnnnnnnnnnnnnnnnnnnnnnnnnnnnnnnnnnnnnnnnnnnnnnnnnnnnnnnnnnnnnnnnnnnnnnnnnnnnnnnnnnnnnnnnnnnnnnnnnnnnnnnnnnnnnnnnnnnnnnnnnnnnnnnnnnnnnnnnnnnnnnnnnaccaaacacaaccactcacacatgcaccacacacagcacagcatacaacacacatcacacacacaccaatcataccactgttacacacacaccaccacacatactgcacacaccaaagcacatacacaccacatagacacatgcacgctacccacaccacaccaatcacatccacacatacacaaccatacacacacacacacacattgttgacttaggatcgtttcaactcacagtgggtttattgggatgcagccccgtggcaagtggagcagcatgtgtattgacaaggggaggaaagccgtctggagctggtgaagtaaagttagcatgcagccgagctctgctcgtctgaactgatgaacccaagttcctcatggatcactcagaatacagatgggtgaaaaaataaccccaccacccgtgtgccagcacatagcgcatctggcatacaaacgtaaggatcaatagcgatgaatggcgatgggttgtgtctacatgcagatacaaatcatgcacttgtacattagtgtgcacacacagaaacagatcgatataattttttaaccaaagtgcagtctttaccctgtcagggccctgccttcacctctgccaggactatcttccatgtcaagtttagacccgtgtcattttcaaagctaataatggttcccccatactttaggcagcatttagatatttggatttgggatggccttttatgttttaactacagtgttagaaatcagagcccttggaaccactgggatcagagggcagcagcagaaggcgcccttggtcctctttgaggggcccagggctccggagagggcccccgttcctagcagccacagtggcctgttggcacgcatgtgtgtgttccagctgctctgtgacatttccctttgtttcagactcttgaaaggccacggccgtcgtgggaattagttgaccttgtgtgttgggccacccttgctggacaggacaaggtggtgctatcaactccctgtgctctgaggtccttcgcatgttagatgaggcagcttcaccagaaactatccatgtctcttctgttatctgggataattccacgtgcctttacaacacagctgtctggttacctggggtctggaaatgccctcggtgcctcagtggtgccttcccacaggccccccatgggagccaggcgatgcctacagatgcctcagtggtactttctcaggtccctttgcagagaagaggttcaggattcctgcccacattgataaggcggcttggccagtaagtggcaggcatgaacaggtgcattccagaagcgctggggctggtccagtgccctgagtggtctagagcataccagagtgaaacgttaggctgcgtcggcctggtgactgtcagggagatgaggactcagagaagggagctgtcagaattgctacctatgtggcaggggtctcactctctcctccctcctcttggggcccctggctactctgtgacttcaacagaggacagaaaggatgaccaacaaggcctcagggcatacccccagctgcactgtccttgtccccagaagggtccccagagtctgggagggaggaggggccatggccaggattagaaaagaccgtgccccaaggagagagcacagagatgggccagggaagcagtgggatcctcgggaaaagaggctgggagcaggtgtccgggtgaggcccgggcagcgggtacaggcagggacaagccaggagtcccatcatggaagacatgatggccagcggccagcactgtgtgcagagaatggcccctctggggatgtgcccgctgccccattagttgcaggaaggccacctggatgtgagtttgggagatgggctggccccgaggcagccagccctgaggtcagagtgggccacatgcatggggatgccgggaggacacagaggagtgctgcaggagatggcagtgggggcactttccaggatgggcccgagcaactcagtcactgggtggatgtctcaccacccctccaggccttcctcagggcgaggccactgcccagagggcacctggtttgtcgcagagtagaatcagctccatattttgtaatcacatccacgaagctctgaagccatggtggtcctggcaccagctggctccgttagaggcttggggtgggagtgagcaggtgggaggtgccccagtgacaggctgagtgctggagcccaggctgccaacagcctccccagactcctgagttgatgtaataaacccagccctggtgaataaacctggcccttgcttataccaaggtgatcagtcttctcacgacagtcctagctgtaggagaaagatcattacctacggcatctgccacagcagttaatttgccttcaacttaagctagttgcagtgacaggaagggccagggggaaatatctgtcctcaggacctctaccctagatccttgtaagccacaacaacttcccttctttgagggcgcgaccagtgtcacctggctcgccactgggaagagccaaggcacatccaggttggtggctgctgagccccacagcatcagaccagcctcttgtccccaccccacagaggccaagggggtgatctgggagtagcaccccagcctggccgctctcttgaggtaacagggttggatggttagggagcttggagcactggcccaagcaagaaaccagtggtgttttcaggaggccctgctgggagatggaagacagctccccactgggggcctaggattccaggagctccccagcagtcctccgtgggacatacgtgggtttgcacctgctgccctgtcccgctgagggtgcggtgctgatggggtggccctgcacactgatggtaactctcactttccctctctctcatgcattcagaaagagatggatagtttaaaaacgaatacatggaacgtaagtacttctttaacatctttaatgtcttatgatgatcaagcatgtatttaaatagtatttactgatgcctgttagcggtggtaagcacgtgtctgtttctgctcacaccccaagagtgtagagctttgagggttttgcagtcagtggtcccatgatggggcgttgggtgattaatccaatccagcttaggccacccagattcttagtctcaagggcttggtcatgagaaccttccagaggctcctgtgactcagtgactccagtcccctgggtggttcttggtgcaggtcacatgagggaggagaccgggcttttatagaactcacttcactgtctgttcaaagaaaagtgttacttgatcataacagctcaaaaaaatctgtttcttaaaatgagattttacctggatgcccatcagctgggaaagggaatatctattccccagttgatgggcacctagatgtacatagagacatatgtttgtacatctatgtaatatgtacttatatttgtagatagatacatggaattatctgtggccagagtccaaaacattttgagtgggaaaaaacaaattatagagtgttaagttttgtttttttttaaattctgcacaaaaaccaaacctgttcacaagggcttgtccaccaggccagggccagatgggccgccaggcaaaacagttttggagcaccttctgaatttccttgagtttacagaatgtttccttcaaagtaacacttttataaaaaattattattataaaagcaatgcttgtttgttataagtttggaaactccagggaagtataaagaaaaaatttaaacaatcccaaatttaaccatccagaggtagttaccaccagcatcccggccatttttgggccatgactatctacgttcacacatgtatacatgggtgtgtacatatatgcacacattcctagatattgtttcacttatttttctgtgttgctgaatattcttcgatggcacttcgaatgagtgacttgtggccccctccttggacatttcccaactcctcactgatagaaacagggcttcactgggcccatccttgcctcgggactcattcctaggactgcccagctaaagggtctgagcttggtcaagtccttgggaggagcattctctggtgatcctggacagtggggaattgttgaccaagagaccggacaaagatgagcagatgccacagtcagtaaagcagggaaaatgcattactaaagtcagcttcattaaactggcgatcgcttcttttcaaaagtccagcatgtgccacagaaatggaaagctctctggccactactgtcctgcccagggaggggagcgtgggtccacccacaccatttaatacctgtaactggatgcacctctgcccctacacctgagaacaaggccagtttttgtgtgtgcaggtactttggactcttttggctctggaatttgttttacctgctcagtgttctgaactccttccttttcactactaagcattctccatgaagccacacttcattttgtcattgtgagggtgatgggcatctagggcaaatctaannnnnnnnnnnnnnnnnnnnnnnnnnnnnnnnnnnnnnnnnnnnnnnnnnnnnnnnnnnnnnnnnnnnnaccaattcttacgaggtgtcatggtcaagcagaggccatggccggcactggtctaggtggcccatggcccatttgggggccttggtgggcctcgaggaagggcaggtgctggtcagggagccgggtcgctaggcagcaggtgggtgtcaccccagtccacgctgctggggtgcctggcctgatgcaggctgtgcctgagggagacagaagcagcagagtaggctggccggcctccccagccccaccacaagcaggagcttcagagacagaaggagcacctgcaccccctcacctgccctccagggcctggcctggccctcccagctcaactccag

SEQ ID NO: 167 - DNA, 4157 bp, Homo sapiens
ctgagccgcatctgcaatagcacacttgcccggccacctgctgccgtgagcctttgctgctgaagcccctggggtcgcctctacctgatgaggatgtgcacccccattagggggctgctcatggcccttgcagtgatgtttgggacagcgatggcatttgcacccataccccggatcacctgggagcacagagaggtgcacctggtgcagtttcatgagccagacatctacaactactcagccttgctgctgagcgaggacaaggacaccttgtacataggtgcccgggaggcggtcttcgctgtgaacgcactcaacatctccgagaagcagcatgaggtgtattggaaggtctcagaagacaaaaaagcaaaatgtgcagaaaaggggaaatcaaaacagacagagtgcctcaactacatccgggtgctgcagccactcagcgccacttccctttacgtgtgtgggaccaacgcattccagccggcctgtgaccacctgaacttaacatcctttaagtttctggggaaaaatgaagatggcaaaggaagatgtccctttgacccagcacacagctacacatccgtcatggttgatggagaactttattcggggacgtcgtataattttttgggaagtgaacccatcatctcccgaaattcttcccacagtcctctgaggacagaatatgcaatcccttggctgaacgagcctagtttcgtgtttgctgacgtgatccgaaaaagcccagacagccccgacggcgaggatgacagggtctacttcttcttcacggaggtgtctgtggagtatgagtttgtgttcagggtgctgatcccacggatagcaagagtgtgcaagggggaccagggcggcctgaggaccttgcagaagaaatggacctccttcctgaaagcccgactcatctgctcccggccagacagcggcttggtcttcaatgtgctgcgggatgtcttcgtgctcaggtccccgggcctgaaggtgcctgtgttctatgcactcttcaccccacagctgaacaacgtggggctgtcggcagtgtgcgcctacaacctgtccacagccgaggaggtcttctcccacgggaagtacatgcagagcaccacagtggagcagtcccacaccaagtgggtgcgctataatggcccggtacccaagccgcggcctggagcgtgcatcgacagcgaggcacgggccgccaactacaccagctccttgaatttgccagacaagacgctgcagttcgttaaagaccaccctttgatggatgactcggtaaccccaatagacaacaggcccaggttaatcaagaaagatgtgaactacacccagatcgtggtggaccggacccaggccctggatgggactgtctatgatgtcatgtttgtcagcacagaccggggagctctgcacaaagccatcagcctcgagcacgctgttcacatcatcgaggagacccagctcttccaggactttgagccagtccagaccctgctgctgtcttcaaagaagggcaacaggtttgtctatgctggctctaactcgggcgtggtccaggccccgctggccttctgtgggaagcacggcacctgcgaggactgtgtgctggcgcgggacccctactgcgcctggagcccgcccacagcgacctgcgtggctctgcaccagaccgagagccccagcaggggtttgattcaggagatgagcggcgatgcttctgtgtgcccggataaaagtaaaggaagttaccggcagcattttttcaagcacggtggcacagcggaactgaaatgctcccaaaaatccaacctggcccgggtcttttggaagttccagaatggcgtgttgaaggccgagagccccaagtacggtcttatgggcagaaaaaacttgctcatcttcaacttgtcagaaggagacagtggggtgtaccagtgcctgtcagaggagagggttaagaacaaaacggtcttccaagtggtcgccaagcacgtcctggaagtgaaggtggttccaaagcccgtagtggcccccaccttgtcagttgttcagacagaaggtagtaggattgccaccaaagtgttggtggcatccacccaagggtcttctcccccaaccccagccgtgcaggccacctcctccggggccatcacccttcctcccaagcctgcgcccaccggcacatcctgcgaaccaaagatcgtcatcaacacggtcccccagctccactcggagaaaaccatgtatcttaagtccagcgacaaccgcctcctcatgtccctcttcctcttcttctttgttctcttcctctgcctctttttctacaactgctataagggatacctgcccagacagtgcttgaaattccgctcggccctactaattgggaagaagaagcccaagtcagatttctgtgaccgtgagcagagcctgaaggagacgttagtagagccagggagcttctcccagcagaatggggagcaccccaagccagccctggacaccggctatgagaccgagcaagacaccatcaccagcaaagtccccacggatagggaggactcacagaggatcgacgacctttctgccagggacaagccctttgacgtcaagtgtgagctgaagttcgctgactcagacgcagatggagactgaggccggctgtgcatccccgctggtgcctcggctgcgacgtgtccaggcgtggagagttttgtgtttctcctgttcagtatccgagtctcgtgcagtgctgcgtaggttagcccgcatcgtgcagacaacctcagtcctcttgtctattttctcttgggttgagcctgtgacttggtttctctttgtccttttggaaaaatgacaagcattgcatcccagtcttgtgttccgaagtcagtcggagtacttgaagaaggcccacgggcggcacggagttcctgagccctttctgtagtgggggaaaggtggctggacctctgttggctgagaagagcatcccttcagcttcccctccccgtagcagccactaaaagattatttaattccagattggaaatgacattttagtttatcagattggtaacttatcgcctgttgtccagattggcacgaaccttttcttccacttaattatttttttaggattttgctttgattgtgtttatgtcatgggtcatttttttttagttacagaagcagttgtgttaatatttagaagaagatgtatatcttccagattttgttatatatttggcataaaatacggcttacgttgcttaagattctcagggataaacttccttttgctaaatgcattctttctgcttttagaaatgtagacataaacactccccggagcccactcaccttttttctttttctttttttttttttaactttattccttgagggaagcattgtttttggagagattttctttctgtacttcgttttacttttctttttttttaacttttactctctcgaagaagaggaccttcccacatccacgaggtgggttttgagcaagggaaggtagcctggatgagctgagtggagccaggctggcccagagctgagatgggagtgcggtacaatctggagcccacagctgtcggtcagaacctcctgtgagacagatggaaccttcacaagggcgcctttggttctctgaacatctcctttctcttcttgcttcaattgcttacccactgcctgcccagactttctatccagcctcactgagctgcccactactggaagggaactgggcctcggtggccggggccgcgagctgtgaccacagcaccctcaagcatacggcgctgttcctgccactgtcctgaagatgtgaatgggtggtacgatttcaacactggttaatttcacactccatctccccgctttgtaaatacccatcgggaagagactttttttccatggtgaagagcaataaactctggatgtttgtgcgcgtgtgtggacagtcttatcttccagcatgataggatttgaccattttggtgtaaacatttgtgttttataagatttaccttgtttttatttttctactttgaattgtatacatttggaaagtacccaaataaatgagaagcttctatccttaaaaaaaaaaaaaa

SEQ ID NO: 168 - DNA, 2589 bp, Homo sapiens
atgaggatgtgcacccccattagggggctgctcatggcccttgcagtgatgtttgggacagcgatggcatttgcacccataccccggatcacctgggagcacagagaggtgcacctggtgcagtttcatgagccagacatctacaactactcagccttgctgctgagcgaggacaaggacaccttgtacataggtgcccgggaggcggtcttcgctgtgaacgcactcaacatctccgagaagcagcatgaggtgtattggaaggtctcagaagacaaaaaagcaaaatgtgcagaaaaggggaaatcaaaacagacagagtgcctcaactacatccgggtgctgcagccactcagcgccacttccctttacgtgtgtgggaccaacgcattccagccggcctgtgaccacctgaacttaacatcctttaagtttctggggaaaaatgaagatggcaaaggaagatgtccctttgacccagcacacagctacacatccgtcatggttgatggagaactttattcggggacgtcgtataattttttgggaagtgaacccatcatctcccgaaattcttcccacagtcctctgaggacagaatatgcaatcccttggctgaacgagcctagtttcgtgtttgctgacgtgatccgaaaaagcccagacagccccgacggcgaggatgacagggtctacttcttcttcacggaggtgtctgtggagtatgagtttgtgttcagggtgctgatcccacggatagcaagagtgtgcaagggggaccagggcggcctgaggaccttgcagaagaaatggacctccttcctgaaagcccgactcatctgctcccggccagacagcggcttggtcttcaatgtgctgcgggatgtcttcgtgctcaggtccccgggcctgaaggtgcctgtgttctatgcactcttcaccccacagctgaacaacgtggggctgtcggcagtgtgcgcctacaacctgtccacagccgaggaggtcttctcccacgggaagtacatgcagagcaccacagtggagcagtcccacaccaagtgggtgcgctataatggcccggtacccaagccgcggcctggagcgtgcatcgacagcgaggcacgggccgccaactacaccagctccttgaatttgccagacaagacgctgcagttcgttaaagaccaccctttgatggatgactcggtaaccccaatagacaacaggcccaggttaatcaagaaagatgtgaactacacccagatcgtggtggaccggacccaggccctggatgggactgtctatgatgtcatgtttgtcagcacagaccggggagctctgcacaaagccatcagcctcgagcacgctgttcacatcatcgaggagacccagctcttccaggactttgagccagtccagaccctgctgctgtcttcaaagaagggcaacaggtttgtctatgctggctctaactcgggcgtggtccaggccccgctggccttctgtgggaagcacggcacctgcgaggactgtgtgctggcgcgggacccctactgcgcctggagcccgcccacagcgacctgcgtggctctgcaccagaccgagagccccagcaggggtttgattcaggagatgagcggcgatgcttctgtgtgcccggataaaagtaaaggaagttaccggcagcattttttcaagcacggtggcacagcggaactgaaatgctcccaaaaatccaacctggcccgggtcttttggaagttccagaatggcgtgttgaaggccgagagccccaagtacggtcttatgggcagaaaaaacttgctcatcttcaacttgtcagaaggagacagtggggtgtaccagtgcctgtcagaggagagggttaagaacaaaacggtcttccaagtggtcgccaagcacgtcctggaagtgaaggtggttccaaagcccgtagtggcccccaccttgtcagttgttcagacagaaggtagtaggattgccaccaaagtgttggtggcatccacccaagggtcttctcccccaaccccagccgtgcaggccacctcctccggggccatcacccttcctcccaagcctgcgcccaccggcacatcctgcgaaccaaagatcgtcatcaacacggtcccccagctccactcggagaaaaccatgtatcttaagtccagcgacaaccgcctcctcatgtccctcttcctcttcttctttgttctcttcctctgcctctttttctacaactgctataagggatacctgcccagacagtgcttgaaattccgctcggccctactaattgggaagaagaagcccaagtcagatttctgtgaccgtgagcagagcctgaaggagacgttagtagagccagggagcttctcccagcagaatggggagcaccccaagccagccctggacaccggctatgagaccgagcaagacaccatcaccagcaaagtccccacggatagggaggactcacagaggatcgacgacctttctgccagggacaagccctttgacgtcaagtgtgagctgaagttcgctgactcagacgcagatggagactga

SEQ ID NO: 169 - DNA, 39444 bp, Mus musculus
  misc_feature (4104)..(4533): "n" at positions 4104 to 4533 can be any base
  misc_feature (7246)..(9732): "n" at positions 7246 to 9732 can be any base
  misc_feature (15145)..(15421): "n" at positions 15145 to 15421 can be any base
  misc_feature (22129)..(22148): "n" at positions 22129 to 22148 can be any base
agggaggcagagcaggtgaatctctgagttcaagcacagcctggtcccgacagccagggctttatagagaaaccctgttacaaaacaaaaacaaatatgtatcaatttagagagggtctaacataactagtgtggttttgctctctcgggatggacaattctgctcttgggtaaagtgagaaactaaaggcagcctagaggaaaatgttttgcactctgtgttccaagctaggatctgggaggaggacggctccatagagagcgtgttagagaaatgtctttgcgaagctgtgtgggttttgttagccaagcagtgcggtgatgggccataagccaaacagtcgtgtcaggacagtaatggatctattcagcaaagcaagtcacactactagaagccctcattgttggtcaccagatatggtgacacacatgtttactcctagcattcaggtgacagaggtaggtagatctctgtgagcctgaggctagcctgctctacatggcgaactccaaggcagccaaggtttttgtaagtaagactctatctcaaaatacaaaataacgcccccacccccaccccaagaaactgttggtcttttatagagaatccttgctcactcaaacagctttcagcataagaatattcaaaattaattggcaagcgctgccaccatgggtgtccctaattacacataccttgtcatatttacgagtgtgatgaacttttagcccgtgtcacatacactgatagccatctccatagtgacatgtatttagatcacattacagtcacgactcatagtttgtttttttaaaatgctcttaaaaattcgactaaaacaaaaataaaataaaataaaacaaaacaaagtcaacgcaagctttcctttcctaaagtctctgctgtgcccgcagtttagacagagtttctgtcttctgactgcgctcactccacaccagccaagtcctggtcccagtgaaccaatgttctgtctaagcagaagacgctggagtagacaagccttcttttcatagactagcaaactacattcctttcagccttaggtctgatggaggaaatcattcacgtcaggaaagaagtaaggctttcaaaacagcacacagaactttactgaacctttaataaaaacataggactaaaaattacattcttttttaaaaattaggacaaattttaatatacatttatcttatgtgtgtgtacgtgtatgtgcgcatatgtatatatgtgtgtgtatgtatatgtctatatacatttatcttgtgtgtgtacgtgtatgtgtgcatatgtatatgtgtgtgtgtgtgtgtgtgtatttctctgtgtatatatgtatgtatgtgtgtgcatgtatggatatgtctgtatgtgtttgtgtgtatgtatgtgtgtaatgtgtgtatgtatgtatatgtctgtatgtatgtgtgtgtatgtgtgtatgtatgtgtatgtctatatgtgttcctgtgtgtgtatgtgtgtttgtgtgtatgtgcatgtgcatgtgtgtgtatgtgcatgctcaaagcaatcatgtggcagtcagaggaaaacttgcaagagttaggctccccttcaactatccaagctctgagggtcagacttgggttgtcaggtttggcaacaagtacctttacttactaagccattgtgctggccctgaatgaggacagatttaaacaaaaagattaactaggcaaactaaatgatacctggaatagtcagatgtccgggcaccttaaattagaagttgaagcaagagaagggactccaaatgtgccttttggtgcctctctctggctcatagcaatcctttgccacatatttattcattgatagggtctcactgtagaccctcttacagagagcaggctagcttcggaccttcagcagttaagaatcctaagtagtgatttaagtgagaaacatccctcataggctcatgtccccaatggctggtgctgtttgggaagtgtttaggaggtacggccttgctgggggaagtccatctctgcggagggatggcctttgagggcttgtagccccaccctactctctcttggctctctctgcttcctgtgtgctattgagatatgattccttctgcttcttactcctgccgccatgtcttcccaaccagtgtggacagccagccctctggaaatgttaagctaaaatataatattttaaattgcctttggtcatgttattttatcacagaaaaaacaaagtagaaattaatacactgatcctcctgcgtctgcctcccaagtgttgggattactggcttgtgtcaccatatcagctcatctttatgaatctctgatttttgttttcagtacaagggttgaagctagggcctcacaagcagtagctatgctctctcccattgggctgtgtttccaactccatattttttgttattgttgttgtttttgttttttgtttttcgaggcagggtttttctgtatagccctggctgtcctggaactcactttgtagaccaggctggccttgaacagaaatccacctgcctctgcctcccgagtgctgggattaaaggcatgcgccaccacgcccagctccaaccccatattattaaccccactgattcaatcattcatcattcatcattcattcattcatttgacttttctataatgttttataagaagctgcatcatttcttccttccaggcctctctctctctcaagccaggctcacaccatagatcttggtggcagaaggtcttgtccaaagactgcgagtcacacctgtagtgaatcccaaagccccttgaagccatgacatcatccagcccaacatctgtatgctgacatctaatcagtcaacatgctgggacatcttcaccaataagtactgtaaaagaacagaaagtcttttaaataaatgtaaaagatggatatttaagggaggaggggcaggagagatagctcagcggttaagagccctgactgctcttccaacagtcctgagtttaattcccagcaaccacatggtggctcacaactatctgtaatgggatccgatgccatcctctggtgtgtctgaagacagcgatggtgtacccacatacatgaaataaatggataaataagtaggctgggatgcagccccggtgatagatgcctgcctactgtgcacgaagccctgggctcattccctcgctacacataaagtctgtggtggtggcgcattcctgaaatctcagcaccagggagctcaccgttgtcctcagctacacggcaagcttgaggctggtctgggcactgtaggagccttgtctgactgaaaagttataaaaataacttttcaattaaataaacatgcagggaaaaaagtcaaaattcttcacttaaacaaagctaccaatggagatggataaactgctcagtgactagaaacatctctcctcttgtataagggcccaagtcgagcacacacacacacacacacacacacacacacacccttgaaaataataatggtatcatggtgacacacacctttaatcccagcagtcgggatgcagaggcaggtgaatatctatgttcaaggcaagcctggctttcacagtgagttccaagataaccagaattacatggtaatagcctgtctcaaaaaaaaaatagcagactttattaatatacatatatatgtatatgtgtatgtgtgtgtgtgtgtgtgtgtgtgtgtgtgtgtgtgtatgtgtgtgtgtgtgtgtgtgtatgtatgtttgtcttcacagtgccctcaatccacatgtacttcacaagaatgtgtgtggtgccgtgcttgccgtgcacagacaggggctgtgctcaccgtgtgcaggggccagccaacctaacaggcaagtttactagcttcaagctgcttccaacagaagtgttcaaactccctttctaacgatgtatttctaagctgtgtgtgtggtggtgcacaccttttttcccagcactctggaggcagaggcagacagatctctgtgagtttgaggccagcctgatctacagattagtacagtgaaactggagtcagtggtggctgtgggtgnnnnnnnnnnnnnnnnnnnnnnnnnnnnnnnnnnnnnnnnnnnnnnnnnnnnnnnnnnnnnnnnnnnnnnnnnnnnnnnnnnnnnnnnnnnnnnnnnnnnnnnnnnnnnnnnnnnnnnnnnnnnnnnnnnnnnnnnnnnnnnnnnnnnnnnnnnnnnnnnnnnnnnnnnnnnnnnnnnnnnnnnnnnnnnnnnnnnnnnnnnnnnnnnnnnnnnnnnnnnnnnnnnnnnnnnnnnnnnnnnnnnnnnnnnnnnnnnnnnnnnnnnnnnnnnnnnnnnnnnnnnnnnnnnnnnnnnnnnnnnnnnnnnnnnnnnnnnnnnnnnnnnnnnnnnnnnnnnnnnnnnnnnnnnnnnnnnnnnnnnnnnnnnnnnnnnnnnnnnnnnnnnnnnnnnnnnnnnnnnnnnnnnnnnnnnnnnnnnnnnnnnnnnnnntaggcgctaccatttaaccacccctccagctccttgtccatttggtcttttttttttttttttttttttttttttttgggtttccgagaacagggtttctctgtatagccctggctgtcctggaactcactttgtagaaccaggctggcctcgaactcaaaaatccgcctgcctctgcctccaaagtgctgggattaaaggcgtgcgccaccacgcctggctcatttggtcttttattcactagtctacaatgacttacttattgattgggtcaagcactcattaaaatgctagaattacatgaatgaactaatgaagttaactcgtcgagagtttctcaactaatatgtgttcaatccatggtcctttttcttatttccttcttatagcactgggatcaagcccagggacttgcccatgctagttagatgctaagctacagtctcagcccaaaacactaagctatgttcccaattctttactctgtcagcagcatggattaagagcgctctgcaaggctcttaggagggtttctgtgagtttgagacctgcctgggtatactggggctacatagtgagaccctatagcaaaaaaaagggggggggaatgttaaagggtaaacaacaaaacagaaagcaagtcctgcatgcagcacgctgtaccacgcccagaaaagtagaaggggtgctcttggtttactgaccagaacaaagccacacactaaacggctacatgatgacacatgagagatgacactgactgtaccatatgctgtgactctgactcaccaaaggaacatgactcataatgtcttcatccaattgttcatcagccaggctgctctctctctgtctctgtctgtctctctctctctctctgtctctgtctgtctctctctgtctgtctctctctctctgtctctctctctctctctctctctctctctgtttgtctctctctttctttggtttttcaagacagggtttctctgtgtagccctggctgtcctggaactcactctgtagaccaggctggcctcaaactcagaaatccgcctgcttctgcctgctgggattataggcgtgcaccacaactgcctggttcagtctggtctcttaagaatccagttttgttttgttttgtttttaagatttatttacttattttatgtatgcaaatacaccatcattcttttcagacacaccagaaaaggccatcagatcccattatagatggttgtgagccaccatgtggttgctaggatttgaactcaggacctctggaagagcagttggtggtcttaactgctgagccatctctccagcctccaagaacccagtttcttttcttcaaatgcctcattgcagtttgttattggatagcaatagagagtcagtttctcccttccaacacttcaagcttaaaagatcatatgtacatatgttgatcagcctatcatccccccaaaatataagcagtatatttgaccatggccaaattccatttcaaagtatgtccttcctggttaggcttgcagtagccattcaggaaactagatgaggggtgtacttattacaggccacataggctctatgtagtcataaccagacaagtgactgccgtcatgtttacagaataaagctctagttcagactctcttaactttcaactatgagccgggcgtggtggcatactcctttaatcccagcactcgggaggcagaggcaggcagatttctgagttcgaggccagcctggtctacagagtgagtttcaggacagccagggctacacagagaaaccctgtcttgaaaaaccaaaaaaaaaaaaaaaaaaaaaaaaccaaaaaaacctttcaactatgaaaaccaaactatgatgaaaaccaaaggtgatttttaaagccaactgccatttaataataaataatattcatgcctttatgcgatgcgttagggtttaagcctttaaatagcatagatctgaccagacatgtttaagaaatgtcaacagagcctggtgatggtgctcacctttgacagaggcaggcagatctctgagttcgaggccagcctggtctatagagtttccaggatgtcgagggatacaaaggagaaactctgtctcagaaaacaaacaagagaaaagtgaggggagacaatgactattgtcattcaggcgttattttttttaatcacacggacttacttttgaaatcacataaggtccccaggcttgggaacaaaccgctagtcaggctttgctgggttttagatggactcacaactttctaaatctaaacctactaacaaagaaactacacacttcctctcacaaagtcattttacaaccaaagtctctctctctctctcttcccacttcctccctctcccctctccccttttgagacagttctcattgtgtgacccaggctgtgaactcccaggttcaagcaatactcctgagtagctaggaagacaggtgtgcactgccatgccagctttctgtttgagtactggtttgtttgtttgtttgttttaaagatttatttattatgtatacatcgttctgcctgcatgtatgcctgcaggccagaagagggcgtcaggtcttatcacagatggttgtgagccatcatgtggttgctgggaattgaactcaggacccctggaagagcagtcagtgctcttaaccgctgagccatctctccagnnnnnnnnnnnnnnnnnnnnnnnnnnnnnnnnnnnnnnnnnnnnnnnnnnnnnnnnnnnnnnnnnnnnnnnnnnnnnnnnnnnnnnnnnnnnnnnnnnnnnnnnnnnnnnnnnnnnnnnnnnnnnnnnnnnnnnnnnnnnnnnnnnnnnnnnnnnnnnnnnnnnnnnnnnnnnnnnnnnnnnnnnnnnnnnnnnnnnnnnnnnnnnnnnnnnnnnnnnnnnnnnnnnnnnnnnnnnnnnnnnnnnnnnnnnnnnnnnnnnnnnnnnnnnnnnnnnnnnnnnnnnnnnnnnnnnnnnnnnnnnnnnnnnnnnnnnnnnnnnnnnnnnnnnnnnnnnnnnnnnnnnnnnnnnnnnnnnnnnnnnnnnnnnnnnnnnnnnnnnnnnnnnnnnnnnnnnnnnnnnnnnnnnnnnnnnnnnnnnnnnnnnnnnnnnnnnnnnnnnnnnnnnnnnnnnnnnnnnnnnnnnnnnnnnnnnnnnnnnnnnnnnnnnnnnnnnnnnnnnnnnnnnnnnnnnnnnnnnnnnnnnnnnnnnnnnnnnnnnnnnnnnnnnnnnnnnnnnnnnnnnnnnnnnnnnnnnnnnnnnnnnnnnnnnnnnnnnnnnnnnnnnnnnnnnnnnnnnnnnnnnnnnnnnnnnnnnnnnnnnnnnnnnnnnnnnnnnnnnnnnnnnnnnnnnnnnnnnnnnnnnnnnnnnnnnnnnnnnnnnnnnnnnnnnnnnnnnnnnnnnnnnnnnnnnnnnnnnnnnnnnnnnnnnnnnnnnnnnnnnnnnnnnnnnnnnnnnnnnnnnnnnnnnnnnnnnnnnnnnnnnnnnnnnnnnnnnnnnnnnnnnnnnnnnnnnnnnnnnnnnnnnnnnnnnnnnnnnnnnnnnnnnnnnnnnnnnnnnnnnnnnnnnnnnnnnnnnnnnnnnnnnnnnnnnnnnnnnnnnnnnnnnnnnnnnnnnnnnnnnnnnnnnnnnnnnnnnnnnnnnnnnnnnnnnnnnnnnnnnnnnnnnnnnnnnnnnnnnnnnnnnnnnnnnnnnnnnnnnnnnnnnnnnnnnnnnnnnnnnnnnnnnnnnnnnnnnnnnnnnnnnnnnnnnnnnnnnnnnnnnnnnnnnnnnnnnnnnnnnnnnnnnnnnnnnnnnnnnnnnnnnnnnnnnnnnnnnnnnnnnnnnnnnnnnnnnnnnnnnnnnnnnnnnnnnnnnnnnnnnnnnnnnnnnnnnnnnnnnnnnnnnnnnnnnnnnnnnnnnnnnnnnnnnnnnnnnnnnnnnnnnnnnnnnnnnnnnnnnnnnnnnnnnnnnnnnnnnnnnnnnnnnnnnnnnnnnnnnnnnnnnnnnnnnnnnnnnnnnnnnnnnnnnnnnnnnnnnnnnnnnnnnnnnnnnnnnnnnnnnnnnnnnnnnnnnnnnnnnnnnnnnnnnnnnnnnnnnnnnnnnnnnnnnnnnnnnnnnnnnnnnnnnnnnnnnnnnnnnnnnnnnnnnnnnnnnnnnnnnnnnnnnnnnnnnnnnnnnnnnnnnnnnnnnnnnnnnnnnnnnnnnnnnnnnnnnnnnnnnnnnnnnnnnnnnnnnnnnnnnnnnnnnnnnnnnnnnnnnnnnnnnnnnnnnnnnnnnnnnnnnnnnnnnnnnnnnnnnnnnnnnnnnnnnnnnnnnnnnnnnnnnnnnnnnnnnnnnnnnnnnnnnnnnnnnnnnnnnnnnnnnnnnnnnnnnnnnnnnnnnnnnnnnnnnnnnnnnnnnnnnnnnnnnnnnnnnnnnnnnnnnnnnnnnnnnnnnnnnnnnnnnnnnnnnnnnnnnnnnnnnnnnnnnnnnnnnnnnnnnnnnnnnnnnnnnnnnnnnnnnnnnnnnnnnnnnnnnnnnnnnnnnnnnnnnnnnnnnnnnnnnnnnnnnnnnnnnnnnnnnnnnnnnnnnnnnnnnnnnnnnnnnnnnnnnnnnnnnnnnnnnnnnnnnnnnnnnnnnnnnnnnnnnnnnnnnnnnnnnnnnnnnnnnnnnnnnnnnnnnnnnnnnnnnnnnnnnnnnnnnnnnnnnnnnnnnnnnnnnnnnnnnnnnnnnnnnnnnnnnnnnnnnnnnnnnnnnnnnnnnnnnnnnnnnnnnnnnnnnnnnnnnnnnnnnnnnnnnnnnnnnnnnnnnnnnnnnnnnnnnnnnnnnnnnnnnnnnnnnnnnnnnnnnnnnnnnnnnnnnnnnnnnnnnnnnnnnnnnnnnnnnnnnnnnnnnnnnnnnnnnnnnnnnnnnnnnnnnnnnnnnnnnnnnnnnnnnnnnnnnnnnnnnnnnnnnnnnnnnnnnnnnnnnnnnnnnnnnnnnnnnnnnnnnnnnnnnnnnnnnnnnnnnnnnnnnnnnnnnnnnnnnnnnnnnnnnnnnnnnnnnnnnnnnnnnnnnnnnnnnnnnnnnnnnnnnnnnnnnnnnnnnnnnnnnnnnnnnnnnnnnnnnnnnnnnnnnnnnnnnnnnnnnnnnnnnnnnnnnnnnnnnnnnnnnnnnnnnnnnnnnnnnnnnnnnnnnnnnnnnnnnnnnnnnnnnnnnnnnnnnnnnnttaaacgctgccccgtttccgcagccgtctgctgggcgagcgggagaccgaccggacacccctgggggaccctctcggatcaccgcgcttctcctgcgggcctccaggtaagggacagctcgccgacgtcgttttgcatttgagagctattgccgaaagacgttttctgtctccttcgtaaatgcatgtatctatttgtcccttttcgtagatgttttataatttcaagtttttatcgtgtgtgttgttgttttttttctacttgtaggccaatgtgcaataccaacatgtctgtgtctaccgagggtgctgcaagcacctcacagattccagcttcggaacaagagactctggttggtatttctgcctcgagtgtgtaaatatagcttgttttaccaggtaatcgaggaaacaaaattgaaacctggattatcgcacagtcgttttaagtatttacctacaaactcttaactttctcgattgcaattgcattagagagtggtcactgcgacctatatttccacagcccttcccctgacgcaggctttagaagtgcacagtgtgtgggtgctgctggttgtgacatgatgttctatcactgttctaaatggtaaaccgaaagtcatagaagcatccgtgctttttgtgaggattttagttatgagaggaatgcataaaatatataaagttccagtctttgctctgtatctctttaagttttctactttatattagcatataaaggtgttctacagcttgtcagtaagttacaaaattacttttaatagctgcataggatttgataatgcgattgaacctcagcctttagaatgtgtgtgtatgcaagtactgtactactgagctgagcgacagtctcaggctcacgactactgggggatgtaaaagttgcccatgtgtttgagtaaagtaagggtgaggaagatagggaactagaatcctacgtcctggtaaccacatttgattgcagactgctcactctgctcagcagaggtcatggccgtcttcgatcctgccagcacgaatattgccagccctcgttttccctttctgatgtaatttcatacatatttgtggagaatacatgtatgcaagttaagtcagttcctacggttactgctctgtggagtaaaatgtattgtttcagtgggcatgtcccagatctccagttaaacagcctgtttgttctgggtttgccaatgtctctctctatttactctcgctcttcctttcctcccccatttttttttttgcatattttagtagcttgcataattttcaagtatagttaacctaagaaatttttttttacaaggactataatctgatgtctgccccattgaaggtatcaaatttgtttattttgataatttttgaattttcttgtaatgctttggaggaattcttccatttcaagattatgcacatatttaaagtattttcatatagcattttaaaaaccttttccgggtagatctttattcagaactctctttgttaagtgtgagattacagtgttgtgtttttatagtagtttttaaaattaactttatcttgtaagctttgataagaaactggctttccattgtagagttttgatttgagttaatttaatatgcaaaaatgtagaacttcttgctttggcagtacgtatgttaaaattgatacactaaggagaaggctagcatgacttctatatgagttacataagaaaattaagcattagtaagtctttttcagctgggcgtggtggcgcatgcctttaatcccagcacttgggaggcagaggcaggcagatctctgagttcgaggccagcctggtctacaaagtgagttccaggacagccaaggctacacagagaaaccctgtctagaaaaaacaaagaaacaaaaagtctttttcaaatcttgtaagagtgaattacttaatctgaaaataaggtcttaatacccttttttaaaaaactgatttctataggctggagagatggctcagaggttaagagcactgactgctcttccagaggttctgagttcaactcccagcaactacatggtggctcacaactgtctgatgccctccctcttctggtgtgcaggtgtacacgcagacagagcactcatacacagaatacataaataacagagtctttaaaacttttttctttatttttgaaattataccatttctcctttccttttccttcttccaaagcctccagtataccccttctctctttcatgacttttttcattaattgttacatgcccagtacatgctacgttcccagatacagcctgctcagtctgaataatgccatttgtgtatgtatgttttcagggctgaccttttggtattggataaccagtttgtgtgctcttctggaataaataactgaaaagtgcattttaaaattgtgctaaaagtagtctttaaaaaaagaaaaagaaaagagtggtgctggagagagggctcagcagttaagtgcatttgctgttgttacagaggacccaggttggatccccagaatggataaggtggctcagccctcttgtaactctagttgcagaggatctgatggcctcttttggcctccaaggacactgtttgcacacggtgcacttaaatacatcaggtgaaataccagtatacataaaataataataaaagtcttcaaattaccaaaaaaatccacagaagtggtggtctgtgtggttatctcaaactaaaacagctgagtttgcagatacagagagcatagtcatgttacatgccttccttcccagtttctaaacactctctcagcttagtcagctcagtgtacttactgtccttgaagcacttaatagtattttaaaaataaactaaatgcctttaaaggtagtggttagtcctatttgtcctcagtactctgccatgaggccacattctagccatgtagacagaggcctggcacagtgagatctgcagccattgcaacaatagagccatacaaaataactgtcctgacagagacagccggccaagcagccaggagggagcacgactgctcttcagaggacctggcttccactctcagtacccacatggtggctcctagccatctggaactccaattccaggggtccagcactgttgtggtatccctggggaccagggacacaagtggtgcatggaagtacatgcaggcaaaacatgcatatgcatggaacagacagaaagccagcaggctctccgtgctgggcatccactagctatagaacacgagtgaacaggagccttgatcatcaaagctgacgtgcaggagtgtctttagagtatctgtggccgatggtaacatactttgatatcagactgacgtggctagagcaagctcagggacatttatcatggtgttccttggtatccgttgtcaggctgccaggctgggctcactagctgctttgtgggtgacaccttgttaggtaggtgacagttgtccagtttttatctttttaaggattcatttcttattttatatataggaatgttttgcctgcatgtgtatatgtgtaccatgtggatgtctggtggctatagaaaccagaagagggtgtcggatcccttggaaccagagttagatagttttgatctatcatataggttctgagaactaaattcagggtctctataagagcaacaagtggtcttaacctctaagcctcagccccatcaactattgtctcactactgggaaagctggattagagtcaaattgtagctggctacttgtttttataaataaagcttaatgttatatatttactcttatagtttatgtagtacttttgcttttaagttggctagacatagaaaaaacactttctggctcttctgatattactggcatgctctttaaagatcatttgtcattagtgagtgtgtgtgtgtgtgtgtgtgtgtgtgtgtgtgtgtgtgtgtgtgtgtgagagagagagagagagagagagagagagaatatctagcctttgcatgtattttaagtgataaataaatgatgcataaaccacatataaagaaaacaatgagttgtagctgagggctgtgattgtactctttgaattgttcattaccttgtgactttggtttctttagcagtcaggaatgtggtatatgatagattggtgataggttttgccctaagatatagtctattctcctacattctataagctccctttcagtagactgacggatttgtacagtatagtaagagactggatctcagctaggttgtgtggtggcaagcagatgatggagctgtaggaaggagtcagtgctcactcacacactcccctgtgtgtgtgtgtgtgtgtgtgtgtgtatttgtagctcctgcctgcagagactacagtggatgttggattgcctaggatgttggtagctgccttttggtggccctaggaatctagaattgggtcccctgcaaagcagcaagtgcttttaatctctcagccatctctccagcatcttgataccgttttgatcagaacaaattgagtttgattatttgacatgacaccaggatttgatgacttcatgataatttcatagtagcttttcccaaagcattttctgtcctaacgcttagtggtgtgcacttgtacttagtgtaaaacccaactttctgaagtgcagctcggtaacaaattgttataagcacggcgtttgctgcctgtattgggcttctttctggccatacataaagggcttgtgctgtagagtatgttcatggtgtaacatcagctctttttcttttcttttacaggttagaccaaaaccattgcttttgaagttgttaaagtccgttggagcgcaaaacgacacttacactatgaaagaggtgagcagaactgaggggtggagagccgatggcttcatggttacatacaggcatctgtggtggtttttcaagtttgagtgagattggccatacagattttgtaatgagcaaggacattaagttttgtgatcatttgaactgtaatttgaagctaaaaattctaatttacatgaatttcttcctcctttcctttctttgagacaaggtcttttttttaaaaagatgtatttatttattatatgtgagtacactgtacctgtcttcagacactccagaagagggcatcagatctcattacagatggttgcgagctaccatgtggttgctgggatttgaacccaagaccttcagaagagcaatcagtactcttaaccagagccatcactagcccctgagacaaagttttactatgtagtcctgactgtcctggaactcactatgtagaccagctggcctcagactcaagagagatccacctgcctctgcctcctgagttctcttttctctttttnnnnnnnnnnnnnnnnnnnnnnnnnnnnnnnnnnnnnnnnnnnnnnnnnnnnnnnnnnnnnnnnnnnnnnnnnnnnnnnnnnnnnnnnnnnnnnnnnnnnnnnnnnnnnnnnnnnnnnnnnnnnnnnnnnnnnnnnnnnnnnnnnnnnnnnnnnnnnnnnnnnnnnnnnnnnnnnnnnnnnnnnnnnnnnnnnnnnnnnnnnnnnnnnnnnnnnnnnnnnnnnnnnnnnnnnnnnnnnnnnnnnnnnnnnnnnnnnnnnnnnnnnnnnnnnnnnnnnaaaaagaaagcaaaagaaaaaagaccttatacaactgttgggatgctcagtgggctgattcatagacacaatgttgtattctctgccttaacgtttattagtaaagtattgttttcagctagaggttggtcagttgtagacagaagttttgcatggctgagatataagtgtttctctggctcacttaggttaaggcttgtttacttaaaacactcaagttcttgtggcaggttaggggcttcttctcagctacacatttggaaacgtctcaaagaacactttgttggaggaacccaagtgtcctttctgtcccactgactgtcaatactttgtgatctatagacatgtaaaaattgcctttcagattgattggctcctacttagctagttaaagtctctttaagtgttaagtgatgtttttaaggtcattaactttggattgacctttataaaggttagacaaatgataaacaagtatggatttagtagtaggtagatatgagaaaatcgatgaaggccatcaaaaagatttagtgcttatgctaagctgtgtgcagtaggtcagctgtcctcctgctctctgcggggagttggcttcaggacactgcctgccaagtctcttacttaaaccgtgaaactgtctctgtatggacatcacctcttagacattaagttatccctagagtatctgtaatacacaatgtgtgtagttgttatactgtattctttaaggaatagtgacaaggaaaaacatttctacattcaggatggatgccaggaatattattagacccacagtcaaatggatctgtgggggtgggacttacagattgtttatagtgtctgataccagttttcagttacaagatctttattctaggacacttgagaatgtagtgagctagtgtggtagacagtacgctgggataggtgtcatgtcctgggttagtttctcatctctgtttatgtttttattttcccccctgtggtactgggtgtcagatcaagggagcacattttacctactgaacgacactcgtgaccttgttttcatacaggaataacagttccctggggtgtcaggatggtgagactgtactgacaaacctgtgcactgtaaaatgctgtctagagttacattgttgatgggctcgttttggaatgacaaagtatgttgcttaagctgccataatggagcacatggaatataataatagtgatggttcgggccctggactgtttggtgaagactatattaataactgagaatattccattgggagatgttactcatgatgtcctgtcttcctctgtgatgacctcagagctgtagaagtatacgtttgtgacatgtcactattctaatacattgctgtattttaccttactctttttttttattcaatttttttttaagatttatttatttattacatgtaagtacactgtagttatcttcagacaccccagaagagggcatcagatctcattacagagccaccatgtggttgctgggatttgaactcacaacctttggaagagcaatcagtgttcttaaccactgggccatctctccagtgtccccccccccccttttttttaaacctcttttttctttcctagtatcatatgttagtatctaagtttctgggaaaaattaaaatttataagaaaaaaagaaaaacagaaaatacatttaagtaatgtggagaaacagttacttctattttcatcagtgtggaagtatttaaaagaagcttctacaatacaactgtttggtcttgtacatgattatgggtgtggctgttagtgtaaagtgtaacttgttcagttaagtgtggtattgctgaatgtataatgtatatattctatgtgatttccttagtacttagaaaccatatttgtgtttcagattatattttatattggccagtatattatgactaagaggttatatgacgagaagcagcagcacattgtgtattgttcaaatgatctcctaggagatgtgtttggagtcccgagtttctctgtgaaggagcacaggtaagccttgtgcgtggtgggttataagaacagcgagcggctgtgcatggggctggagagatgctcagtggttaagaggacccaggttcaattcccagcgcccccatggcagcttacaactgttggtactgccagttctataggatctggtgccctcacacagacatacatgcaggtaaacataaaaaacatcttaaagaagtaccagctgggcggtcactgtttctcacctctgtcagagaggaactgaccatggatacaaaatgctaacattgggtgtcattttttgaggccctactgcgattaacagtagtcgtagcatattgtgtgggaacctgaactctggaatcttagttttgattgtgtgtgtgtgtatgtgcatatgccactgtgagtgtgtggcagtcaggagtcagcttgtccttccaccatgtgggtactggggattgaatgcaggttaccaggcttgacctcttttgagacaggtcgagtcgttagtctgtgggtgtgtaaatggatctgacatctctcagctgtaggctctctactcacatgttgttttttttttttttttttcttttcttacaaggaaaatatatgcaatgatctacagaaatttagtggctgtaagtcagcaaggtaggtaattttgaatattataaacatagtataacttaataacagttctttttcatgtaagatcttatgtatcctagtctaaccttaaactatgtagctacggacccttgagccttaaaaaaaaaaaaaaaaccacaaacctttgagtagctttttgttgtgtatgtatctgtatgtctgtgtagggtgggatagatacatggtgtatacctggaagtcaaaaaacagcttggcggaattggtctactttttacatgggttctggtatccagctcagatctgtaggcgtgtgtggcaggcactttgacctcctgaaacatcttaccagtcccctaatcatgttttaaagacttggatgttgtcttagtcagggtttctattcctgcacaaacatcatgaccaagaagcaaattgggaaggaaagggtttattcggcttacacttccatactgctgttgaccaccaaaggatgcaggactggaactcaagcaagtcagaaagcaggagctgatgcagaggccatggagggatgttctttactgacttgcttcccctggcttgctcagcctgctctcttaaagaactaagactaccagcccagggatggcaccacccacaaggggcctttccctcttgatcactatattgagaaaatgccttacagttgtatctcatggaggcatttcctcaactgaagctcctttctctgtgataactccagctgtgtcaagttgacacaaaactagccagtacagatgtatacttcatgttttaaagacttggatgtatacttcttcgtagagtgcagttctggctttaacccttagcactctaaaaaggcaaaatatcactgtgtgctgctttcatttgtgtttgcttctggctctctttattatttttaactctttcattgcctaccaatttttttttaataattatttttgggtgtattagtgttttgcctgcatgtctgtctgtgtaccatctgtgtgcagtgcctttggaggacagaagagcccatcaggtctcctagaacttgttacagacagttaacgactgctgtgtgggctgggaattgaagccagaacttctggtagagtagccagggctcttaaccatgaagctgtgttcccagcctctacttttttgttgttttgagaccagatccccataaattatccaggctcatttggaacccaggcttcctgctccccaagtagctgacgtttgttcatttattcagcactgctgagagttgaacttaggctcacacacccttgcgtttagaaagtactgtactagttagctgccccagccaggctttgactcatctcattctctcttaaaaaattaaagtgacttctttcatttcactttatttgtatgggtgttttttctgtcctgctgtatgcatgtatacatgtgcaccacgcgtgtgcagtgcccagcaaggtcagaggaggagcattgaatctcctaggactggaattagactattgccacctctggaagaccttcaagtgctcttaagcaccagagtcatctctccagcccctctttggaaaaaataattatactgcctggtgtggttacacagacatttaatctcagcaaatgggcggatggacttgtccagccaagtttacataaagagaccctgtctcaaaaaggcaaaaagcaagttttaattatgtgtgcgtccctttatgtgaatatgtgcacatgagtgcaactgatcttagaggccaggagtgtcagcttccctagagctggagttagggagttttgagctgtggtatctaggaactaagagtaatccagccccatgattctccttaaaagtaaaagaaagtacatttattcgtgtttaagagcatccttatgccatgatgtgcattgggaagtcaaattggatgtcttgttaatctctgtcacgaccctgggttatcagggtttcttctgaaggacaggtaatgttaaaagctgcttagtagaagcgtgatcaaacctcagaatgcgttgagatgtttcaggaagtaatataatacctaggtaggaccgtgaaagagtggggtttcatctcttctcttctcttgcccccctttgtattcttgctcttgtttcttgagtggacacttagcatttttaggtaagcatcattttagctctccttggcagttcttttttagtgacttgagcacaggtccttgtgtgtgcttcacaagcatcaactctgatgttgagctacttactgagagaattggttatttttgggatgcaacctttttgagaacctagtaaaggcacttgattttcattctataagtgtgtacatgtggatagtgttttattattattattatggttttttgagacagggtttctctgtatagccctggctgtcctggaactcactgtttagaccaggcttgcctcgaactcagaagtctgcctgcctctgcctcccaagagctgggattaaaggcatgcgccaccatgcccggctatttttttttttttttttaaagaaagagtttctctttttaaagacaggctctcactattagctatggttgggctagaactcattatgtagatcaggcagacctttaactcccagagatccatccacctgcctctgccttctagacttacataccgccatgtctcctattagttgtatttgaatactagtagctgtgggctctgaaaccccgtaatccttaccgttacccttgaacatagctactgtgttcagaagcttgcttggtttctagactgaatcaaccattctcttgcgatcccactattcccttctatattcagaagtcactgtgttgtgtgtacagtgtgttgtaaatggcaccaggatcctccctaaaaaaagaacaaagtaattagtttggtaactgagacctgtggttttcggcttctgcctcatgatgctgaggttactgggacctgctaaggctctttatgtcatgctatacagttatggaatctgatagtattttacattttctctagtagtcactcacttaataaactttgacagattactgacgatttctcttgatgctgtgtttcagtttagttaaaagtaattttgaaaatcctaggtgagcctgtcactcccgttactttattacatctgttttataactatacacagcccaagacagagttcccaggtagcatagcctatctatgtattccctttaaagtttgtattatgccataatacaggacagttcactgcggtcacccagtgtttgaggagctcggcagtgcccagctgtggtctcacggttgatggatgtgctttaggcggtagtctagggtatggattgtgatttttgagtaattttgtccattccagttctggaacttggatgttttgagagcttggtctgtgaaactaagtacaaactacacctgtctatctacataactcttttaaattcattattttttccaagctaaatcgttcacctccctcacctctcttggtgagtggtaccacacattcttcatctagttagactcttgggatcacttccttttccttacagacatctagtcttaaccagtttttatgtcttaatttttctcaagttgattgtcttagttagggtttgcattgctgtgaagagacaacatgaccaaggcaactcctgttattaagaaaaacatttagttggggcttgacttaatacttcagaggattagtccattatcctcaaggcagtaagcatggcagcatgcaggcagatgtggtgctggaggagctgagagttctatacccttatccaaaggtggaaggcaagtaagaggcaggtttcttccacattgggcggggcctgagcaagggagccttagagcccacgcccacagagacacacctcttccaaccaggtcacacctcctctagccaggccacaccctgggccaagcatattcaaaccaccacttaaatactttaactacatgtatatatgtattgtatgccgactaatgccacannnnnnnnnnnnnnnnnnnntatacacacacacacatacacacacagttgtctttgtatttcaaatactgtttgcttgtttctgtgctctgtttgccttcccgtgtggacctcctacatgctaactgaggcctcctccactgaatcactatggcttgacagtctcactgagttgcccaggctggcctgctggagatgattgctgtagtgtaaatcaccgtgcccagttgggagtggtggtgggtttgttgttttttaaattctattttgtcagagtggtttgttgctttttttgttgttgttgttctttttttgtttttttgagacagggtttctctgtgtagccctggctgtcctggaactcactttgtagaccatgctggcctcgaactcagaaattggcctgcctctgcctttgccttccaagtgctgaggttaaaggcgtgtgccaccaccacctggaggtttgttgcttcttatttaggagttttatgattgctctctggggagaatagttctgtgagctaggaaattagctttatttcttgaactaaaaccctttaatagtgagaagttgcaagatggcctcaggcaagattatagaactgcttgaataactgttgagaagaataaccttgtatgtgactcagctgaacacgcatggctctgtgcacagcgaccctgcactttactgtttgagtacagaggagtttattatgttggtgtcagtcacaggaactgtttgcgtgttcatgatttctcacatactaatccttcagtctggagtgtctgtcctatgctaacttcagcgtaggcgattccagaatctgtcctgatagctcttcagagcccctcccccacgtctactaaacatttttgtttcccctgctagtatatcttaaaatttgcttattttgcttcataattcctgttgaatttatatctccagcatgcaaatgactcttgatacaaatggttaatagttgttaaaaggttagattttgtattgggcatgtgttagactggtatatgttgaattcttgatttctttgttttgatccactttttactttctcttacaatcttcagactctggcacatcgctgagtgagagcagacgtcagcctgaaggtgggagtgatctgaaggtaatacttgcataaagttcttactctaacacacttttctctttaaaatatcctgtctgtaagtgtgggtgtgtgtatgtcctccagccaaaagaaagaggtgatgctcacctggagctgagttacaggtggatgtgagctgccccagacatgagtgatggaaaccaaacacaccccagcaagaacagcacatggtcttcttctctgagccaccgctctagcttcatgacacatagttcttgaaaattgggagggttacataaaacagggtgtggaacagccaatgtttaatgtttattttgcaatattttactttcttttatgtacttaggatcctttgcaagcgccaccagaagagaaaccttcatcttctgatttaatttctagactgtctacctcatctagaaggagatccattagtgagacaggtacatagggacattatgtgacatactaaacagttgcttggtgtttccattttgggtcaaatgaccctttgacagaggtctgagacctaagaccactgaaaaccacatggttgcattatgattcatcacattagcaaaactatggctatgaagtagcaatgagaatagttttatgcttgggatcaccactatgaggaactgtattaaagagtcacagtgccgggcgatggtggctctcatctttaatccagcacttgggaggcagaggcaggcggatttctgagttcgaggccagcctggtctacagagtgagttccaggacagccaggggtatacagagaaaccctgtttcgaaaaaccaaaaaaaaagagtcacagtgttaggaaagttaagagctgctaccctagacttctaataaaaggagatgaagttgttctttgttttgggacagggcttctatatagatcaggttgacctttgcatagtctttttcttttttctttttttttttaactttatttatttaatgtatgagtgctctgctgctcttaaccactgagctgtttcaccagcccagccttattcttaaagcttactgttgatggggaaatcgtgtactgttgaatcagtaaaagcactaggaggattaaatgagtaacttgtggaggtaacgtccacaaagaaggttgcaagcttagaagtagagcttatgtgtagctgaacagatccaatgaaacactgctgacttttgaaacattaatggttcacttctctgtttaatataattgaaattaaattttgttgcaaataggtgctgaagatatttcaatctcaaatcagtcccagtacagggagttttaaccccatgtcctttaatctatagaagagaacacagatgagctacctggggagcggcaccggaagcgccgcaggtccctgtcctttgatccgagcctgggtctgtgtgagctgagggagatgtgcagcggcggcagcagcagcagtagcagcagcagcagcgagtccacagagacgccctcgcatcaggtagtgcttgggtttaagaaattatcttactttttaatatggaagtgtcttgtctgccagaatgtacaccacatgcatgcagtgctttgaggccacaggagggtgtggagtcccctggaactggggttagggatggttggagccactgtgtgggtgccaggaaagtgggttgactaccacatctctgccctagttttgagtgctgcagattaaatccagggctctgtgcgcactgggcaagtgttctaccagttaattacatccccaacacccaacagtcagtgagccaacctctctgcggatctctgcctatctagtttcttagaatagaacctgacctgctgtcaaaacagaatatatatatatatatatatatatatatatatatatatatatatatatatgctcttctaaaaatcttccatattaaaaatttgttactttttaaacttaagtgaaaatgcttttaatacaactgtgttttgctttgttttaacttacttatgagaacattagtctcagtagttttaccctttatttacagggaacactatgcctgatagtgtttcaaataatttgttaaaggatcctacaactaattattacatttaataagacaggctagaacttgaaagctcagcggttaagagccctgactgctcttccagaggtcctgagttcaactcccagcaaccacatggtggctcacaaccatctataatgggatctggtgccctcttctggtgtgtctgaagacagcaacagtatacttagatataataataaattaatcttaaaaaaaaaagactacttttatgtcaagctgactgtattttctggaagagaaatgatgtgtctgcagttaagcagcatcttggtagcaaattgagaatgcctgtgtcctgaattctagagcagtgtatttttatcagttgtaagtaagttgatttgcggatgaacttagtgtatgatttgaagttgaatctcttgtttgcatttttgtgagacagggtctcttatttagttctgactcttggctgtcctggaactcactgtatagaccaggctggttttgaacctacagagatcttccagtctctgcctcctgaatgaatgctaggattaaaggcatacaccacatgcctggcctgaagttgaatcttttaatctcagcactcaggaagcagggacagcagagctctctgaggtaatagccaatatagtgtcacatgaggtaatagccaatatagtgtcacatgaggtaatagccaatatagtgtcacatgaggtaatagccaatatagtgtcacatgaggtaatagccaatatagtgtcacatgaggtaatagccaatatagtgtcacatgaggtaatagccaatatagtgtcacatgaggtaatagccaatatagtgtcacatgaggtaatagccaatatagtgtcacatgaggtaatagccaatatagtgtcacatgaggtaatagccaatatagtgtcacatgaggtaatagccaatatagtgtcacatgaggtaatagccaatatagtgtcacatgaggtaatagccaatatagtgtcacatgaggccccaggccaactaaggctgcatcggaaaacccagatgccagcttggtgtttgtgtgtcgtcactagcactccgtcacactagcctgtgagtcagggaggccttcgtcttcctgtgtttaataggataaactcacagtggtgcttcagataatagtgggtgtgcatataatcacacacgtaggaaaggtcattgtggaagatctttttatggtattgtgggaaccttaaccaaagaaagatgagtggggcttagaaactcagattatcttactgagaaaaagttagtgtgtggattgatttaggaaacaagatgtggctggagcatgggtattgaatagggtggagggtgtgtttagctggacatttgaaaatgttaatgcagtcattctgagtgtaacctcggggctaaggggctctgacttttccttcatgaggtaggacttttgagtaaggtagtaaccttgaacccagtctatgtggtctggggctgagaaggaaatagtggctcgggatgaacccgggagctctaaatgaggcccagaggcaatgcatttacattcgctgcattcttcctccataggatcttgacgatggcgtaagtgagcattctggtgattgcctggatcaggattcagtttctgatcagtttagcgtggaatttgaagttgagtctctggactcggaagattacagcctgagtgacgaagggcacgagctctcagatgaggatgatgaggtgggtttctgtgtctgtcagccttttagtaagatgaagaggccatctattcagagtctctggaaagtcttgctttttcatttgttcaagatagaatattgctttgtggatttgaggtgaaattttatagtttctttgcttgatttatttatttagatttatttgttatgtatacagcattctgcctgcatgtatgtctgcaggccagaagagggcactagatatggttactagccaccatgtggttgctgggaattgaactcaggacctttggaagaacagacagtgctcttaacctctgagtcatctctccagccctttgcttgatttattatagtctcacattactaaataaaaaacttagaggagagtttgaacaatgtttttaaactttttttgagttgatggggtgtttttgttttgtttgttttgctttttgagacttggttttttttttttgtttttgtttttgtttttgtttttttttttggtttttcgagacagggtttctctgtgtagccgtggctgtcctggaactcactttgtagaccaggctggcctcgaactcagaaatccacctgcctctgcctcccaagtgctgggattaaaggccttcgccaccacgcccggcgagacttggtttttctgtatggccctagctgtcctggaacttgctttgtagaccaggctggcctcagatctgcctgcctttgcttcccaagtcctggaattaaaggtgtgcgccaccactgctctgctaatgatggatgaacattctcataatggctggaccacaaagttctccatttggtcttcccatttatgtatgtatgtgtgtgtgtgtatttgtttttgagacagggtaccaccgtgtatccctggctgaccctgaactggctatctagaccagcctggcctcaaactcatgggaatcctcttgcctctgcctcctgattgctgggatgaaaggtgtgagcccctacttctgcccctcccttctcagtactgatttgtttttcaccaatgtaaagcatgcaacgaacagtgtccaataggacccgagtatctctttctcgggagcaactctacatttctagttgttttctgtctaataactctaaatttataaaatgtcttcttgagtgttttgtttggttttaagtatctaacaactcttgccattgcgagtaaaggttttcctatcctgcgtttcctgcttgccttgaactgcatttaactttctttcagaactcttcgtccacagttaatggctcaagctgtttgttttaagacttactgagaattctggcttcttggttgaagggttgaattgatgctaatgaatttgtcttactaggtctatcgggtcacagtctatcagacaggagaaagcgatacagactcttttgaaggagatcctgagatttccttagctgtaagtatatagattcttcaaagaaataaaacacaatgttgagatcagaattaggactataggtagttgtgagccaccacgtgtgtgctcagaacctgagccatctctagcctgtcactatttcatataggtcaccttttgtgtgtgtgtgtgtgtgtaggggaaagtacctagagtctactctattagctaatttctggtatatagtattagatatattcctcatgttctttgcctatttatgtaaaatatgaaatgctgaaaattaagctacatggtatacttttaccttagccacattgaagttattagccttgctatgaacactgactgaagagttactgtcttttttattgaaggactattggaagtgtacctcatgcaatgaaatgaatcctccccttccatcacactgcaaaagatgctggacccttcgtgagaactggcttccagacgataaggggaaagataaagtggaaatctctgaaaaagccaaactggaaaactcagctcaggcagaagaaggcttggatgtgcctgatggcaaaaagctgacagagaatgatgctaaagagccatgtgctgaggaggacagcgaggagaaggccgaacagacgcccctgtcccaggagagtgacgactattcccaaccatcgacttccagcagcattgtttatagcagccaagaaagcgtgaaagagttgaaggaggaaacgcaggacaaagacgagagtgtggaatctagcttctccctgaatgccatcgaaccatgtgtgatctgccaggggcggcctaaaaatggctgcattgttcacggcaagactggacacctcatgtcatgtttcacgtgtgcaaagaagctaaaaaaaagaaacaagccctgcccagtgtgcagacagccaatccaaatgattgtgctaacttacttcaactagctgacctgctcacaaaaatagaattttatatttctaactatatgacccccaaattagacaacatgggtattatttttatacattaaagccagaaaactgtcttagtccacataaaattcacttataatttatcctggagagtaaatatggtgaatattttcttcctttttagggaaatttcacttgtttattttatatttgtgttttaagtaatttgcattggctgtttatattttccttatattttaaataatctccgcttggaaggactttggaagtgtatgtgagaagtcctttccatctcctgcagatgatggtggaccttcctcatcaagggctacagaagtacttgatttctgttttttttgttaataataagaacatttaatttatttagtgtctttcatgtaaagagttaaagactatgtgaaggattgtatatttaagttattgaaattctgaaactgtagtaatctaaaatgtgtgagttgtgggctgcagagaagactcagccagtaaaggcacctgctgtgtacacccactgacacacatttgatccttggaacccccaggaagagtgaaccagttccacaaagttgttccctgatcttcaaatggatgcacgcacgcacgcacacacacgcgcgcgtgcgcacacacacacacacacacacacacacacacacacacagttttaaaggcatgaattgcatctggtggtatgtaagtgaaaacacacgccttattttccagcattttcagctttttgtcataggggtgtggcacaagtgttgcagtttgtcccaggttgaaaagcctgaggctggtagaagcgcctttttgcctcagctccgtggttcctggtggttgcctatgtttcaggcctgtacttaggctaggtttagaaaccagcccattcagaaagactgaatcagaacatggataaagtgaactcattctaagatgactcgtctatccatgtagattaatctcctggttcataataggcctcttccctttgattgaagggtcacgtctaagtatagaaaacataaaactgtaaggtagaggaagcgaaggatagctttgtattaatgttgcgttaaagcttcagagacaagaacaagaacactcctcccacgtgacagcatttgaataggaggcggtgggtgcggcagcctgggcagcttcagtcccgatttacaataaagtaccttgtgtgttattagttcttaaatgtttatttagaaatggcattgatgttatttatttgcaaataaatggtttattgaagaattgtgaaagagatttgtcttacacatttttttgtcagtgattttgtttttaaagatttgttcattatatgtgagtacactgtagctgtcttcagacgcaccagaagagggcgtcagatctcattacagatggttgtgacccaccatgtggtggctgggagttgaactcaggacctttggaagagcagtcagtgctcttaaccaccgagccatctcagcagcccccatcagtgatctttttataattcatttttattttatgttcattggtgttatggctatatgtctgtgagggtgacagaaaccctggaactggagttacagacaggtgtgagctgccctgtgggtgctgggaaattgatccattgctctccacctttttaaaatttgtgtgtatgaataattcgtccacatgtatatgtattgtgtgcatacactgccttgaactacatgcatgcagtgcctgaagaggccggaagagggcatcagatccttaggacccgagttccaggctaggagcctaaccctgtcctctgtaagagcagatgctgctcttgaccacacagctgtctacatgccgcctttttttttttttttaaggtttatatattttatgtatatgagtacactgtagctgtacagatggttgtgagccttcatatggttgttgggaattgaattttaggacctctgctggctgcttgctccggctcaaagctttatttattataagtacactgtagctgtcttactataagagggcatcaagtctcactacaggtggttgtgagccaccatgtagttgctgggatttgaactcagaatttctgggagagcagccagtgttcttaaccactcagctatctctccagcccctaatagctacaaatttaaatactttaggcaattttgcctagggatttcccaatatattatattgcaatggattttcttttgagtcggagaaatgtttgcgatttaacttaaagttaagatacttgtgtggaggagatggctcagtgcttgtcttgtgccctgattccatccccagaaaccgtggatatggtggcactcatctgtaaccacagcatgagagatgacaggcagacccacaggcgaatcatctggaagcttgctggtcagctggcttgcagtatgcatcatgacagaaacaagaggctaccacaaggtggaaggccggagactgttaggttttgggtgttgctaaatactggccctggttgcctccaggggctgggaaattctcacttaaacccagatgatgctctgtaatcttgtcccccaagttatccccgattggcgaataaagatgcctgcagcctgtagctgtgtggaagagagacaggtggggtttgggggtctgaggcaggaagaagaaagaggtggagagaggagagtgtaggtgagtctggaagaagtcagtgctcttaatccctgagccatctttctagccccatatagcagtcttttctagtttgtagatttttgttatgtttgcaaacaaaacagtagtggaaagagacaacattcactatatgaatattctttattgataatcagataatgtaaataaaataagctcagaggtagtcatggtccctcccaagcaaacgttgtaatcttagataatctgagaatttatttatttttctgtgtagccctggctgtcttggaactcactgtgtagaccaggcaggctggatttgaactcagagtcccctctgcctctgcctctggagtactgggattaaaggcgtggtccagcactgccaccactcaacctgggcacctttaatagcttctgcttctgtgcttttaatggcaggaatcacttagaagcttgttaaacaaaaacccgcatgaagtctctcgcacagagctgtgggttggcttgtgagcttaaggtttgattaaacggcctgtgagacacagtacagcatcttattagtgatgcaagtctagaacaaactcggtgaagaatctgttgtaggcaccaagaacccgatgctcttcacctaatccagcatcattctctcccgtacctgaggtcaccaggaaggcagaattgagctcacaaaccttcactagatgccccctccgagactgagaatgaaactcctgttgcaataggaaaataagtgtgctatatggctttgtatatttttcctagaaacagatacgtctcaacccagcttcagctcatacattggaaagcagatctgatgttaataccattttagtacaggcagagtctgagaaaactgggactgtttttgcttgtttgaaacgggggtttttctgcgtagccctggcggtcccagaactctgtagaaaagactggccttgaactcacagagatccacctgcctctgctgcctgggtgctaggattttaccatctcaattcaaaaatgggcacgcatgtaaactaggcactttgtgaaagtttccttgaaaaggacgtggtttttggtaaccagcatttccgttttcaggtcacctttagtaaggtatattgctttcaaaacagttacagacccaagtattccttctgctttctctacctggcagagggcaacagaataatttcctggttatgttttgtcttgggggtagttaatggagattagacccaagcctttgcatatgctaagtacactgtcactgagctacacccctcaccctgttttagtgatttttacactgggttttgatatatatttctgatttaagtaatgtaacctgaatatggacacagcggaccaggtctgtaatagctactccagcgtctacggcaggcagatccaaagccagtttggcttactatgagttccaagtgcaggctacacagcttagtgaaatgctgtgtctgaacaaaaagtaacaaaataaagacgtagctgtggctcaatggccctgtgcaaagccctggcacagtctctggtaagacacgggcacttgcaagttgtttcagtaccaagtctccggttaggcccatgagcagctcagcgaacagctcatttcctttcacggaatcttaggaaagggtcaaccagtcagaactcagaacaccagctgatggcgaaccaagtttgctcttacatatcttactggttttgcttttctaagatggctagtccaggctagccttgagctgtgtcgatcttgcctcagcctcccaagcgctgggataatagttcaccaccacacctggcttcgtcttatatatatacttcaaatgtaatatacccagatccctttttgaactattaatacgcgccttctgggatataagttaatgcttatttaaataaaatgatcaagatactcatgctatttccaaatttagaagcggttaaaaagctatgcagactattgatattaaaatatagattaggtttggcaccaagaaagggcaccagggtgcccacgtatctctttagagtctcaagccttcatcgcctgtcaaaccccgcatgttcttacttcctgtgggaaatgcatgtcacttagaaacctgcacctcggagttactgttaatgttcctgtttgatatttatccttttttttttcttttaatttatttacttttgagacagggtctgtctgtgtaaacgaagacatccgcccacctctgccttctgagtgttgggattaaaggtgtgcgccaacacgcccagctttctcttcttctaatgttagaataaagttacttttacaggggacactttacttcgaactgtaagaatttgttttctggtctagaaggcagattggctaacagctaatgcctttccctcaagcctcacagctcacccatttgcatttatctttggattttgttctttgacatacacgtgaaaagtgtgtatgtgtgtgtgtgtgtactagtaagctgaatgttgccaaacataaaacgcatttacacaaaattactcagatccttagcgttctggaaaggtctgtagcggtagctgagacacttccccatccatttatttcctgttttttggctagactctgagaaattatttctcaagcagatccttgtcttaaagagctcatggcgtgctagagaaggccagcacagagcagttccacaccacgatgctgtaaagtcactagtcaaaggaacttctttgaaggatcggccttgaacttgaccacctggaactccatgggcttccccgttgaagacgatgcttggaattcttccttttaaaaaatttatttattttacgtgtatgactacatggttgctgtcttcagacacaccagaaggcagcctcggatcccattacagatggctgtgagccaccatgtggtggctgggaattgacctcaggacctctggaagagcagtcagtgctcttaaccccccatggaatggagttttactgagcaggaaacaagacgtgacacaatcagaatccagacctgggaccgagagcacttactgtgttgtgtttagggagcaggagagctttgggcagcccagctccccaggttctgtgtggaagacggacttggcgaaaatacccatgagcagcagctgggtcagcggcggagggacgctaactggcctggagaggctgtatacagcagcttccagtgactggatatgggaatcgaacagccttgcatggcgtctcaacagtcaaccggatgaactgcagttcctaggcatcgtagtcaggtgggtgtgtctggtgagcagctggagttgcatctgaggctcaggcaagggactggggttatacaggaggggtcatcttcgtaggactgtggcatcaggtgcagggggcaagggcaaaggcacgggagacagaggccactgcatctgtacccacatcagacatgtttgtccattttctctcatttggccttagaccattggcaagagtaaatgctcttagtcccgttatctagaaatttcttcctttggggagaaccacttatagacaatatcagctctctacaaataacacgaaaggtcgtaacacagcaagtgaccagaaagtgcccgtccttgcggctctgatccacgtggctctccgtagacaaattgtttttcttgtagggatatctgttttgcttctgaactttcttacaagtgtttgggactccttcggggtggcgtttgtgtgggcagcatgagctaagcagtgacctccactttatccagactgaagatggatttggtcgttacaggtcgctctaggccaggtttggaaacatccggttttcttcttaaggaaaacagtggagtctgtcccaatcgcagtcccacaggagggagggttgccataaccgggagtaaccaatccctgattcccggaagtcgagtttcacaccttgctttatttaaaaaatacgtacaaaagagtcatgaaaaacacgcccagactaggctttgtggcagccgagtggcttggcatgaatttgtacagcggaatcatcgggcacgaaggattggatacggagatggaatccggctgccatcgcagcgggaggtgaaaatcctttttaagagcactgaagggctgggatttccctggaatagtaagcttcgtgaggtaggagtcgtgtccagggactgtaacctgagaaggaacaagaaacaattacttgagtgatttcagatgggtgtgaggtccacgcagaagacagatctccacccctttgagcggtgcatgcgtggcttgaaagcggtccacgcctccggggctatagcgcccggaaagttgccagtgtttcttgatgtaggcctttggtgcaaatgctaccaagaattacaaaatgaagtaagaacagagagggggttcagcatctagtgaaggaaaagactaaatggaggaagccacgactgattctgccacggtcattttcagtgtgccggggtaaaggtgctttttttggaccaagcctagagtatccttattggatatcaagattgtgagtagattcttccttcaacttactcccattctccttgccactgacctaaggtgtataactctacttcactccccacccctcctttttaaaaagaaagaaagaaacaaaacaaaaccaaacccaaaaccttgcacaagagcggtttttttgcctgcacgtgtctaccacttgcatgcagtgcttacagaggccagaagagggcaacagatttcctagaactggagtcgcggatggtcagttgtgagccacccggtggattccagaacttcaacccagaccttcggagcccttctaccactttcttttaaaacttttaattgtgccaggcggtggtggcgcatgcctttaagcccagcacttgggaggctgagacaggcggatttctgagatcgaggccagcctggcctacaaagtgagttccaggacagccaggactatacagagaaaccctgttttgaaaaaacaaacaaacaaacaaaacccccaaaaccaaaaccaaaaccaaacaactttcaattgttttaaaaactagttttgttcttgtgaatcttcaggtaggttgcgattgctcttggagttgctacatagaccaggttgacctcaaactcactgggtccacctgcctctgggcagtgctggcattcagggcttccttttgagcactttatatattctagaaactcatctcttaatggagaagtcatttgcagatctttttccccaggtctgaagacacagggacaatctgctcttggctcctttgccatgcttcctggttcgtttttctttgtctatcttaattttgtgcctttggggctctatctaaaaaaaacccatcgctttacataaatggcttgaagtgtttccattgttttcaagcacgcacacacacacacacacacacacacacacacacacacacacacacaatttatacctaggagaagctcaaacatctgcatctgcagctgtggccaggagaagtgaatggtaggtctggagccacccggtagctctgttcctggagctgggggacccagctggcaccacctgtctaagttcctgattgacaggtaggactgaggggctgtcttgctacagtgccaatgctgtggttggcagggactcccctagatctcgtgggggcagactgagacagcagcggggcttgtggcatgccacatggtagcagggggggggggctgtcttttcttcagtaaaatgtgctctggaccaaggcttcagccagagtccaagatggctgacagctcctatgccaagatggtgtttggcagtggctatggaagggcaaggaaaatgacaaagaaaagccactttcagaagagctctctagattggatttaaagcttgggattcctcattcatggttccctgccacactggtgcttgctggcatctcccatcgtcctcagttcacaggcaggcctgggtgccagggctgaagctgctgagtgtttctctctttcctctggggtcatttccaggcacacctttgtgcatcttcctaattccccctctttcgctcctaccatgtggtgtctgcttagctgccctgacttctctggcagggctacctgtaaggcaccttggcttacactggcttcctcctgggctgattgattaggttatccgtgtgtgtgtgtgtgtgtgtgtgtgtgtgtgtgtgtgtgtgtgtgtacgcgttagaatagccgtcttgagctggggatggttcactgggtgaaagcgcttgcccagcaagcccgacatgattcagtctctagaatgtatgctggaaggagcaaactgccctcaaagctgcttaccaacttctccaagtgtgctatagcccacagatgcgtacataattgagaaaacatggtaggtgcttggttaggaaaacatatgactttcctcccggagacagtgtttctctgtatagccctggctgtcctggaactaactctgtagaccaggctggccttgaactcagatctgcctgcctccgcctcccgagtgctggggtcaaaggcacatgccactgagatgccaaagctttgaaattcagactccattttagaaaacctgacctaagtgtgaactcaggtagaccaacaggctggtatctaatagcattagtttccaagttgccccccaacagaacctgagcctagctcccgtctctagtctaatccccaacaagagcagagtttccaggttacaccctcaacaggaccagtgtctccaggctatttccccaacaaatctgcacccccaagttacaagcctaccctctgcctaacgaccaccaatgcagaggggagcagaagttaagtctatgatagactcccagcaccagccaatcatgttaaaggccacaggagctttccaatgagatgcttgcacatgtactccctgcttgctgcttactataaagccttgacccatagacattctgggctccccaccaccaccaccaaaactgtcctgccctgcgtaatggtggtgcgttgggggatgggcgggagggttgttcgaacagaataaagaccctggtgagttgcaccagattggctcctgtgtgtgttttgggggatcactaacatttccctggcgcaacaccatcactgcgagactatatgtgattccccctcattggtttgtttctgccttccactcctctcctattgcaggcctgatgttaaccttgccttccaagccttgctg

SEQ ID NO: 170 - DNA, 1710 bp, Mus musculus
gaggagccgccgccttctcgtcgctcgagctctggacgaccatggtcgctcaggccccgtccgcggggcctccgcgctccccgtgaagggtcggaagatgcgcgggaagtagcagccgtctgctgggcgagcgggagaccgaccggacacccctgggggaccctctcggatcaccgcgcttctcctgcggcctccaggccaatgtgcaataccaacatgtctgtgtctaccgagggtgctgcaagcacctcacagattccagcttcggaacaagagactctggttagaccaaaaccattgcttttgaagttgttaaagtccgttggagcgcaaaacgacacttacactatgaaagagattatattttatattggccagtatattatgactaagaggttatatgacgagaagcagcagcacattgtgtattgttcaaatgatctcctaggagatgtgtttggagtcccgagtttctctgtgaaggagcacaggaaaatatatgcaatgatctacagaaatttagtggctgtaagtcagcaagactctggcacatcgctgagtgagagcagacgtcagcctgaaggtgggagtgatctgaaggatcctttgcaagcgccaccagaagagaaaccttcatcttctgatttaatttctagactgtctacctcatctagaaggagatccattagtgagacagaagagaacacagatgagctacctggggagcggcaccggaagcgccgcaggtccctgtcctttgatccgagcctgggtctgtgtgagctgagggagatgtgcagcggcggcacgagcagcagtagcagcagcagcagcgagtccacagagacgccctcgcatcaggatcttgacgatggcgtaagtgagcattctggtgattgcctggatcaggattcagtttctgatcagtttagcgtggaatttgaagttgagtctctggactcggaagattacagcctgagtgacgaagggcacgagctctcagatgaggatgatgaggtctatcgggtcacagtctatcagacaggagaaagcgatacagactcttttgaaggagatcctgagatttccttagctgactattggaagtgtacctcatgcaatgaaatgaatcctccccttccatcacactgcaaaagatgctggacccttcgtgagaactggcttccagacgataaggggaaagataaagtggaaatctctgaaaaagccaaactggaaaactcagctcaggcagaagaaggcttggatgtgcctgatggcaaaaagctgacagagaatgatgctaaagagccatgtgctgaggaggacagcgaggagaaggccgaacagacgcccctgtcccaggagagtgacgactattcccaaccatcgacttccagcagcattgtttatagcagccaagaaagcgtgaaagagttgaaggaggaaacgcagcacaaagacgagagtgtggaatctagcttctccctgaatgccatcgaaccatgtgtgatctgccaggggcggcctaaaaatggctgcattgttcacggcaagactggacacctcatgtcatgtttcacgtgtgcaaagaagctaaaaaaaagaaacaagccctgcccagtgtgcagacagccaatccaaatgattgtgctaagttacttcaactagctgacctgctcacaaaaatagaattttatatttctaact

SEQ ID NO: 171 - DNA, 1470 bp, Mus musculus
atgtgcaataccaacatgtctgtgtctaccgagggtgctgcaagcacctcacagattccagcttcggaacaagagactctggttagaccaaaaccattgcttttgaagttgttaaagtccgttggagcgcaaaacgacacttacactatgaaagagattatattttatattggccagtatattatgactaagaggttatatgacgagaagcagcagcacattgtgtattgttcaaatgatctcctaggagatgtgtttggagtcccgagtttctctgtgaaggagcacaggaaaatatatgcaatgatctacagaaatttagtggctgtaagtcagcaagactctggcacatcgctgagtgagagcagacgtcagcctgaaggtgggagtgatctgaaggatcctttgcaagcgccaccagaagagaaaccttcatcttctgatttaatttctagactgtctacctcatctagaaggagatccattagtgagacagaagagaacacagatgagctacctggggagcggcaccggaagcgccgcaggtccctgtcctttgatccgagcctgggtctgtgtgagctgagggagatgtgcagcggcggcacgagcagcagtagcagcagcagcagcgagtccacagagacgccctcgcatcaggatcttgacgatggcgtaagtgagcattctggtgattgcctggatcaggattcagtttctgatcagtttagcgtggaatttgaagttgagtctctggactcggaagattacagcctgagtgacgaagggcacgagctctcagatgaggatgatgaggtctatcgggtcacagtctatcagacaggagaaagcgatacagactcttttgaaggagatcctgagatttccttagctgactattggaagtgtacctcatgcaatgaaatgaatcctccccttccatcacactgcaaaagatgctggacccttcgtgagaactggcttccagacgataaggggaaagataaagtggaaatctctgaaaaagccaaactggaaaactcagctcaggcagaagaaggcttggatgtgcctgatggcaaaaagctgacagagaatgatgctaaagagccatgtgctgaggaggacagcgaggagaaggccgaacagacgcccctgtcccaggagagtgacgactattcccaaccatcgacttccagcagcattgtttatagcagccaagaaagcgtgaaagagttgaaggaggaaacgcagcacaaagacgagagtgtggaatctagcttctccctgaatgccatcgaaccatgtgtgatctgccaggggcggcctaaaaatggctgcattgttcacggcaagactggacacctcatgtcatgtttcacgtgtgcaaagaagctaaaaaaaagaaacaagccctgcccagtgtgcagacagccaatccaaatgattgtgctaagttacttcaactag

SEQ ID NO: 172 - DNA, 52242 bp, Homo sapiens
  misc_feature (51242)..(51261): "n" at positions 51242 to 51261 can be any base
cgagtagctgggattacaggcacctgccaccacgcctggctaatttttgtatttctagtagaaacggggtttcaccatgttggccaggctggtctcgaactcctgacctcagatgatccgcccgcctcggcctctcaaagtgctgggattactggcgtgagccaccgcacttggcagttcttttttttcttttttctttgagatggagtctcgctgtgtcgccgaggctggagtgcagtggcgcgatctgggctcactgcaagctccgcctcctgggttcatgccattctcctgcctcagcctccagagtagctgggactacaggcgcccactaccacacctggctaatttttttgtatttttttagtagagacggagtttcaccatgttagccaggatggtctcgatctcctgacctcgtgatccacccgcctcagcctcccaaagtgctgggatgacaggtatgagccaccacgcccggccagttcttttagtttttaaagcagtctcatttcagttattaatattgacttcttcattttgaaacttcaaataatatttgattcaaagctttcctcctcttaccagagcaggctggacctgtggccctggtgacctggaattggaaatgggggtgtgggatgtagggcataggtcttcttgtcacatcccattctgtcttcccaattattacttgtggtactcagaattccaagaatgactcccagtgaccttgcctatggatgatcccctcccctttaagcgtgggaggaacctgtgaatatgaggagatattactcccatcattctgttacattacatggcaaaagggagatgatctgggttggcctcatcaaatcacatgagcctttgaagtcagagtttttttctggctgatagcaggagagtaagtcaggttcaaagcacaagggtgattcaacaccctgttgctggcttgaagatggaggggagtgtgtagcaaggaatgcaggaagccttcaggagctgagagtggtcctcactgctagcaagaaaaaggggactaccgtcctacaaccacaaggaactgaatttggctgacaatttgaataagctagaaagcaggttcttccctagatccttaagagcccaagctggcccacaccttgatttaggctttatgacacctggagcagaggaaccaggtgagcctacctggatttctgatatatggactgtgagctaataatttgtgttgctttaagctactacatttatggtaatttgttacacagccatagaaaaccacacatgactcctgccatcccgataccagttggggtggcaaggaggaaggagaggaaaattacatttctttacataattgcccttcaaaattagttgcccttttattagcaggacataactgtggttcattgtatgaacaacctcaactagatcatgggaaacatttctgtccctttctgttggttgtcccagtttctctgattattaccaattgaccaccagttctcttcatctggcaggtgtccaaatgatatttctccagaaagactcgtggcatggtcctggtaggaagttgagtaggggtatatgaatgaagctcaacttctttctccctagtccagcacattctaccaatagatattctatgtcttttgcttccagggttctattacccaggtagtggccattttaggagttaccagcagaactgcttatactccttccatcttctccaggaaccacttaatctgggggaaactccagcaacctttccaccccaaagagtggggatgctgttcaacttcactacctttcttctgccagctgaatggctctgtaactttcagactagatacgatcacagatctcagatttaggtcagctgggagattataaactcttcgttccacgaaaagatgacctctattattcctggtccttccttaaaactcttaaacgtggccgggtgcagtggcgcacgcctataatcccagcactttgggaggctgaggcgggtggatcacctgaggtcaggagttcacgaccagcctgactaacatgatgaaacatgtctctactaaatacaaaaaattagctgggtgtggtggcacatgcctgtaatctgagctacttcggaggctgagacaggagaatcacttgtatctgggaggcggaggttgcactgagccgagatcaagccattgcactccagcctgggcaataagagcaaaactccgtctcaaaaagaaaaaaaaaactctcaatggtaaaagttatcaaaccagttcagcctgtattgcccttgtgggaaccagagtctcaggccaagaattgggccttatttgaacttagctttagagaattgagcgttcttaacagggcaatattcctactaaaatctctgaaatatttgttatcttctaagagcaggaactcaattatgctcccatatcattgtgtaatatttttcctcttaaaaattcagttcataaatgtccaaaaaaagagatctattgtaactaagtagaattttatctgagtaaaacaaggaaggtcaatattggaaatctatcaatataatctcaccacatagacagattaaaggagaaaagccacagggtcatttctaggtgcataaaaaagcagtgtataaaactgaacactgattcatacttttttataagctcaaaaaaccaggaatagaaggaaacttttatgtaataaagagcatctacctaaaatttacagcaaacatcacattttaaaagcatttttactaatgtcatgaataagatgaggatgcccactatcattgctactattccattccaatggttgtaagaaaatgaaaaagaggtttaaggaagagacaagttagtgatttttgcatatgatattattaacatagaaaatccaagagcatctactgaaaaactaatagtactgtataacaaaacaaaatacagcctgtaatcccagcactttgggaggccaaggtgggtggatcacgaggtcaggagttcgagaccagcctggccaagatggcgaaaccccatctctagtaaaaatataaaaattagccaggtgtggtggcacgcacctgtagtgccagatactcaggaggctaaggcagaagaatcctttgaaccagggaggcagacactgcagtgagccgagattgtgccactgcactcccgtctgggtgacagagtgagactccgtctcaaaaaaaacccaaaaaacaaaaaacaaaaacagaaagaacaaaaaagcagtattgctggctggctataagatcaaaacacaaaaatgagtaattgtttcatatgttagcaataaccaaatagaaaataaaatgttacggctgggcatggtggctcacgcctgtaatcccagcactttgggaggccgaggtgggcggatcacgaggtcagaagatcgagaccatcctggctaacacggtgaaaccttgtctctactaaaaatacaaaaaaaaaatagccgggcgtggtggcaggcgcctgtagtcccagctactccggaggctgaggcaggagaatggcatgaacccgggaggcggagcttacagtgagccaagatcgcaccactgcactccagcctgggtgacagagcgaaactccacctcaaaaaaaaagaaaagaaaattttaaaaggtgtaatttaaaaacagcaataaaacttataaagcacttcagaaaaaagccagccaaacatacaacagctttaaggaggaaacaataaagcattattaaaggatgttaagagagacctaaaaatggagtgatatatcatgttcttatctgggaagaattcatactgaaaataagtcaaattagtctaacaatccaatgcaatgaaaagcaaaatcccaagaggattctttttgtgaattagacaaactggttctaaaagttaacatccaggaagagccaaaacaatactgaaaaagataaagagagcttttcctgttacatattgaaacttactctaaggtttactattctgttgcccagcaagtcctcttataggtatgcagcctactgtccgtgttgtttatggattcataaatttacagtgaatgtataaaacacagacttagtggacaggcatcaaattgatcattatcaagagaagggaggggaatgggataaagaataacagtgaaattttaattttttaagcaatgtttcattaaaaaaatttatttaggccaggctcagtggctcacacctgtaatcctagcattttgggaggccaaggcaggtggattgcttgaggtcgggagtttgagaccagcctggccaacatggtaaaaccccatctctactaaaaatactaaagattagccaggcatagtggtacaatcttggctcactgcactcagtgtgggcgacagagcaagactctgtttcaaaaataaataaataaataataaaaaaaatatgtttgatgcaggaatgacaaatgtgaattctgggtagtggtttctttttttctttttttgttcttcagagcagaagaacttgaggcggtggtttcttttgttgaatattaattgttctgtgaatgtttctgtatgtttcagtcaaacaaaaagttgattaattttcaaagtaaaaacaaaaagtctttgtattcactacttgctgggattttgctttttattttttactttatttatttatttattttttgagatggagtctcactctcactctgtctcccaggctggagcgcagtggcatgatctctgcctcccaggtttaagcaattctcctgcctcagcctctggagtagctgggattacaggcgtgcaccaccatacccggctaattttttgtattttagtagagacagggtttcaccatgctggcccaggctggtctcgaactcctggcctcaggtgatccactcgcctcaccctgccaaagtggtgggattacaggcatgagccaccatgcccggcctattttttacttttttattttccaggacagagtcttgctctgccgcccaggctcgagtgcagtggcgcgatctcggctcactgcaacatctgcctcccaggttcaagagattctgctgcctcagcctcccgagcagctgagattacaggcttgcaccaccatgcccgcctaatttttgtatttttagcagggacggggttttacatgctggtctcaaactcctgaccttcagtgatctgcctgtcttggcctcccaaagtactgggattacaggcgtgagccactgcgtccggcccggattttgccttttaaataacactattcagttccagatgtttggaaagacataaggaatttgaactacttctgtaattttagatggtctcataaatattgtgaaactcagcattctaaacacggtttctgagctaaatcttgtttagttttcaccatgctttaaagattagttgtggccaggcacagtggctcacgcctgtaatcccagcattttgggagggtgagacgggtggatcacctgaggccaggagttcgagaccagcctggccaacatagtgaaatcccgtctctactaaaaatacaaaaattagccgggtatggtggcacaagcttgtaatcccagctactcgggaggctgaggcaggagaatcacttgaacccaggaggtggaggctgcaatgagctgagatcgtgccactgcactccaacctgggtgacagagtgagactccgtctcaaaaaaaaaaaaaaaagaaagacaaaagattagttatgactaataaatacaagtacgaagtggcccttgggtcaagataagtctgttgtagacttttttttttccccttgagacatggtctcactctgtcacataggctggagtgcagtggcaggatcacaccacaacctatccgggctcaagccatcctcccagctctggctcccaagtagctaggactataggtgagtgccaccacgcctggctaatttttttttgcaatttatagagacagggtttcgccatgttgctcaggctggtctcaaactcttggcctcaatagatcctccagccttggcctcccacagtgctgggattacaggtgtgagccttgtttgcagagtttaggtcccagagaatataaagacactcaaagtatctcaacctcttggaacacctcttgggcatcaagaacaacgctactagaaataagcagtttgcctctagagaaacttcaagtaagcacaacaaagggcaaagtgacacaagataactgtggaatgcaagcaaacagcagcagctggtctgtatttttttaaatggcaaagtcacaaacaacagcaactgcttttagagtgagcaggtagtttgctttcttttttttcaaatggaactcactttttaagtgatgacatgcacttgggggtgggtaggtgtgagttcatttgtgttttgaaatcccaaattaatgagcatgataaaccgctattgctggccctgtctgactctctactctgagtaattggtgggttccccccaaccttctcctaaccctcaccctttttccctttccattgacttgggacagtccttgtcaaagtgccaatcacagtgggaaggaggagaaggggggaggtcacagtgcatgggattcaaggtcacagtgggcggagcaacggggatcaccaggcaagtaagtcaagttcccgctgctcaagtccagctgtctgccacggtagtgcaacccttggcggacgacccaggacgcgttgacgcggcagtcgcgccatctcttcttgcctgcatttatctgcgctgtttgaagccgtgtgacccatcaggacccagaggctgtctgatcacattattgggctgtctgctgtcttcgggttaggagatcctggttggcctgaagggaagaagatcagaggaagacctatcgaggatgggtttctcctgcttctcctcgggttggcgctgcccaggatccgcttcctggcctcggtgtactcggcttcccactgtgccagggacttgactggaagggcgggcctgctagcggacttggggctgctgaccacaccgttgctggtgggcctcttgaggatgcggacctgtggagggggtcccgggggaaaattatcatcctgaatcacaatgggcactttgggagatttgaatttcctgctttctgtgtgatcttcagttttttttccagacgtctatttccccgctgtctgccgtctcctcccagctctcagcaacctcctcatattccatcttactcgccactttccagatcgcttgctttcttatttccacattttctctgacttttgcagtattcaatattattacctgattctgatttttcagacatcactatatggtccttggctttttggtcgttcctctcattcctttgctgtttcaagctctgttcccagcctaagctttttaccaccgaattctgttctgtgacccataacttaaaactaacccaacttttcattccctccagactttttttggtaagcagtatcatcatgctttaggtggacactgagtcatactgctgtggtagtgctggtacacgtagttttgaataccaggttcttgagtgaatcctttttacttctctctctctcccccacccccgcttctcccttctgccttcatttctgacccttcttttctggttccattagaaaaggactaatcttatcagttctgcctttttttttctgctctaataattttgtcaagataattttttcaaagcacaaggccaatgagaagggggaaagtcggtccagaaggcagccggcccgactattctgagtttgaatctactcttggtggtcctgttaaaatacagtttgaagcaaatcacttgtttttatgcttctaatgtctactctgtcgaaagcccaaatttccttgcttggcatttaaggagactccaagttcttaaaacttcttcttgactttcatgcaagtcaaacggatttatttattgtatctcaaacagtcctcttatattttcctttctgtattttttgataattttcttgtgcctggaatattctctgcttttatttaagtctcaccatctttcaagacacaaaatatgtgtgatctctgaggcctttgtgaactgcctccagcatttactaagcaattaattctgtctctgaacttttatagcacaaacccattcgttcacttgatatttaacaaatatcaacctctatcacttatctcttttttttttttttttcttctgagatggagtcttgctctgtcacccaggctggactgcagtggcgcgatctccgctcactgcaacctctgcctcccgagatcaagcgattcttctgcctcagcctcccaagtggctaggattacaggcgcccgccacggggcccggctaatttttgtatttttagtagagacaaggtttcaccatcttggccaggctggtctcgaactcctaacctcgtgatccacccacctcagcctcccaaagtgctgggattacaagcgtgagccaccgtgcgcagcctatcacttatcttttcatgcttacattttctcactgcttgagattttctttcatccagggtcaagcactgagtctattagaaaccccactgtatatgatctgatgaagatgagattatctttttaaaagccacatattaaatctcttaagttaataatattggcaatcaacttaaatcaactgagtgaccactatgtttaaggaagtttcctttctggtaggctgggaagcgggagaagggaaggatataactttataaaaaaaaaaaagctgcagaagggaaggatataactttataaaaaaaggtccttgttcacaaggagctaatcacttactggccagagaagaaacgtgttccttctttgcaatggctgtgtttttgggtttagctaactcaattctttatgtcctcaatttatgagaccgcatcaaaaacgtttttgccacatctctgtgggaaagtaggtgagtcagaatgagtgcataatatataagtatatattttaatgataatgaatgtgtagattaacaaacccaaactttgtttttgtttttttgagagtcttgccctgtcgcccaggctggagtgcaatggcatgatcttggctcactgcagcctctgcctcccgggttcacaggattgtcctgcctcagcctccggagtagagtagctgggattacaggtgaccgccaccacgcccgactaatttttgtagtttttagtagagacggcgtttcccatgttggccaggttggtcttgaactcctgacctcaagtgatccacccgcctcggcctacccaaagtgatgggattacaagcgtgagccaccgcgcccagccaaacccaaacattctaaaagcgcagagtaaccgctcccctccccgccaacggtaaccagcatcttcgttctccaaccagaacagctgtatgcaccggtgtataagcctgccttaagtgctatttttaatcttttttaaaaacaggccttaaaataactcatttgggtacaactccagcggctggtggagtgggcttaatatattaaacagctgttaattttggtttctttttggtaacagcgacacggagatccgcatttgtcgcagtttccaccgcgggcgggaagtgtaaacacaagaaatacaaacatagcgcaacggctaaaggagtgtcacagcgccaaaccttgctggctccgcgccaggccgagccccaccctctcagctcgcggccaacacccccaccccgcctcacagcccgccgcgcccgcggggcgacaccccccactccatcatcccggaggtggtgcggccgagccccggacccaattggcggaagcggggccggttgtgtgcgcgcgcacaaatgcccggatgcgccgcgacgacccgcgcgctcccctcgggcggtagggggcgcgcaccgaggcaccgcggcgagcttggctgcttctggggcctgtgtggccctgtgtgtcggaaagatggagcaagaagccgagcccgaggggcggccgcgacccctctgaccgagatcctgctgctttcgcagccaggagcaccgtccctccccggattagtgcgtacgagcgcccagtgccctggcccggagagtggaatgatccccgaggcccagggcgtcgtgcttccgcgcgccccgtgaaggaaactggggagtcttgagggacccccgactccaagcgcgaaaaccccggatggtgaggagcaggtactggcccggcagcgagcggtcacttttgggtctgggctctgacggtgtcccctctatcgctggttcccagcctctgcccgttcgcagcctttgtgcggttcgtggctgggggctcggggcgcggggcgcggggcatggggcacgtggctttgcggaggttttgttggactggggctaggcagtcgccgccagggaggagggcgggatttcggacggctctcgcggcggtgggggtgggggtggttcggaggtctccgcgggagttcagggtaaaggtcacgggggccgggggctgcggggccgcttcggcgcgggaggtccggatgatcgcaggtgcctgtcgggtcactagtgtgaacgctgcgcgtagtctgggcgggattgggccggttcagtgggcaggttgactcagcttttcctcttgagctggtcaagttcagacacgttccgaaactgcagtaaaaggagttaagtcctgacttgtctccagctggggctatttaaaccatgcattttcccagctgtgttcagtggcgattggagggtagacctgtgggcacggacgcacgccactttttctctgctgatccaggtaagcaccgacttgcttgtagctttagttttaactgttgtttatgttctttatatatgatgtattttccacagatgtttcatgatttccagttttcatcgtgtcttttttttccttgtaggcaaatgtgcaataccaacatgtctgtacctactgatggtgctgtaaccacctcacagattccagcttcggaacaagagaccctggttagtatttttgtctcgtgtaacttttaagaataatttattttatgaagtgataaactaaatttcgtatacctcaattgtagcatggctctgtaaataaaattgtatgtgcatagcttaaagtgtgctacctctggcgtaactgcgtggagttaaaaactgttaagaactggtcagtatttttttagccatttgccacatttgctttaaaaattagttccattacattgttaagcgtggttgaagttacgtttgttacgtgactgatttttttttcctttttgacctcccagtatttaatttttaaaaatggtttctaaaagtcaaaaaaattattcgtgcttgttttaaagatttttgtcattagagaaattttaaagtaaaacctgaaaattccaggctttttgctccatgtttccttttagattttttgtgtgcgtacccacatatatttacatttgaatttaaatctatgttattgtcctgtttgttgtactaacaagatgaaactgtagttgttctgtgacttgcatccttgtcaataaataaagtctacagaattctttttaatggctgcatagtattccacagcatgagtataccattttaaaaattatttatgcctttactgataggtttttaaaaattgcctcctgtttttgagtattacagatagtgccgctttgtacatgcatcccgtgtgactatttctgtaagaaagattttatagaattataggctggcctcggtggctcacccctgtaatcccatcactttgggaggccaaggcggaccgatcacctgagatgaggagttcaagactagcctggccaacatggtgaaaacctgtctctactaaaaatacaaaaattagtcgggcatggtggcgcgcgcctataatcccctgctgaggaggctggggcaggagaatcgcttgaacccaggaggcagaggttgcggtgagccaagattgcgccatttcactccagcctgggcgataagagcgaaactccgtctaaaaaaaaaaaaaagaaaagaaaaagattttagagaattagaactcctgagttctcaattttactatttgattgctactggtaacttgctcaccaaaaggctctaacagtttcactcctgccaatactgaatatcaccaatctttaattattattattatttttttttttgaggcggagtcttgctctgtctcccaggctggagtgcagtggcacaatctcggctcactgcaatctccgttccccgggttcacgccattcccctgcctcagcctcccgagtagctgggactacaggcgcccaccaccacgcccggctaattttttgtatttttagtagagacggggtttcaccatgttagccaggatgatcttgatcccctgacctggtgatccgcccgcctcggcctcccaaagtgctgggattacaggcgtgagtcactgcgcctggcctcttttattattattactatttttttgataaaaggtactgtaccattgtttaaattcatttttctctagtttcttggtgaggctgggcacctttcctttttgtttttgtttttgttttttttgagacagagtttcactcctgttgcccaggctggagtgcaatggcgagatcttgtctcattgcaacctctgcctcacgggttcaagcgattctcttgcctcagcctctggagtagctgggattacaggcatgcgccaccacgctcagctaattttgtatttttagtagagatggggtttttccatgttggtcaggctggtcttgaactcccaacttcaggtgatctgcctgcctcggcctcccaaagtgctgggattacaggcgtgaatcactgcaccaggcctccattttgttaagtcatttatttcttctgggacttgcctagtcttatctgtccattttccttttagttttttaaaatttttcttagtaattggagtagctctatgtgtttcaagtatatttaacttttgttgtttactaatgtagcatttaattttatgttgtcttttccccattgagaacaattctgtgaagtaaaatttgttggcttttgaatttcatatcatgctttggaagaactctcctgtcccaagatcttgcaaatatattcctatattttcttctagatttaaattttttaaatatttagatcttcacctgtaatttaccttcttgttcttcaatgtaagattacaaatgctattatcttttatagctgttttctcattaatacatgtcttttaagtcactaatatactgatggctttccattacagatttttttttttttttttttttgagactgagtcttggtctgttgcccaggctggagtgcagtggcatgatctcggctcactgcaacctctgcttcctgggttcaagcaattctgccgcagcctcccgagtagctgggattacaggcacccacctccacacccggataatttttgtacttttagtagagatagggtttcaccatgttgtccaggctggtcttgaacttctgacctcctgatctgcctgtcttggcctcccaaagtgctgggattaaaggcatgagccactgcgcctggcccacacctgggtaatttttgtatatttaatagagacggagtttcactgtgttggccaggctggtctcacactcctgacctcaggtgatctgcctgcctcggcctcccaaagtgctgggattacagacctgagccactgcacctggcttccattacagatttttactttgaattattttatctaatttgaagctaatatagcatataataaaaattcaggagaaaaaaggttatttttaaatcttttttgagagagtccattctttagcctgaaagtaaagtgcatatgtaagcacagttaaaaaaaaaaaagtgatcagaaaaattaataattcaattctatatgtattttaaatttttcaattgttaaataatatttgttttattgattagctggaaataggcaatttttaaaaatctgtttttaaggcatccccaatgggggtgctgtcagattttaaagttagacagaggaccggggcatattaaagagaggtgcagaggtaccagtttgtgtggtagtggcaagctgtaaagatacttgagttttgcagattttgataaaccaaaaggaagggagaaagtgcatagtatattacattcccctcccccatgacaattatttttctcaagaccatttgtaaaacctctagataaggggcaggcaaatgttagcctgtcagccaactttggcctgttacctgtttttgttttagtttttaaattttttttgtagaggtggagtctctcagtgtggcccaggctggtcttgaacacctagcctcaagcaaacctctagcactgtctcccaaagtgctggggttataggcaagagccacctctcccagccagctgcctttctttctgtaaggaaaattttactggaatgcaaccatgcccgttggtttacatagtagccatgctttttacttggatagaaccatttgtatgaaaagcttaaaatacttacagtctggctctttacagaaaaaaattgacccctaatctagttggcaggctccttgcatacaggtcatatgtcttatttgtaatttcttttgcagtacctaccactgtccagtgcatagtagaagctcaataaatgtttgtcaagtagatatttgaaatgtagactaactaagaggcagcatgatatagtaggaagaaaatgctgagttgtagttgagggacctgggttgttatctctgatctgttcttaattacccttgtcagcttgggttagttagttaggttctctagccttcaggaacctaatctttagaaagagaagattgataacaggacccactctaaagatttattcatttctctttgattctctaagttagcttgcaataagctcgttggatcagtacggtaagctcattggatctcagtaatttatggttgtttgtaaggcagtaagcaggtaatataaatagctgaaggaaaaagtaatctttgctcttttggattggatactatctgtgatcacaactgatacttgatgattccatgatacttgcataatgattagatcctccccagcattttttccaaatcccctttattgaacttgatggatatgtttgctgcagggcctatagttctgggataattttggaagtataatagcagttcttttctctttataggttagaccaaagccattgcttttgaagttattaaagtctgttggtgcacaaaaagacacttatactatgaaagaggtaagctgaatcaagagataagtagtatctcactagttacatgtagccatacttaaagttttcaagaccatgtggagaaattggccatatagaaggatttttcattaagcagcaacatttaattttgtggtcgtttggactatattttaaagctgaaaattctaattatactcgagtttcatttctcagctaggaactcagataaatggaagccccgtaagggtgcttgaccattttatgctgtcaaccctttggtagactccttcccagaatcatgtttttaaatgtatgaaataaaatgtatagaattacaaaggaaacatactaaaatacggttaccaaaatagtaaactagtttgtgatatgtgtgcttttgttattaacataataaatactaagatttagaagaagatataataaatataatgtttttttgttttttgagacgaagtctcgctctgtcacccaagctggagtgcagtggcacgatctcagctcactgcaacctccgcctcctagattcaagcccttcttctgccttacccttccaagtagctgggattataggcacctgccaccacgcctggctaattttttgtctttttagtagagatggggtttctccatgttggccaggctggtcttgaactcctagtctcaggtgatccacttgccttggcctcccaaaatgctgggattataggcatgagccaccatgcctggccaataaatattatcttgatatagtgaggaatataagtcatattttgaaatgtttgccataagtacagtatgataggaaaacacctctgatttttgttggtgatgaaatcacaggtattaatactgttgtgatttgttgcctacatttataatcgaaggaaaagctaaattctagttagaagtttgtgaaaataagaatagaattttttttttcccatccaaattaatggaccccctgaattctatccaaggacttcttgggcatccctggatcccaggttaagaacttctgcactagagatacatgagtacagtatactgatctttctgggatagaggtgagctgattcatgaccatatattctatctaatggttccagcattttaatgcattccccacctttaaatttgtgcacagaagcatgattttcagtgacagattgagccaccttaggcagaatttcagtgtgattgaaatatgcctgttctctgtctctcccacttagtttatgggactcagattacttaaaacatttaagtttctttcttacaacggtatagtggggcaggaagagcttccatttttctttttcctctccagctatacttttagaaacttccttaaaggatgtttggtagaataaatctaagttctcttcctttttcctttcccactgctggacagcaatctgtccaatccacagtcacataagaatattcctttaaggccgatgcctgcttagccagttaaatccaaagacagtgtttgtaggaaagggccaggttaaatggtatttttaaggctaatttgggattgaccttattatcattggataatcagttaaggaaacaaaaaagtatggatttagcagtagatagaaatgagaaaattggccaaggccatcataaagacttagaatgcttatgctaaactatgtaacagtagtgtatgtattgtctgatatagttctcagttataggatctttgttctggggcacacaggaaggtagtgaaagctagtatgggtagtaaaaagagcgttggattaagagtcagaagagctggggccagtttcttcttcttttttttttttttttttttttttatgtgacagtttctcactctcttgcccaggctggagtgcagtggcatgatcactgctcgctgcagcctggacctcgtgggctcaggtgatcctcccacctcagtgtctgcagtagctaggactacaggcttgtaccactatgcctggctaatttttgtatttttttgtagagatggagtttcactatgttgcccaggctggtctggaactcctgggctcaagggatctgcttacctcggcctcctaaagtgctagatttacaggtgtgagccactgtgcccaacgcaatttcttcatttctaatacagtgataataatcttatgaaatatcagaatgagataatacttataaaagtacattgtaaactgtaaaatgccatatgtatttaggtagttgttaataggtttatatctggatatcttaaaaatgtattgccaacttcttgtcttaatgcagcacagggaatataatttaacttttattaatggttcaaagtcattattttgattatttatcataatatggagtaaattgataccttagagggtttatttcattctcagaattctctcaaactgttttgtagctgtcattgattgattgtttttctgtcttcctcctctggtgacctcagaggctattgaggtttatagtatttatgactatttactaagtggctccagaccactgccatattttagttgatttttgtttctgcaacttttttggctatcagttttttattttgctgccttttcccttcctaatatgttagtatctaagtatctgggcagagttaaagtctacaaggaaaaaaacctcacattttaaggtttgcttaagtaaatagagaagcagttatttctgcttctgtcaaattaaatggaaaaggcttaaaagtagctttttttttttttttttttttttttttgagatgaagtctcactctgttgcttaagccggagtgcagtggcgcaatctcggctcactgcagcctccacctcctgggttcaagcaattctcctgcctcagcctccctaatagctgggattacaggtgtctgccaccatgcctggctaacttttgtatttttagtagagatgggaccaggatggtctttatctcctgacctcgtgatccatccgcttcggcctcccgaagtactgggattacaggtgtgagccactgcgcccagccaaaagtagcttctaagtacaaaatggttgttctacatagttgtggatatggttcctggttgtttacccctattcagataaataggatattattaaatgtatttacaactaacatttagttttctttaatgctcagaaatcatatttgtatttcaggttcttttttatcttggccagtatattatgactaaacgattatatgatgagaagcaacaacatattgtatattgttcaaatgatcttctaggagatttgtttggcgtgccaagcttctctgtgaaagagcacaggtaattcttcagtttagtccattgtaaaaagccatctgggctaacatttcagttcacctctaccctcattcacttttgtcagagaaaaactgttgaaacatattaaagacatgctgaaacttaattttttagctctgcggcatattatttgagaacctgagctctggcatcttataaaccagtgtttgaaacctagcccaatcatttactagttttgtgactagataaattaacctttttaaacctgcttccccatttataaaatagggataattaaatacttcatgtggaggttaaagctcttgaagagagacgttgtataaaaaagcatagttttgggcacatacaaagcattcaagtattagctgtagctattataactttttattccagaaacagtataccaccacgtggtaaaggcttacatttgagccttagttattttggagatcattttcattgtcacctatcattatggcacttaaccagcagaatttaacccaggtaatatttctagaaataggcctggtgcggtggctcacacctgtaatcccagcactttgagaggccaaggcgggtggatcacctgaggttgggagttggagaccagcctgaccaacatggagaaaccctgtctctactaaaaatacaaaattagctgggtgtggtggtgcatgcctgtaattccagctactcgggaggctgaggcagtagaatcacttgaaccaggcaggtggaggttgtggttgaggtgagccgagattgcgccactgcactccagcctgggcaacgagcaaaactgcatctgaaaaaaaaatttttttaatatatatttttctaaaattattcttttttttgtttgtttgttttgagagggagtcttgctctatggcccaggctggagtgcagtggcatgatcttggctcactgcaacctccgtctcctgggttcaagtgattctcctgcctcggcttcccgagtagctgggattacaggtgcctgctgccatgcctaatttttgtatttttagtagagacagggtttcacgatgttgaccaggctggtcttgagctcctaaccttcggtaatccacctgccatggcctcccaaagtgctgggattacagatgtgagcaaccacacccggcctacatttggaattctttgtcacatttggtttagcacaggcaatccgtgttgagccttagcattcattacattaataaatggaatgaatacgttcacctgagacaattaactagcttctgctagtatttaatgctcagtagtatagctgaaaagatgataattaaatgggattttattttattaaaaaacataacttcctcagctgagcaagggattttataactttaaaacaaccttattattgtaaacatagtatatattattattgaacattaggagatgacagaaaactaagaaaagtaaaggaaaaaaaaggactgtagtttgttaacaaaaggtatttttaccagtcatttgtgtattatgtgcaactgtgtgttttaacctagttatgaatatagtactatatttaaatttcatctagcttcttaatttgtattataatttgtatattatatattataatatacatataatataattatatatattacaaatatatgtataattattattttttattgatgagtcacttctgtttaatatccatatatgttgtcattttatacgtggccttggtatatatggtttaattttataaattttaaaaataactatattggtatattggtgatttctttacctattgaatattgaatcttctattttttttcttttttttttgagatgaagtcttgctctgttgcccaggctgcaacctctgcctcctgggttcaagcgattctcttgcctcagcctcctgagtagctgggattacaggtgcacactactatgagcagctaattttttgtatttttagtagagatggggttttgccatgttggccaggctggtctcgaactcctgacttcaagtgatctgcctgtcttggcctcccaaagtgctgggattacagacgtgagccactgtgcctggtctgaatattgaatcttcggataatgtttggaagtatgatttccttggacttgaattctaaatgttgagagataagaaataggagaaattactgacttgaaaaggatatgaattaaaaatattgtgggtttaggttgctgtatccttattcccaaggatgaaaaaagatagttgggattcatatttcctcttaatattgagtgagaaacaatattttgtgacaaacactctcttaaatccttagtttaaaaacaaaaggaaaaatccattgtgacatcaacgaatactggggtaaatgaattatcctcctgttaggatataaacttcatgagggcatatacatttctgtttcattctttgttttcccccgtgtctggtacatagtaccagtgactggtacgtggtaggttttcagtctgtatttattgaatgaatgagtactgctttatctgttaataagtttcttttttttcttccctgagtcggagttttgctcttgttgcccaggctggagtgcaatggcgtgatcttggctcaccgcaacctctgcctcccgggtttaagtgattatcccgcctcagtctcctgagtagctgggattacaggcatgcgccaccatgcccagctaattttatatttttagtagagatggggtttctccatgttggtcaggctggtcttgagctccaggcctcgggtgatctgccggactcggccttccgaagtgctgggattacaggtgtctgtgagccactgcgcccggcctctgttaatacgttttaagatcaagaaaggaagttgaagcttgatgaaagtcaagattataatcaaattcctatttaatggattttgcgtaactcaatagtttttttggcagtttgtatttaatggattttgcataactcaatgcttttttttggcagtttgctactaagcacagagctaaaaacattcctgtttgaaaataagtatgttcaacctcttcctgcttgcatactcattttttgggggtcttctggtaaagtccaaacaaagcacatttcaggaattggtagtgtgaaatctttcagctagagagactttagtaattattaaaagtagctgtacataatcattgtgctactaattattgtgcttttaagtgcctacaagcttgccaatgataaatttggttttgaatgtgtgcagtagttcatactaagtatgtatgtagaagtctggttagatccagcttaatacaaatttttattctaaaatgtacatctcttgttattttttttttttctgtctacaaggaaaatatataccatgatctacaggaacttggtagtagtcaatcagcagggtaagttaattttgagcatcatggataaataccataaaaacgttttaaagacatttttgtttatgtgcatatgttttataattgtgattctctttaaaagttgctttaattaaatattgtaataaaagtatgataaatttattagaagtacatatgaactaaaaccacatactgaggttctaatgtaaagttaaatatcctgttagatcaatttagacttgggatatcagagttaggatttattttgaaaggtctgtaatttcaaaagctcctgtttaggagtgatctaccttgaaaatgtattgaaaggctttgggaaataatattgttacctaggtaggaccatgtgtaaggatgaaggatgagtctttttctttggttatagacaaaattttgtttaccaatttgtggaagtggaattttatgttcctacttccgtttcttaactggttatttttgggtcacatctctctttaataagctgataaaagcattgggttcttgttccagaaagatgcacatgtatatatacatgggtaagtcaataagtgttttacaacctactttccatgagaaaagccctgatttatgtgcttgctgacttccatagtataatactctcatttgaaggctaaaaacatggagttgggaagagatgtacacagtttgctttttttttttttttttttttgagaaggaatcttgctctgtcactcaggctggagtgtagtggcatgatctcgactcactgcaacctccgcctcccaggttcaagcaattcttctgcctcagcctcccgagtagatgggactacaggcgtatgccaccacgcccggctaatttttgtatttttagtagagagggggtttcagcatgttggccaggctggtctcgaactcctgaccttgtgatctgcctgcctcggccttccaaagtcctgggattacaggtatgagccactgcacccggtctcacagtttgcttttgagtgctgcttagagctgtctctaatacactacactgctcctaaagcccatcctcgaactacagttaagaaatgctcttaggccaggtgtgatggctcatgcctataattccagcactttaggaggctaaggcaggaggatcacttgagccgaggagttcaagaccagcctgggcagcatggcaaaatcctaactctgcaaaaactacaaaaatcagcttggtatagtggtgcatgcctgtagtcctagctactcaggaggctgaggcaggaggattttttgaggctgggaggtcaggactgtagtgaactgtgatcatgccatccagtccaggtgacagagcaagacctcatctcttaaaaaagacaaaaacaaaacaaaacaaaaaaacacctctcaggagcttgtttagttcctagaatgaattgaccactcccttgtacttcctctattccatattcagattttattgtaaaattgctttgttttacttgtgggtttttttgtttgtttttgagatgggctctcactctgtcaccctgcttgaagtgcagtggtaatcttggctcactgcatcctccacctccagggctcaaatgatcctccccctcagcctcccaagttgctgggactacagatgtgctccaccacgcctggctaatttttctgtatgtttggtagagacggtgttgctatgttgcccaggctagtcttgacctgagctcaagagatattctcacctcggcctcccaaagtttaggggttacaggcatgagccactgcgtctggctgttgcacttgtttatatttttgttacctgtgtcctattcaggtttgcattgtgcatcacacactatagtgttttattaatatggtatttaataaatgtgttgaattgaatacttattcttccaaagttaggatttaaagcccagaaaagtatctccattttatcccaaaataaaagtagttattaggctgatgatttggcattttattgttttaaagctctttttttttttgagctttagattgtatcctttttatttcctttttttttaattattatactttaagttttagggtacatgtgtacaatgtgcaggttggttacatatgtatacctgttgttttaaagctctttaagaaattgtgtgatagctaaatatacaattgtagtatttgtagtagtagtttgagttttctgaagtatgtaaccctgatgtattcattccttcatttgtttaaataaactttggcacattactagaaaaattgtattattgagatggaaacttacaaattacttatttgcagtctgagtttggtttagatatcagtagaattaacttcagaactcctattccatgttctcaactttgtcacttttttttttttgagatggagtctcactctgtcacccaggctggagtgcagtggtgcgatctcggatcactgcaacctctgcttcccgggtttaagtgattctccttcctcagcctcccgagtaggtgggattacaggtgcctgccaccacgtccggttaatttttgtatttttagtagagaaagggtttcaccatgttgaccaggctggtctcaaactcctgacctcaggtgatcctcccaccttggcctcccaaagtgctgggattacaagtgtgagccactgcacccacccagcctagggcttcctttttattacatcttttttgtagcatctgtttatactaatccaaaattcctggacaatataacctattatgtacaacttaagaaaattagtgtaatgccttacccatagtataaagagaaaattaatctatgataatgcataatttcaaaatgttaatgtccaggcatgagttcactgttaagatgaaaatgtttccaaggggggtagtaaagggtatttgatgataattgtctgtatatcccaactctgaaactttgacttttgagctcaaagtctgtatatccaactacaaatgaaacctatgtgcctgaataactcagtttgttatcttcccatccaatctgtttatctttctaaagtttctcttttagtgaatggtaccactcatttattcacccaagttggaatcttggaatcatcttaactcctttcttccttgccttctatatcaaataccaggtcttgttggtttttacctatttaatttctctggaatttgttttccatgccttagtttaggctttaatagtttttagtttgtattattgcaattgtctaatactggttttcctgcctctgccctctttttcttatgttttgctagagtgatttgtcactcttctgcttaaaattaccatttaggggttcattattgctctctggatgtaatattttctgtgagctagaaatcagtttcatttcttggacaaaaatcctttttaatggtgagtggctgcaacatcgcattaaggaagattctgaagtatctgcggggaagaatgcagtgataagggaatgacagcatgagtcctgctttggctagaccacaggatcctttacagtctgaacctgcctacattccagtaataatgaactgcttgtggtgtcctgcaacaggaactgttgttagtttgcttttggatactttttcacatggcgttttcttggtctggaatggcctttcctagccctattttcatattgtcctacaaaatatttcctgattctttgtttctcagacactccctgtccctaccaaaataatgactctcctgtctctctgctaatttatctaacagtcttttaatgtcttgattatactttactcttctacattaaagttgaattattttatttacatctgcaacatttagtatgaggatgccacctggaaaatacatgtttaatgtttattgaaaggttaaattgcataagggtttgtgttagactgatagcatatctactgagtagcgccccgccgccccccgcccaccaccaagtttctgatcctttttcttttctctcagaatcatcggactcaggtacatctgtgagtgagaacaggtgtcaccttgaaggtgggagtgatcaaaaggtaatctaagtaaatttctcattctaatgtaatattatttgcaaattggaaaggttatttacaacaagttagcttactggttatgttaagtttgttgtattttatttttttcctaaatgcttaggaccttgtacaagagcttcaggaagagaaaccttcatcttcacatttggtttctagaccatctacctcatctagaaggagagcaattagtgagacaggtatatatgaatatttatttgacgcattcacacagctttttgatattctttctctaatgaaattagtgcttttagacttaattaaattgttccctttttttggttgagatgaattaacctctgagtttttttcattcgtgattttatttgatttacaaattgcttatttagcaatatttttctggctgactacagcaggcacagtttactgtgccccactggagtttatagttagccaactctctgttaagatagtaggaggtggctggggtgtggtggctcacgcctggctcacgcctgtaatcccggcactttgggaggccgaggctggcggatcacgaggtcaggagttcgagaccagcctgaccaacgtggtgaaaccccatctctactaaaaaaaatacaaaaagtagctgggcctggtggcgcacacttgtaatccagctactcaggaggttgaggaaggagaatcacttcaacccgggaggtagaagttacagtgagccgaaattgcgccactgcactccagcctgggtaaccgtgtgagacttcgtctaaaaagaaagataataggagacaggcatataaactctattttcaccattattcttagtcaccttaacagttaaatttttaaattgttatttttaataaatggtagtacatacctatgagttttaaaacagaaagtaaatagcattttagaaatgaagagataagggccgggcgcagtggctcacgcctgtaatcccagcactttgggaggccgaggcgggtggatcatgaggtcaggagatcgagaccatcctgtctaacatggtgaaaccccatctctactaaaaatacaaaaaattagctggatgtggtggcgggtgcctgtagtcccagctactcgggaggctgaggcaggagaatggcatgaactggggaggcagagcttacagtgagccgagatcacgccactgcactccgcctgggcgacacagtgagactgtctaaaaaaaagagagagagagaaaatagttgacagagagaaaatagttgagaacagttagtagacgtagtagacgagaaggctgttgcctgaggaagtcgcagtaactaagaccgtatgattcagatgaaagagaatgtcagatcagtgaaacagaataaatgaacccagaccagaatctcgtacatgcgggcagaagacaggaagggcagaggtgtctagggcagaggtggaactagaacaaatggtagttacttggggaaaaggtgaagttagatctgtaccttatgccaaaatgaatttcaaatgagtttaaaagttaaatgaaaaatagaatacaacatatttgaaagatagtcactttaaatttgactgttaatatctgtattacataaaaagtcttcccaaatcaataaggaaaacattaaaacttcaaatagcaaaaagggcagacagttcacaaaaatttctcacagtaaatacgaatgactaataaatatggggagagggtgaattttggtgatttttagctttacagatagtaaaaaatgccaaaagggtgtccttttgatctatcaaattagtaaaaataaaatttttactcatccttactcatcagtgctaataacttgtgtattagcactgataaactgttggtctgtaaattggtaaaagtgggtaaaaattgattaaatttttcggattataaaaaagcttagatggcctggtgcggtggctcacacctgtaatcccagcactttggaaggccgaagcgggtggatctcttgaggttaagagttcgagaccaacctggccaacatggtgaaaccccatctctattaaaaatacaaaaattagccaggtgtggtggcaggcgcctgtaatcccagctacttgggaggctgaggcaggagaatcgcttgaacctgggatgtggaggttgcagtgaaccaaggtcgcaccactgcactccagcctggggtacagagtgagactccatctcaaaaaaaaaaaaaaaagaaaagaaaaaaaagtcttagagttcttaacattatcctagtaactccatttctagtaatctatcctaaggatgtaataaaaaattcaaagatttatatgtagagatactaattacagcattatttataattgcagcccggccaagatcacctttttaaaaatagggaacacaaacatgattaagaactcacgtgcagaacttgtgatctcgataaaacgtaaaaatcccggccaggtccagtggctcacgcctgtaatcccagcaccttgggaggccgaggagggaggatcacgaggtcaggagattgagaccatcctggctaacacggtgaaaccccgtctctactaaaaatacaaaaaaaattagccgggcacagtggtgggcacctgtagtcccagctattcaggaggctgaggcaggagaattgcttgaacccaggaggtggaggttgcagtgtgccgagattgtgccattatactccagcctgggggacaagagtgagactttgtctcaagaaaatgataaaaaaagtcctttcagaaatctgtgatactatctcattttaatttttgtcattctcatgggtgaaaaatgatatcatttcactttgcatttctttgatccctaggaggtaagagtttttttttctattactcaagtacatgactcaagatttttcatatgtttattagtcatttgtatttcttctgtgacttgctttttcctgtttccttaaaagaaaatacagtctatcttgatttggtaggactttgtataatatgtatactatgggtaatttttactatatatgttgcagatattatcttcgaatttgacctttgccttttaacttttgtttggtattttattttgtcatgtaaaccttgacatggtctaatcttgatagtctttttattgaggactttgcagtattatgaaatacttctccaccccagcattataagaatattttgttataggtacttgaatggttttgttctttatatttagatctttaatccacctggaattcatttttatgtctagtataaggtagtattctcatttatgtctaacggatttgtctaacattctgacccattcagagataatttattatttaaaatgaaatggaaactttttactggttttgatttctgtttaaaatatagggtactgaagagccgggcttagtggcttaggcctgtaatcccagcactttgggaggctgaggcaggaggatcacttaaggccaggagtttgagaccagtgtggccaacatggtgaaaccctgtctctaccaaaaatacaaaaattatccaggcatggtggtgtgcacctttaatcccagctacttggaagctgaagtcacaagaatcacttgaacctgggaggcagaggttgcaatgagctgagaatgtaccactgcactccagcctgggtggtcgagtgtgactctgtctcaaaagaaaaagtgtagggtactgaagaaattgaaacattaagaataccatatgagtaaattaaacactttggctcttttcggaaaaaaacagatgagctcttatattttaaagtttggttttgacagaaaaaaattcctagattttttggttaataaaaactttattagatagattaaattgtgatgtatggagataaagttctgaaagaagaatagaaagctttttaaaaatagtattctcagcctaggcaacatggtgaaaccctgtctatgcaaaaaatacaaaatggtgcattcctatggtaccgttcctatggtaccagctactcgggaggctgaggttgaggtgggaggatcacttgagcccatgaggcagaggttgcagtgagccgagattgtgcctctgtactccagcctgggtgacagagcaagaccctttctcagacaataaataaataaacaaataaataaatacacacagatagtgttctgctgtaacagttggacagattcaataaaacagtgttaacttttgaactaattttattgaaactaagtttctgtacaaataggtactcaaaacagctcaattttctaaatcacagtacagcaatttattttttttccttacatatccagaagaaaattcagatgaattatctggtgaacgacaaagaaaacgccacaaatctgatagtatttccctttcctttgatgaaagcctggctctgtgtgtaataagggagatatgttgtgaaagaagcagtagcagtgaatctacagggacgccatcgaatccggtaatgttctcattttaagtaaggcaagactcttactgttcaaagtctagtcctggcagtcctaataaggatacggatagaatgtacatgtgtcttacgagattgatagaaaacacagtgctaaattttactttaaaataaaactactatattgatctccaccttcaacccaaggtattgtgagaaatgtggaaaatagtggagtaacaccggtattggtaaaattagtagtagtattagtaattatcaatgtcactgtatgtattagagaatatttgtggaccactgcaccaatagtacagtcaaataaattggagtatagagttgtttgagaatttgagagttacactttttaaaaaaggaacaaaaccaaaaatttggttcagttaaatattttagcattttaaggcaaatttgactatttagagtaaaaatatattttattacagccatcagcaaaaaagtcagcatagtctgaacttaacatttgccaaataggtctagacatcaggtaagttctatttacttatgctgtaaaatacaggtttatactgggctgggtgcggtggctcatgcctgtaatcagtactttcggaggctgaggcgggtggatcacctgaggtcaggagttcaagaccagcatggccaacaagatgaaaccatgtctttactgaaaatacaaaaattagccaggcgtggtggcgcatgcttgcagtcccagctacttgggggcctgaggcaggagaatcgctcgaacccaggagttggaggttgcagtgagctgagattgtgccactgcactctagcctgggtgacagagcgagactccatctcaaaaaaaaaaaaaaaaaatgcaggtttattattgcatggatgacgggagagtatcagtactttctcattactaatacagacttccaaaatattagtgagcagcatttcttaagagatgtcactgaaagaagtttggtaaaaaatttttttgttaacaagaatgcttgacaaatggaatattttgttttgtatgtctttaatcaagcttgtccaacccatgccctgtgggccatatgccaggatggctttgaatgtggcccaacacaaattcataaactttcttaaaatattatgatttttttttttacaattttttttctgctcatcagctattgttagtgtattttatgtgtggcccaagacaattcttccaatgtcgcccacggaaaccaaaggattggatacattttttggtaatatggcagtgtctcatggccattattctgggtattagtaatcattgtatagtactctagaagatgtaggaagtggaaccaattgtgatagtaatcctagtcttttacctattcttgttacttcctgtattatctttttttctcttccaaagcagtgattgtatgaacgcatacctgccctctagagttactgtacctaacggagctgttacttatgtagaccgctagatggcatgatgagctcctgctcagtctgagagcaggttcttcatttgtagatatttaagtttataccaaattccatacagttgagatggcactgcagatacagtggtagtcaaggtagatatggttcttgccttcattgggagatagatcattaatgacaaaaatgaaaacatttaataaatccagtggaaaaaataggctcttgagcggaaatatatgtgataaaattgaatccaattaaaacttgatgagtatccaacctacaagtttggttaaaaagagaattattataccctatttatttatttattgagattgagtctctctgtctcccaggctggagtgcagtggtgcaatcttggctcactgcaacctccacctccccggttcaggcgattctcatgtctcagcctcctgagtagctgggattacaggctcccatcaccacacctggctaatttttgtatttttagtagagatggggtttcactatgttggccaggctggtcttgagctcctgacctcaagtgatctgcctgccttggcctcccaaagtgttgggattacagatgtgagccacctgcccggacccctatttaatgtatagtttttgttaaagttatatcagaattctagctgaatgatatttagagtccttgttcctgctttgtacctgggacactgccttgttactgatatggctttgaggagtagaggaacaccaggttttttgttttgagttgaattagataaaacgacacggacacacgtggagtggttttaaggagcagagcgtttaataggcaagaagggagaaggcagaaggaagaagctcccccttacacagacagagggaggggggctctaaagctgaaagaggagaccttacattctgacaatactagccagttttatgtgacggctggagggggtggtgtcttatttgcatagggctcagaggattggtttgaccaggcatgtcatttagccctcaagaaaactggccctcccaccccagtcctttaatacacaaatgcaggatgccatgacattttacacacggggttatgtgggggcggccatgctgttaggtacctgatggagcaagggcaagaggacaacggtgggaatcgccatgttgggtggaccctcttgcatttgcatcttaaaggttgccagcctttaagagccagggcttttatgctagacaagaaatttttctggagctacgaaaaaccttccaaggaccacttttcctctccatttgcctaaaataatttcttaataactcgtgtggagtagaggggtatttctttttttctttttgttagtcctgtcctgcattctcttaaaaaatcctatctataaaaaatctcagccgggcgtggtggctcatgcctgtaatcccagcactttggaaggcccaggcgggcggatcacctgaggtcaggagttcaggaccagcctcgccaacatgttgtgaaaacccatctctactaaaaataccaaaaattagctgggcatagtggcgggcacctgtaatctagctactcaggaggctgagacaggagaatcgcttgaacccgggaggcggaggttgcagtgagctgagatcacgccattgcactgcagcctgggcaacgagaacgaaattccatctcaaacaacaacaacaaaatctcgtttttcaggttaagtccctagttgtgaaagcttttggtagggccagtttttttttcttcttcgttttaatttccctcatttgagaatgttgtagtcatcattgggtgtcatcattcaccagtttgtgaagggagttaaaggaaagtgcattcctctcccatcttttctttctttggggtttaataaattgtgggaaactaagactgtgttctagactgtacaccatgcagtttatattatgatcttctgtcatctttgcagcctcagattccatttttagctaagactggggttttaaataacttgtttaaggttcctacaactaattgtcacaattggaattcaaacaattctaggtatttttgactacaaagatctaagatctttgcagagcaagcctatctgatgcttaaaaaaatatatattttttaaatttttgagacagtctctcactccgttgcccaggcgggagtgcagcgcatgatcatggcttactgcaacctcaacctcctgggttcaagcaatccttcctcctcagccttgagagttagctgggactacaggtgtgcaccaccacacctggctaattttttttactttttttttttcagagatgagatcttggcctgttgcccaggctggtctcaaaccgctgggcttatgtgattctcctgctttggctcccagagtattgggattacaggcatgagccaccacctccagcctgatgctttttaaatatatagtatttaggtctggtgcagtggctcatgcttgtaatcccagcactttgggaggctgaggcgggcggatcacaaggtcaggagatcgagaccatcctggctaacacggcgaaaccccgtctctactaaaaatacaaaaaattagccgggcgtggtggcgggcacctatagtcccagccactggggaggctgaggcaggagaatggcgtgaacccaggaggtggagcttgcagtgagccgagatggtgccactgcactccagcctgggtgacagagcgagactctgtctccaaaaaaaaaaaaaaaaaaaaaaaatatatatatatatatatttatatttaaataatgtataaatatataatatataattataaatctattatatattaatgtatattatatattacattgttatatatatttatataattatatatttatataaatataaatatatatatttatataaatataaaaatataattatataaatataaaaatatatatttatgtaaatataaatgggcaggcacctgtatatattatatatattactatttatataaatataaatatatattttaaatatttattttatatattttaaaaatatatatatagagagataatttaatagtttctggggcattcttttgcgaacattagccaaaactttaaaaaccactcccaatattgcattttttcatggtattttttatagtatttttatagtatcctaggacaggagttggcaaactttctgtaaagagccacatagttaattatttgggctctgccgggccatggtttctgtcacagctactcagccccgctcttgtaatgcaggagcaactgtagacaacaagtcaacaaataggcatggctgtgttcaataaaactttatttataaaagtcgatgggtgatgggccacagtttgcagacccctaccgtagagtatgttttctgagatttaatgtttcttgtgatttacccccttattctaaaattagtgcactaaagactttagttagttgaagtatttggtttgttgggttactttgttagtgttaattgtatcctaacttgacttgtgattctaatctgattggtagtagagcccttgttaggaatttgagctgcaacttgatgaatgttgcttttactctccttcctaacattactctaaaaaagtcttttgatgtcagaggctgtaaaataatatactttgtttctgtttttaaaactgatacagatatggaaatcatttaatctaagctccttttctagatgaagtagctacagcctttagaagttaaatgatatgggctgggcgaggtggctcacaggtgtaatcccagcattttgggaggccgaggtggcggatcactagaggtcaggatttcgagaccagcccagccaacatgacgaaaccccgtctccactaaaaacataaaaattagccgggtgtggtagtggacacctgtaatctcagctacttgggaggctgaggcaggagaatagcttgaaccccggaggcggaggttgcagtgagctgagatcatgccactgcatttcatcttgggtgacagagcaagactcttgtctcaaaaaaaaaaagggccgggcatggtggctcacacctgtaatcctaacactttgggaggccaaggcggttgaattgcttgaggtcaggagttcaagaccagcctggccaacatggtgaagccctgcctctactaaaaatacaaaaattagccaggcatggtggcatgcgcctgtagtcccagctacttgggaggctgaggcaggagaattgcttgaacttgggaggtgtaggttgcagtgagctgagatcaggccactgcactccagcctgggtgatggagcaagattccatctcaaaataaataaaataagttaaatgatgttgtttaaggttaaattagctacttagtggcaagtgtagaataagccatatcccgacttctagactttttccaattgtagccttctgcttatatatgctcctacccttagccactgacagcaaatattattgccctgaaggtcttactaggttcttatacaatttattgaagtcctgaaacgaagaatcagatgagcagctacagaattttttttaattgtctaaaggctctttaaaagaaaatctcaaagtttattaaaaaacataagtatctatgactcgagacatttttctaagaaaaaaaacccataagtattacaagtgttgtgtcttgttacgtgtattctaccaatttggacatagaaagatgagtgacaggttttagctcaaagtatatataattcagatgagaaacatgcctgcaaaattatgttttgcataatttatgtgtgagactatataattcattattatacaagtagtaaggataattaaaggtggaagagccttttcagttatggtattgacaaaggcttagtcaaagaaggatgaataggattttgaaactgaaattattctagttagagggggaaagtgtggaagttgaaatgccaagattagttgaggaagcaatctagatctggcgggattatccatatttagtaagggaggaggggtgtctagttgaagacagacgaagatgttaatacagtcacactgtaggtactttcgatgccaagaggctttggtgtttttcctttatgcagtggggttttgaacagggaaaataatgtagtaataaccttgaaaccttaatctagtttcagtatgcaggatggatctgaggaggaaatgtgcgtggcaaccggctccgggatggctggctggggggcctagtcttctgcccgccgatctccctcgggaagtcccggatcagagcagcaggcccatcccccaactgttacaccctgctggcagcagcagaggcacagggatgagttaggaaacagatacagaggtcaagaggtgatgtttattaagttatatatttttttcttgttttaggatcttgatgctggtgtaagtgaacattcaggtgattggttggatcaggattcagtttcagatcagtttagtgtagaatttgaagttgaatctctcgactcagaagattatagccttagtgaagaaggacaagaactctcagatgaagatgatgaggtagtattttttttcccctctaattatattggaaaattattaaatattttctatgttcattgactttgagattgaaataatattattcagatttcacttgaaatctttacctcttgatttgtttaaactaacacattggtttgtggacttgaggatttcatagttctttatcatctgatttatattattatattactactaattgccaagaagtcaatagacctcaatgaacatgcttattataatggtctgttcacttttaaaaacatataattcaactactgttttaatattaacttactttctataaaagtaaaacatgcatacagttaaagtcaagtagtacccttagagatctgtttcccagaagtgactgcctttaacatttctagctatttccctattatttaatatctccatattatttatttatgaagtaaaaccacctagctgaatgttttgttttattcatcctaaacatcctttgtattgacttttaccattgtgggtaaggatttctctctcctccattttttccccctttacactcacttactctatttgatattgtctaaggctttctcatatattgtagtacatgatatttgtttaggacttattactaggaagccttctgattgaaggaaatagggcgatgaattgatgctaatgaatgtgttttattaggtatatcaagttactgtgtatcaggcaggggagagtgatacagattcatttgaagaagatcctgaaatttccttagctgtaagtatacatctacttttttaagaaataaaaatttcattaaggtcaagattaggagactatatctagcttctttctgaaatgaactgatttttataaagttaaaatgtttttgtaaagtctgaataatttaaagcatttttcttttatttgttgtgatgagacctgtagctataatttttatttttaggtgctggaatttgaacttttttttttttttttttaaacagggtcttacccttctcccaagctggagtgcagtggtgcaatctcagtgcactgcagcctccacctcccaggttcaagtgattctcgtgcctcagtctcctgagtagctggaattacaggcatgcaccactataccccactaatttttttatttttagtagagatggggtttcaccatgttggccaggctggtcatgaactcctgacctcaagtgatctgcccaccttggtctctcaaagtgctgggattacaagcatgagtcactgcccagctgaatttgtacattttgatgttattttggaaaatttcagtgtatctccagtatactcatcacccagctttaactattaccaacattttgccaaccttgtcaaacgtaaacttttttttttttcaattgagatagggtcctgccctgtcttccaggctggagtgcagtgatgtgatcatggctcactgcagcccccacctcccaggctcaagtgatcctcccacctcagcctcctgagtagctggaataacaggtgcatgccatcacaccccagctaatttttgtattttttgtagaaatgtcaccatgttgcccaggatggtcttgaactcctgggctcaagtgatccacctgcctcagtctcccaaagtgcaaggattacaggtgtgagccatcacacccagccaaatgtaaacatttttattactgatttgtattatagaatgtggtaggatttgccattaaagaaattaacacttaaatgtttacatctcatgcatacttcactgagttcctgaggtattataggtttttttaaaactattgtgctttagtttttgttcttaatattgcctttattatatttgaataggaaataaattccattttttctgagttatagacagttactaattattcaagtgcaaaaaaggatgaaaattcaagagtttccaaaatttttactgtattagaaaataaataactaattgaatcatttgatgtcaagttgagtaaaatattttagatacttttaattttttaaatctattttaagactcaaattattttagatattcatcttggaatttattggactttttgatgcacttttactcccatattgcaagacctttttctttggttttatgagctgtgaaaaacccccttctataacttgaaaaaagaagaatgaatagtctatctttattgctcctgtcttaacatcatttgtgaggcaatctcaaaatggttacggaaatacctcttacttaagagttttcacttgttaaatgtcctcaggcaagaaccatgcttcagctaaggcaagaagataggttatgtaaaaaggctggggatgtgggagagtttgttatccaaattgcatggtggaaaggtttgtgggataaaacgttgggaaaaggaagaagcattgagcagttacaaagatgagaacacaggaaaggatagacaggtaaaggaaaggatattacggttagtgaccaaggatgataggttttagcagcaatacttgctgtgaaaaatgttttagcatttctcttgtggatggagttagggaatactcagttaagccatggttttagagtacttctaaggtagttctagtcactggtggattaggaagtctttctcgaggaggcaggtttcatctagattgatgggatggactcttggaatagcgcctagggttgagcctttaagggagtggatataggctgcatgacagagtaaaagatcccatagacttgcttcaactaaaggaagcaactgcatttgtatcctgaaacagataactttataggtacatgattaatatcacatcacagttaatatatttttagtttagaatttttcaggatggtaagggtgaaaaaaatgggtgtacttactctactttaggagagactgttacatattgacctttaaaaatctgttttgtgtataattgagacatataacgtgatgttttgacacacatgtaaatagtgaaatgatcactacagtcaagcaaattaatgtaatccattatcttgaatagttaacctttcttgtgtgtatggttaaaatacctaaaatctattcttttagtaaatttccagtataccaatatataactaactatagtcctcatgctgtttacagtgactattttatataaaacatgaaacactgaatattgagccctatgatatactttaccttagacatagcaaagttgctagcattcctgtgactgagcagttaaagggttacagaaactgactgtgtgtcttatttcattgaaggactattggaaatgcacttcatgcaatgaaatgaatcccccccttccatcacattgcaacagatgttgggcccttcgtgagaattggcttcctgaagataaagggaaagataaaggggaaatctctgagaaagccaaactggaaaactcaacacaagctgaagagggctttgatgttcctgattgtaaaaaaactatagtgaatgattccagagagtcatgtgttgaggaaaatgatgataaaattacacaagcttcacaatcacaagaaagtgaagactattctcagccatcaacttctagtagcattatttatagcagccaagaagatgtgaaagagtttgaaagggaagaaacccaagacaaagaagagagtgtggaatctagtttgccccttaatgccattgaaccttgtgtgatttgtcaaggtcgacctaaaaatggttgcattgtccatggcaaaacaggacatcttatggcctgctttacatgtgcaaagaagctaaagaaaaggaataagccctgcccagtatgtagacaaccaattcaaatgattgtgctaacttatttcccctagttgacctgtctataagagaattatatatttctaactatataaccctaggaatttagacaacctgaaatttattcacatatatcaaagtgagaaaatgcctcaattcacatagatttcttctctttagtataattgacctactttggtagtggaatagtgaatacttactataatttgacttgaatatgtagctcatcctttacaccaactcctaattttaaataatttctactctgtcttaaatgagaagtacttggtttttttttttcttaaatatgtatatgacatttaaatgtaacttattattttttttgagaccgagtcttgctctgttacccaggctggagtgcagtggcgtgatcttggctcactgcaagctctgcctcccgggttcgcaccattctcctgcctcagcctcccaattagcttggcctacagtcatctgccaccacacctggctaattttttgtacttttagtagagacagggtttcaccgtgttagccaggatggtctcgatctcctgacctcgtgatccgcccacctcggcctcccaaagtgctgggattacaggcatgagccaccgcgtccggcctaaatgtcacttagtacctttgatataaagagaaaatgtgtgaaagatttagttttttgtttttttgtttgtttgtttgtttgtttgttttgagatgagtctctctgtcgcccaggctggagtgcagtgtcatgatctagcagtctccgcttcccgggttcaagccattctcctggctcagcctctggagcagctgggattacaggcatgcaccaccatgcccagctaatttttgtatttttagtagagatagggtttcaccatgttggccaggctggtcacgaactcctgacctcaagtgaggtcacccgcctcggcctcccgaagtgctgggattgcagatgtgagccaccatgtccagccaagaattagtatttaaattttagatactcttttttttttttttttttttttttttgagacagagtcttgctccatcacccatgctagagtgcagtggagtgatctcggctcactgcaacttccgccttctgggttcaagctattctcctgcctcagccttccaagtaactgggattacaggcatgtaccaccataccagctgatttttttgtatttttagtaaagacagggtttcaccatgttagccaggctgatcttgaactcctaaactcaagtgatctactcacctcagcctcccaaaatgctgggattacagatgtgaggcacctggcctcagatttttgatactcttaaaccttctgatccttagtttctctctccaaaatactctttctaggttaaaaaaaaaaaggctcttatatttggtgctatgtaaatgaaaatgttttttaggttttcttgatttaacaatagagacagggtctccctgtgttgcccaggctggtctcgaactcctgggctcaagagatcctcctgtcttggcctcgcaaagtgctaagtaggattacaggcgttagccaccacacccggctgtaaaaatgtacttattctccagcctcttttgtataaaccatagtaagggatgggagtaatgatgttatctgtgaaaatagccaccatttacccgtaagacaaaacttgttaaagcctcctgagtctaacctagattacatcaggccctttttcacacacaaaaaaatcctttatgggatttaatggaatctgttgtttccccctaagttgaaaaacaactctaagacactttaaagtaccttcttggcctgggttacatggttcccagcctaggtttcagacttttgcttaaggccagttttagaaacccgtgaattcagaaaagttaattcagaaatttgataaacagaattgttatttaaaaactaactggaaagattgttaagttctttctgaattattcagaaattatgcatcattttccttcaagaatgacagggtcagcatgtggaattccaagatacctcttgacttcctctcaagctccgtgtttggtcagtggaggcccatccgagctcagcactgagaagtgttagtttctttgggacccatctaccctgaccacatcatgatgttcatctgcagctgttgcaaggtgttcagattgtataaacataaatgtcacaaaaactttaaaagaagtgcaattctcaaaaggttaggtggactaaagcattctgtaaagcaactgctaataatgagcttacagtggatttgaatttgaaaaatatagtaacaagcctgtcaaatatctgcaagaactatggaataaaactactgatgcagtgaagacagttgaaaagatcaaacaaatgccaagctatatttataatgaacaaattcaagaaaaaggactacggaaagttcaggacatcaaagaagtcaggcaaaactcatcttgacccctgttgcaggcaaaggaacgcagctggaagaaaagatgatataacagttaacaggatgcagacatggcagaggtttcctaaaaatctcattatctataaccatttctatatttacatttgaaaatctcctttggagacttagaacctctaaattattgacttattttttatataaggtcactccgatgaaaggtgattacaaaatcatctacattgctgtctacaaaacagataatatggatgtttgatcgcatctcattgttaactctttactgatatgtttgtaaatacagaagtgaaatgtggacataaaatagttacgctatttggttaatggtactagacaacatgtaattaatgacattcaaaaatttatggctagtgatatatataaagtaaaattttctttgcagtaaaatatgccctttattatagaagggaggatataaggaaccaacagtttgtatgaaaatagctcaaataatatcttttattttgattttaatatttcttattttggtttattagtgtcttagaacaaaatggccttatataatgaagcctagttatgctggactgttttgatctcttttaattgttctgacagatagttggggatgagagccgaataaggtttgcctgaaataactgacactatataatttctgctttggcaaatactaagttctaacttgtcattcctggtagaacaagctttatttttcgagcctagcaatgatctagaagcagatgttatctcagtgccttttgcaatttgttgtgtgggtttttttttttttaaagccacacaataattttggaaaacaatgtatgggtagaacatgtgtctgttaattgcacacaaaaccacttttaatgggtacagagttaaatttgaaggaataagttctagctgaagtattatgaactccaaataatgctttgaggacctccaaaggtaaaagtactaatccctttggccatttattgagagagagagagagagagagtagggtgactatagttaatgtattgaatgttcttgctacaaataaatgatatttgagctgatgggtgtgctaattacactgatttgatcaatacccattgtatgtgaaacagtacatacaccatatttacaattatgtatttaacatttaaaatttctaatataagtatctctcaaactgtggattaacttcttgatttatatttaaatatgaatcttaagcaaaacagtgaaaataaccatcttgatttagtgtttttctcccatatgtgaattgtatatacttaggtgaagacaataaaatcaactgaactgtaagcttagaataggactgaggtaattctgcacagcaactttactaatggtacattgttgcttcaaaactctctctctctctctctgtctgtctcaataaatggccaaagggattagtagtttacctgtggaggtcctccaagcattatttggagttgataatacttcagctacaaccaagcagaatctcttttttttggaggtcctcgaagcattatttggagttgataatacttcagcttcaatttggagttgataatatttcagctagaacctagtagaatctgtttttttcctttggaggtcctcaaagcattattggagttcataatactgaagctagaaccaagcagaatctgtttttttctgaggagtatcggtagcataaatgtgattataaacatagtacacttgatatatggaggcagtgacagctatttttacaaaatttaaatctgcaaatggattcaacatgtttatgggttattaaaatggcctgatttcttaggttctttatagtacacgtgttgaaaatatatgattaagaattgtttcaagaatgcaattatttgatcttaaatttttatgagttgttaaaatagaaattatttgaatatcatatatttgggtaacaaaaggcacaagtctgaatgtgtttctttttctggaatggccatgcctgcccactctagaaatacaaatatcacttgggcagcttgaagcagtggagcctcaatgagaccacctgaagaatgtggtcccagttagtagagtaagaaaggctggttctcccttttttttttgggtccctggccagcctggcctaagtgttcgtgattggtctataagggaggtacctggcacagggaggggagtttgggttagccaccgtaccacttgtcagcgtgaaaagtaagattgtactggcctgtttagttttcggcctcttctttgaaagttccaccaagctgggaacctcttgattgtgaggcacaaatgtaagtacatcagaaaaaaacaaaaaaactggctttaaagcaggagcttgtgggcccctaagccagacggggactagcttttggcattatataattaagattttttaaatccttaataagggttttattttatttttatttattttttgagacggagtcttgctctgtggctcaggctggagtacagtggtgcaatcttggctcactgcaacctctgcctcctggctgtgttcaagtggttctgcttcagcctcccaagtagctggggttagagcaccctgtcaccacgccccgctaatttttgtatttctagcagagatgaagtttcactatgttggccaggctgggctcaaactcctgacctcaagtgatctgcccgccttggccccccaaagtgctgtgattacaggcgtgagccgccacgcccagcctaataagggttttaaagataattagtgtgtaggtctgtaggcttatgatggtaaccacaagttgttaatggcattgtgaaaagtttttagttgcgctttatgggtggatgctgaattacattttgatttgatacttataaaaagaaaaagtatttcttcagcttaaaaaattgtttaaaagtttgtgatcatattgtctaccatgtagccagctttcaattatatgtaagagggactttttgacatttacaaataatactttgaggtagatatctgaaagcaccagcacttggaaggtgttcagaagtaacaaattataaaatgagctaacaaacgaaaggcaaaataaaaccgtaaagcaagcagatgggaggcgtgttcagtaacttattcataatgcatctgaaatgattgctgtactcaaatatttaacgttagagtaatagtattttgaatgaaaaccatagttgattgtctttagagagaggagtggtactgaaacatacttgaattcgtattgctttcctttaaagctctcctttaaagactttaaaaaaaattcgataggcattttcatgtttcagtcctacaatcccacatctctgctgccttcagaatgctacaacttagatgtccagccaacagcttaaagccaatttataaaaatagcatctttcctaattccaaaatttcaccttttgtttgttttgttttgagatgcggtcttgctctgtcgcccaggctggaatgcagtgctgcaaacatgactcactacagcctcaacctcctgggctcaagcaatcctcccacctcagcctcccaagtagctggggaccacaggtgcaagccaccaggtccagctaaccttccccccacctcccccgaccccgctgccacccgccctgagacagagtcttgctctttcacccagactggagtgcagtggtgcaatctcggctcattgcaacctccacctcccaggttcaagcaattctgcctcagcctcctgagtagctggaattataggtgctcgccaaccacacctggctaattttttttgtatttttagtagagatggggtttcagcatgttgtccaggctggtctcgaactcctgacctcatgatccgcccacctcggcctcccaaagtactgggattacaggcgtgagccaccgtgcccggcctaatttttgtattttttgtagagacagtttcaccatgttgcccaggctggtctcaaactcctggggtcaagtgatctgcccgtcttggcttcccaaagtgctgagattacaggtgtaagccaccacgccaagcccaaaatttcaccttttaaatttattccatttattttgtaggtgaatttcatttatttctcagggttaaattttagcgcttttgcctgtgtctatttttggttcacacctccccagcccactgtcctgtattaagtaggccttccttcaagatcacagtaatatctccctaaatggatttcactacgtttggtcctatttttggttcagttatagtttacagataccatcatgttgcttccctgatttaaatattgggggaaaaacttgctttttggattttatctctgatgttctactggattattttagacttttagaacactatgaaatgggtgcttgcttttcacttttcaaaccttttttgcttaaacaaagttcataagcttattgtagtgggaagttcaaagtcacagatctggtacttactcgcctagtgaccttagagacaataaatctatagagcctagtatggggtctggcaggtagtaagcacttttaatgaatggaagtttaatattctgtttgcatccactcgaccataatcaccccaaatccagcttaggtagccttgaattaacccctactccaccttgaagttttttatttgttttttgctgagacagggtctcattctgtcacccaggctggagtatagtggcgcaaacatgactcactgcagcctcctgagtagctgggaacacaggcctgttgccaccatgcctggctaatatatatattatatataatatacatatattacatatatatatataatacatatgtgtttatgtatgtatgtgtgtgtacattatatatatatatatactttttttagaggcagagtcctgctatgttgcccaggctggccttgaactcctgggctcaagcaatcctcgtgtcttgaccttgacctctcaaaatgctgggattacaggtgcgagccactgcatctggtgaattaagccttttttatacactcaactctgaggtattctgttcataccaatatgttcctttgtatcttcttgccatagcaggttgtaacatccttttgtatctcctttctttttttttttttttttttgagacggagtcccgctgtttagcccaggccggattgcagtggcgcaatctcggctcactgcaagctccgcctcccaggttcacgccattctcctgcctcagcctcccgagtagctgggactacaggcgcccgccaccgcgcctggctaattttttgtatttttagtagagacggggtttcaccgtgttagccaagatggtctcgatctcctgaccttgtgatccgcccgcctcggcctcccaaagtgctgggattacaggcgtgagccaccgcgcccagccgtatctcctttcaaatgtcaaataaatacattgtgtatacagtagtaaaggatgttgattggcattgaaagcaactatcaagttcttgttgatttagaagacaaaaagacaattttaaaataacatcctgggccaggctctgtgactcacgcctgtaatctcaacactttgggaggccaaggaaggaggatcacttgaggccaggagtttgagatcagcctgggcaacataatgacaccctgtatccaaaaaattgtggtggcatgcatgggagactgaggtgggaggatcacttgagcccaggagtccaatgttacaatgagctatgattgcgccactacactctgcttaggagacagatggagacttgtctcttaaaaaaataaaaaataacagtatgttcattaaacattaatctcactgattgtgattttttgtttgtttttttgagatggcgtctcgctctgttgcccagggtggagtgcaatggcgtgatcttggctcactgcagcctccacctcctgggttcaagtgattctcctgctttagcctcccaagtagctgtgttatttcagctaattttttcatttttagtggagatggggttttgccatgttggccaggctggtctcgaattcctgacctcatgtggtccacctgcctcggcctcccaaagtgctgggattacaggcattgagccactgtgcctggcctgattatgattttttaaagtccccccccaaattattgtttgtgcaataaatggcaaaaaagaagcattctaagaaaaaagtagtcttaaaagttgatatggtgtcagaattgtaagagagagggtcttggctgaaaagcctttttagaaaaaattgctccctacaaaaaaggccttttctaccttttctcacatttgtttctttttataggaggcatctgagaagaccaaatctcttcaaagttaagctttttgtttttttgggggggacgaagtctcgttctgtcacccaggctggagtgtagtggcatgatctcggctcactgcaacctctgcctcctgggttcaagcaattctcctgcctcagcctcccgagtagctggaaattcaggcgcctgccaccatgcccagctaatttttgtatttttaatagaggcagggtttcactatattggccaggctggtctcgaactcctgacctcatgatccgcctgcctctgcctcccaaagtgttgggattacaggcatgagccaccgcacccagcccaaagttaagcattttttaaccacaaggtgggaggtggaagtatctcgttggaagactaaaggtgtccactaacggtagacccttttttttttttttttgagatggagtcttactctgttgcccaggctggagtgcaatggcgcgatctcagctcactgcaagctccgcctcccaggttcaagtgattcttctgcctcagcctcctgagtagctgggattacaggtgcatgccaccatgcctggctatttttcatatttttagtagagatatggttttgccatgttggccaggctggtcttgaactcctgatttcaggtgatctatgtgtcttggcctcccaaagtgctgggattacaggcatgagccattgcacccggcctcaaaattatttctaatgtgtgcaaagatatctgataaaaactacatgactnnnnnnnnnnnnnnnnnnnngctggagtgtagtggcatgatctcggctcactgcaacctttgcctcctgggttcaagcaattctcctgcctcagcctcccgagtagctggaaattcaggcgcctgccaccatgcccagctaatttttgtatttttaatagaggcagggtttcactatattggccaggctggtctcgaactcctgacctcatgatccgcctgcctctgcctcccaaagtgttgggattacaggcatgagccaccgcacccagcccaaagttaagcattttttaaccacaaggtgggaggtggaagtatctcgttggaagactaaaggtgtccactaacggtagacccttttttttttttttttgagatggagtttcactgtcgcccagactagactgaagtggcgcgatctcggctcactgcaacctctgccccccaggttcaagtgattctcctgcctcagcctctagagtagctaggattacaggggtccaccaccacacctggctagtttttgtattttcagtagagacggggtttcaccatgttggccaggctggtctcgaactcctgacctcaggtgacccacctgctttggcctcccaaagtgctgggattacaggtgtgagccactgcgcctggccgtttttttttttgttgttgttgttgtttgttcgtttgtttgttttgagacagtctctcactccaggttggagtgcagtggcactatctcagctcactgcaaactctgcctcccaaggtcaaatgattctcctgcctcagcctcccagtagttggaattacaggcgcatgccaccatgcatggctaattttttgtatttttagtagagacggggtttcaccatgctagccttgaactcctgaccttgtgatctgcctgcctcggcctcccaaagtgctgggattacagacatgagccaccatgctagccttgaactcctgacctcgtgatctgcctgcctcggcctccca

SEQ ID NO: 173 - DNA, 2372 bp, Homo sapiens
gcaccgcgcgagcttggctgcttctggggcctgtgtggccctgtgtgtcggaaagatggagcaagaagccgagcccgaggggcggccgcgacccctctgaccgagatcctgctgctttcgcagccaggagcaccgtccctccccggattagtgcgtacgagcgcccagtgccctggcccggagagtggaatgatccccgaggcccagggcgtcgtgcttccgcagtagtcagtccccgtgaaggaaactggggagtcttgagggacccccgactccaagcgcgaaaaccccggatggtgaggagcaggcaaatgtgcaataccaacatgtctgtacctactgatggtgctgtaaccacctcacagattccagcttcggaacaagagaccctggttagaccaaagccattgcttttgaagttattaaagtctgttggtgcacaaaaagacacttatactatgaaagaggttcttttttatcttggccagtatattatgactaaacgattatatgatgagaagcaacaacatattgtatattgttcaaatgatcttctaggagatttgtttggcgtgccaagcttctctgtgaaagagcacaggaaaatatataccatgatctacaggaacttggtagtagtcaatcagcaggaatcatcggactcaggtacatctgtgagtgagaacaggtgtcaccttgaaggtgggagtgatcaaaaggaccttgtacaagagcttcaggaagagaaaccttcatcttcacatttggtttctagaccatctacctcatctagaaggagagcaattagtgagacagaagaaaattcagatgaattatctggtgaacgacaaagaaaacgccacaaatctgatagtatttccctttcctttgatgaaagcctggctctgtgtgtaataagggagatatgttgtgaaagaagcagtagcagtgaatctacagggacgccatcgaatccggatcttgatgctggtgtaagtgaacattcaggtgattggttggatcaggattcagtttcagatcagtttagtgtagaatttgaagttgaatctctcgactcagaagattatagccttagtgaagaaggacaagaactctcagatgaagatgatgaggtatatcaagttactgtgtatcaggcaggggagagtgatacagattcatttgaagaagatcctgaaatttccttagctgactattggaaatgcacttcatgcaatgaaatgaatcccccccttccatcacattgcaacagatgttgggcccttcgtgagaattggcttcctgaagataaagggaaagataaaggggaaatctctgagaaagccaaactggaaaactcaacacaagctgaagagggctttgatgttcctgattgtaaaaaaactatagtgaatgattccagagagtcatgtgttgaggaaaatgatgataaaattacacaagcttcacaatcacaagaaagtgaagactattctcagccatcaacttctagtagcattatttatagcagccaagaagatgtgaaagagtttgaaagggaagaaacccaagacaaagaagagagtgtggaatctagtttgccccttaatgccattgaaccttgtgtgatttgtcaaggtcgacctaaaaatggttgcattgtccatggcaaaacaggacatcttatggcctgctttacatgtgcaaagaagctaaagaaaaggaataagccctgcccagtatgtagacaaccaattcaaatgattgtgctaacttatttcccctagttgacctgtctataagagaattatatatttctaactatataaccctaggaatttagacaacctgaaatttattcacatatatcaaagtgagaaaatgcctcaattcacatagatttcttctctttagtataattgacctactttggtagtggaatagtgaatacttactataatttgacttgaatatgtagctcatcctttacaccaactcctaattttaaataatttctactctgtcttaaatgagaagtacttggttttttttttcttaaatatgtatatgacatttaaatgtaacttattattttttttgagaccgagtcttgctctgttacccaggctggagtgcagtgggtgatcttggctcactgcaagctctgccctccccgggttcgcaccattctcctgcctcagcctcccaattagcttggcctacagtcatctgccaccacacctggctaattttttgtacttttagtagagacagggtttcaccgtgttagccaggatggtctcgatctcctgacctcgtgatccgcccacctcggcctcccaaagtgctgggattacaggcatgagccaccg

SEQ ID NO: 174 - DNA, 1476 bp, Homo sapiens
atgtgcaataccaacatgtctgtacctactgatggtgctgtaaccacctcacagattccagcttcggaacaagagaccctggttagaccaaagccattgcttttgaagttattaaagtctgttggtgcacaaaaagacacttatactatgaaagaggttcttttttatcttggccagtatattatgactaaacgattatatgatgagaagcaacaacatattgtatattgttcaaatgatcttctaggagatttgtttggcgtgccaagcttctctgtgaaagagcacaggaaaatatataccatgatctacaggaacttggtagtagtcaatcagcaggaatcatcggactcaggtacatctgtgagtgagaacaggtgtcaccttgaaggtgggagtgatcaaaaggaccttgtacaagagcttcaggaagagaaaccttcatcttcacatttggtttctagaccatctacctcatctagaaggagagcaattagtgagacagaagaaaattcagatgaattatctggtgaacgacaaagaaaacgccacaaatctgatagtatttccctttcctttgatgaaagcctggctctgtgtgtaataagggagatatgttgtgaaagaagcagtagcagtgaatctacagggacgccatcgaatccggatcttgatgctggtgtaagtgaacattcaggtgattggttggatcaggattcagtttcagatcagtttagtgtagaatttgaagttgaatctctcgactcagaagattatagccttagtgaagaaggacaagaactctcagatgaagatgatgaggtatatcaagttactgtgtatcaggcaggggagagtgatacagattcatttgaagaagatcctgaaatttccttagctgactattggaaatgcacttcatgcaatgaaatgaatcccccccttccatcacattgcaacagatgttgggcccttcgtgagaattggcttcctgaagataaagggaaagataaaggggaaatctctgagaaagccaaactggaaaactcaacacaagctgaagagggctttgatgttcctgattgtaaaaaaactatagtgaatgattccagagagtcatgtgttgaggaaaatgatgataaaattacacaagcttcacaatcacaagaaagtgaagactattctcagccatcaacttctagtagcattatttatagcagccaagaagatgtgaaagagtttgaaagggaagaaacccaagacaaagaagagagtgtggaatctagtttgccccttaatgccattgaaccttgtgtgatttgtcaaggtcgacctaaaaatggttgcattgtccatggcaaaacaggacatcttatggcctgctttacatgtgcaaagaagctaaagaaaaggaataagccctgcccagtatgtagacaaccaattcaaatgattgtgctaacttatttcccctag
